United States Patent Application Publication US 2026/0240958 A1 - sequence listing, part 6

SEQ ID NO: 6492 - RNA, 5797 nt, synthetic construct
  source 1..5797: mol_type = other RNA
aggaaataagagagaaaagaagagtaagaagaaatataagagccaccatggcccctaagaagaagcgtaaagtgagccggatggaacgcctcgtctacgaggtgcggcagaagtgcagaaacatcgaggacatctgcatctcctgcggatctctgaacgtgaccctggagcacccactgttcatcggcggcatgtgccagaactgtaaaaactgttttctggagtgtgcctatcaatacgacgatgacggctaccagagctactgcaccatctgttgcggcggaagagaggtgctgatgtgtggaaataacaactgctgccggtgcttctgcgtggaatgcgtggacctgctggtgggccccggcgccgcccaggccgctattaaggaagatccttggaactgctacatgtgcggccacaagggcacatacggcctgctgagacggagagaggactggcctagcagactgcagatgttcttcgccaataaccacgaccaggagttcgacccccctaaggtgtaccctcccgtccccgccgagaagagaaagcccatccgggtcctgagcctgttcgatggcatcgccaccggtctgctggtgctgaaggacctgggcatccaggtggataggtacattgcctccgaggtgtgcgaggactccatcaccgtgggaatggtgcgtcatcagggcaagatcatgtacgtgggcgacgtgcggagcgtgacacagaagcatatccaggagtggggccctttcgacctggtgatcggcggcagcccttgcaatgacctgagcatcgtgaacccagcccggaagggcctgtacgagggaaccggcagactgttcttcgagttttacagactgctgcacgacgcccggcctaaggaaggcgacgaccggcccttcttttggctgttcgagaatgtggtggccatgggagtcagcgacaagcgggatattagccggttcctggagagcaaccccgtgatgatcgatgccaaggaagtgagcgccgcccaccgggccagatacttctggggcaatctgcctggcatgaacagacccctggccagcaccgtgaacgacaagctggagctgcaggagtgcctggagcacggccggatcgccaagttcagcaaggtgagaaccatcaccacccgaagcaacagcatcaaacaaggcaaggaccagcactttcctgtgttcatgaacgagaaggaggacatcctgtggtgtaccgagatggagagagtgttcgggttcccagtccactacacagatgtcagcaacatgtctagactggccagacagagactgctgggaagaagctggtccgtccctgtgatcagacacctgttcgcccctctgaaggagtacttcgcctgcgtgagcagcggcaacagcaacgccaacagccggggccccagcttctctagcggcctggtgccactgtccctgagagggagccacatgggccccatggagatctacaaaaccgtgagcgcctggaagcggcagcctgtgcgcgtgctgagcctgtttcggaatatcgataaagtcctgaaaagcctgggattcctggagagcggctctggctccggcggtggcaccctgaagtacgtggaggatgtgacaaacgtggtcagacgggatgtggagaagtggggccccttcgatctggtgtacggcagcacccaacccctgggcagctcttgtgaccggtgccctggctggtacatgtttcagttccaccggatcctgcagtacgccctgccgagacaggagtcccagcggccattcttttggattttcatggacaacttgctgctgaccgaggatgaccaggaaactaccactcggttcctgcagaccgaagccgtgaccctgcaggacgtgagaggccgggactaccagaacgccatgcgggtgtggtccaacatccctggactgaaaagcaagcacgcacctctgacccctaaagaagaggagtacctgcaggcccaggtgcggagcagaagcaagctggacgcccctaaggtggatctgctggtgaagaattgcctcctgcccctgagagagtacttcaagtatttcagccagaatagtctgcccctgggcggcccaagcagcggcgcccctcctcccagcggcggcagcccagccggctccccaacctctaccgaggagggcacctctgagtccgccacccccgagagcggccctggcacctccaccgagcccagcgagggcagcgcacccggcagccctgccggcagccccacctccacagaggagggaaccagcaccgagcccagcgaaggcagcgccccaggcaccagcaccgagcctagtgagggcggctctggcggcggcagcgcccaggagattaaacggatcaacaagatcagaagaagacttgtgaaagacagcaacaccaagaaggccggcaagacaggccccatgaaaaccctgctggttagagtgatgacacccgatctgagagagcggctggaaaacctgagaaagaagcctgaaaatatcccccagcccatcagcaatacatctagagccaacctgaataagctgctgaccgattacaccgaaatgaagaaggcgatcctgcatgtgtactgggaagagttccagaaggaccctgtgggcctgatgagccgggtggcccagcctgccagcaagaagatcgatcagaacaagctgaaacctgagatggacgagaagggcaacctgaccaccgccggctttgcctgctctcagtgtggccagcccctgttcgtgtacaagctggagcaggtgtctgagaagggcaaggcttacaccaactacttcggacggtgcaatgtggccgagcacgaaaagctgatcctgctggcccagctgaagcccgagaaggatagcgacgaagccgtgacatatagcctgggaaagtttgggcagagggccctggatttctacagcattcatgtgaccaaggagtccacccaccccgtgaagcccctggcccagatcgccggaaacagatacgcctccggacctgtgggaaaggccctgagcgacgcatgtatgggcacaatcgcctccttcctgtctaagtaccaggacatcatcatcgaacaccagaaggtggtgaagggcaaccagaagagactggagagcctgcgggagctggccggcaaggaaaacctggaataccctagcgtgaccctgccacctcagcctcacaccaaggagggcgttgatgcctacaacgaagtgatcgcccgggtgcgaatgtgggtgaacctgaacctgtggcagaagctgaagctaagcagagatgatgccaagcctctgctgagactgaagggattcccttcctttcctctggtcgagagacaggccaacgaagtggactggtgggacatggtgtgtaacgtgaagaagctgatcaacgagaaaaaggaggatggcaaggtgttttggcagaatctggctggctacaagagacaggaagccctgagaccatacctgagcagcgaggaagatcggaagaagggaaagaaattcgctcggtaccagctgggcgacctgctgctgcacctggaaaagaagcacggcgaggactggggaaaggtgtacgacgaggcctgggagcggattgacaagaaagtggaaggcctgagcaagcacatcaagctggaagaggaacggagaagcgaggacgcccagagcaaggccgccctgaccgactggctgcgggctaaggccagcttcgtgatcgagggcctgaaggaggccgacaaggacgagttctgcagatgcgagctgaagctgcagaagtggtacggggacctgcggggaaagcccttcgccatcgaagccgagaacagcatcctggacatcagcggcttcagcaagcagtacaactgtgccttcatctggcagaaggacggcgtgaagaagctgaacctgtacctgatcatcaactacttcaagggcggcaagctgcggttcaagaagatcaaacctgaagccttcgaagccaacagattctacaccgtgatcaacaaaaagagcggcgagatcgtgcccatggaggtgaacttcaacttcgacgaccccaacctgatcatcctgcctctggcctttggcaagagacagggcagagaattcatctggaacgacctgctgtccctggaaaccggcagcctgaagctggccaacggaagagtgatcgagaagacactgtacaacagaagaacccggcaggatgagcctgccctgttcgtggccctgaccttcgagcggcgggaggtcctggactcctccaatatcaaaccaatgaacctgatcggcgtggcaagaggcgaaaacatccccgccgtgatcgccctgaccgaccccgagggctgcccactgagccggtttaaggatagcctgggaaacccaacccacatcctgagaatcggcgagagctataaggagaagcagcggaccatccaggccaagaaggaggtggagcagcggagagccggcggctacagccggaagtacgccagcaaagccaagaatctggcagacgatatggtgagaaacaccgctagagatctgctgtactacgccgtgacccaggatgccatgctgatcttcgccaacctgagccggggcttcggccggcagggcaagcggaccttcatggccgagagacagtacacacggatggaggactggctgaccgccaagctggcctacgagggcctgagcaagacctacctgtccaagacactggcccagtacacctccaagacatgcagcaactgtgggtttaccatcaccagcgccgactacgacagggtgctggagaagctgaagaagacagcaacaggctggatgaccacaattaacggcaaggagctgaaggtggagggccagattacctactacaacagatacaagagacagaacgtagtcaaggacctgtccgtcgagctggatagactgagcgaagaatctgtgaacaacgacatctcctcctggacaaagggcagaagcggagaagctctgagcctcctgaagaaaagattctcccatagacccgtgcaggagaagttcgtgtgcctgaactgcggcttcgagacacacgcagccgagcaagccgccctgaacatcgccagatcctggctgttcctgcggagccaggagtacaagaaataccagacaaacaagacaaccggcaacaccgataagagagccttcgtcgagacctggcagtccttttaccggaagaagcttaaggaggtgtggaaacctgccgtgcggtctggcggatctggcggaggctccacaagcccccagggccacctgaccttcatggacgtggccatcgagttcagccaggaggagtggaagtgcctggaccccggccagagggccctgtacagggacgtgatgctggagaactacaggaacctggtgagcctgggcatctgcctgcccgacctgagcatcatcagcatgctgaagcagaggagggagcccctgaccctgcagagcgaggtgaagatcgtgaagaaccccgacggcagggagtgcaccagccccaagaaaaagagaaaagtctaagctgccttctgcggggcttgccttctggccatgcccttcttctctcccttgcacctgtacctcttggtctttgaataaagcctgagtaggaaggctagcaaaaaaaaaaaaaaaaaaaaaaaaaaaaaaaaaaaaaaaaaaaaaaaaaaaaaaaaaaaaaaaaaaaaaaaaaaaaaaaa

SEQ ID NO: 6493 - RNA, 5797 nt, synthetic construct
  source 1..5797: mol_type = other RNA
aggaaataagagagaaaagaagagtaagaagaaatataagagccaccatggcccctaagaagaagcgtaaagtgagccggatggaacgcctcgtctacgaggtgcggcagaagtgcagaaacatcgaggacatctgcatctcctgcggatctctgaacgtgaccctggagcacccactgttcatcggcggcatgtgccagaactgtaaaaactgttttctggagtgtgcctatcaatacgacgatgacggctaccagagctactgcaccatctgttgcggcggaagagaggtgctgatgtgtggaaataacaactgctgccggtgcttctgcgtggaatgcgtggacctgctggtgggccccggcgccgcccaggccgctattaaggaagatccttggaactgctacatgtgcggccacaagggcacatacggcctgctgagacggagagaggactggcctagcagactgcagatgttcttcgccaataaccacgaccaggagttcgacccccctaaggtgtaccctcccgtccccgccgagaagagaaagcccatccgggtcctgagcctgttcgatggcatcgccaccggtctgctggtgctgaaggacctgggcatccaggtggataggtacattgcctccgaggtgtgcgaggactccatcaccgtgggaatggtgcgtcatcagggcaagatcatgtacgtgggcgacgtgcggagcgtgacacagaagcatatccaggagtggggccctttcgacctggtgatcggcggcagcccttgcaatgacctgagcatcgtgaacccagcccggaagggcctgtacgagggaaccggcagactgttcttcgagttttacagactgctgcacgacgcccggcctaaggaaggcgacgaccggcccttcttttggctgttcgagaatgtggtggccatgggagtcagcgacaagcgggatattagccggttcctggagagcaaccccgtgatgatcgatgccaaggaagtgagcgccgcccaccgggccagatacttctggggcaatctgcctggcatgaacagacccctggccagcaccgtgaacgacaagctggagctgcaggagtgcctggagcacggccggatcgccaagttcagcaaggtgagaaccatcaccacccgaagcaacagcatcaaacaaggcaaggaccagcactttcctgtgttcatgaacgagaaggaggacatcctgtggtgtaccgagatggagagagtgttcgggttcccagtccactacacagatgtcagcaacatgtctagactggccagacagagactgctgggaagaagctggtccgtccctgtgatcagacacctgttcgcccctctgaaggagtacttcgcctgcgtgagcagcggcaacagcaacgccaacagccggggccccagcttctctagcggcctggtgccactgtccctgagagggagccacatgggccccatggagatctacaaaaccgtgagcgcctggaagcggcagcctgtgcgcgtgctgagcctgtttcggaatatcgataaagtcctgaaaagcctgggattcctggagagcggctctggctccggcggtggcaccctgaagtacgtggaggatgtgacaaacgtggtcagacgggatgtggagaagtggggccccttcgatctggtgtacggcagcacccaacccctgggcagctcttgtgaccggtgccctggctggtacatgtttcagttccaccggatcctgcagtacgccctgccgagacaggagtcccagcggccattcttttggattttcatggacaacttgctgctgaccgaggatgaccaggaaactaccactcggttcctgcagaccgaagccgtgaccctgcaggacgtgagaggccgggactaccagaacgccatgcgggtgtggtccaacatccctggactgaaaagcaagcacgcacctctgacccctaaagaagaggagtacctgcaggcccaggtgcggagcagaagcaagctggacgcccctaaggtggatctgctggtgaagaattgcctcctgcccctgagagagtacttcaagtatttcagccagaatagtctgcccctgggcggcccaagcagcggcgcccctcctcccagcggcggcagcccagccggctccccaacctctaccgaggagggcacctctgagtccgccacccccgagagcggccctggcacctccaccgagcccagcgagggcagcgcacccggcagccctgccggcagccccacctccacagaggagggaaccagcaccgagcccagcgaaggcagcgccccaggcaccagcaccgagcctagtgagggcggctctggcggcggcagcgcccaggagattaaacggatcaacaagatcagaagaagacttgtgaaagacagcaacaccaagaaggccggcaagacaggccccatgaaaaccctgctggttagagtgatgacacccgatctgagagagcggctggaaaacctgagaaagaagcctgaaaatatcccccagcccatcagcaatacatctagagccaacctgaataagctgctgaccgattacaccgaaatgaagaaggcgatcctgcatgtgtactgggaagagttccagaaggaccctgtgggcctgatgagccgggtggcccagcctgccagcaagaagatcgatcagaacaagctgaaacctgagatggacgagaagggcaacctgaccaccgccggctttgcctgctctcagtgtggccagcccctgttcgtgtacaagctggagcaggtgtctgagaagggcaaggcttacaccaactacttcggacggtgcaatgtggccgagcacgaaaagctgatcctgctggcccagctgaagcccgagaaggatagcgacgaagccgtgacatatagcctgggaaagtttgggcagagggccctggatttctacagcattcatgtgaccaaggagtccacccaccccgtgaagcccctggcccagatcgccggaaacagatacgcctccggacctgtgggaaaggccctgagcgacgcatgtatgggcacaatcgcctccttcctgtctaagtaccaggacatcatcatcgaacaccagaaggtggtgaagggcaaccagaagagactggagagcctgcgggagctggccggcaaggaaaacctggaataccctagcgtgaccctgccacctcagcctcacaccaaggagggcgttgatgcctacaacgaagtgatcgcccgggtgcgaatgtgggtgaacctgaacctgtggcagaagctgaagctaagcagagatgatgccaagcctctgctgagactgaagggattcccttcctttcctctggtcgagagacaggccaacgaagtggactggtgggacatggtgtgtaacgtgaagaagctgatcaacgagaaaaaggaggatggcaaggtgttttggcagaatctggctggctacaagagacaggaagccctgagaccatacctgagcagcgaggaagatcggaagaagggaaagaaattcgctcggtaccagctgggcgacctgctgctgcacctggaaaagaagcacggcgaggactggggaaaggtgtacgacgaggcctgggagcggattgacaagaaagtggaaggcctgagcaagcacatcaagctggaagaggaacggagaagcgaggacgcccagagcaaggccgccctgaccgactggctgcgggctaaggccagcttcgtgatcgagggcctgaaggaggccgacaaggacgagttctgcagatgcgagctgaagctgcagaagtggtacggggacctgcggggaaagcccttcgccatcgaagccgagaacagcatcctggacatcagcggcttcagcaagcagtacaactgtgccttcatctggcagaaggacggcgtgaagaagctgaacctgtacctgatcatcaactacttcaagggcggcaagctgcggttcaagaagatcaaacctgaagccttcgaagccaacagattctacaccgtgatcaacaaaaagagcggcgagatcgtgcccatggaggtgaacttcaacttcgacgaccccaacctgatcatcctgcctctggcctttggcaagagacagggcagagaattcatctggaacgacctgctgtccctggaaaccggcagcctgaagctggccaacggaagagtgatcgagaagacactgtacaacagaagaacccggcaggatgagcctgccctgttcgtggccctgaccttcgagcggcgggaggtcctggactcctccaatatcaaaccaatgaacctgatcggcgtggcaagaggcgaaaacatccccgccgtgatcgccctgaccgaccccgagggctgcccactgagccggtttaaggatagcctgggaaacccaacccacatcctgagaatcggcgagagctataaggagaagcagcggaccatccaggccaagaaggaggtggagcagcggagagccggcggctacagccggaagtacgccagcaaagccaagaatctggcagacgatatggtgagaaacaccgctagagatctgctgtactacgccgtgacccaggatgccatgctgatcttcgccaacctgagccggggcttcggccggcagggcaagcggaccttcatggccgagagacagtacacacggatggaggactggctgaccgccaagctggcctacgagggcctgagcaagacctacctgtccaagacactggcccagtacacctccaagacatgcagcaactgtgggtttaccatcaccagcgccgactacgacagggtgctggagaagctgaagaagacagcaacaggctggatgaccacaattaacggcaaggagctgaaggtggagggccagattacctactacaacagatacaagagacagaacgtagtcaaggacctgtccgtcgagctggatagactgagcgaagaatctgtgaacaacgacatctcctcctggacaaagggcagaagcggagaagctctgagcctcctgaagaaaagattctcccatagacccgtgcaggagaagttcgtgtgcctgaactgcggcttcgagacacacgcagccgagcaagccgccctgaacatcgccagatcctggctgttcctgcggagccaggagtacaagaaataccagacaaacaagacaaccggcaacaccgataagagagccttcgtcgagacctggcagtccttttaccggaagaagcttaaggaggtgtggaaacctgccgtgcggtctggcggatctggcggaggctccacaagcagcaaggcccccatcaccttcggcgacctggccatctacttcagccaggaggagtgggagtggctgagccccatccagaaggacctgtacgaggacgtgatgctggagaactacaggaacctggtgagcctgggcctgagcttcaggaggcccaacgtgatcaccctgctggagaagggcaaggccccctggatggtggagcccgtgaggaggaggagggcccccgacagcggcagcaagtgcaccagccccaagaaaaagagaaaagtctaagctgccttctgcggggcttgccttctggccatgcccttcttctctcccttgcacctgtacctcttggtctttgaataaagcctgagtaggaaggctagcaaaaaaaaaaaaaaaaaaaaaaaaaaaaaaaaaaaaaaaaaaaaaaaaaaaaaaaaaaaaaaaaaaaaaaaaaaaaaaaa

SEQ ID NO: 6494 - RNA, 5797 nt, synthetic construct
  source 1..5797: mol_type = other RNA
aggaaataagagagaaaagaagagtaagaagaaatataagagccaccatggcccctaagaagaagcgtaaagtgagccggatggaacgcctcgtctacgaggtgcggcagaagtgcagaaacatcgaggacatctgcatctcctgcggatctctgaacgtgaccctggagcacccactgttcatcggcggcatgtgccagaactgtaaaaactgttttctggagtgtgcctatcaatacgacgatgacggctaccagagctactgcaccatctgttgcggcggaagagaggtgctgatgtgtggaaataacaactgctgccggtgcttctgcgtggaatgcgtggacctgctggtgggccccggcgccgcccaggccgctattaaggaagatccttggaactgctacatgtgcggccacaagggcacatacggcctgctgagacggagagaggactggcctagcagactgcagatgttcttcgccaataaccacgaccaggagttcgacccccctaaggtgtaccctcccgtccccgccgagaagagaaagcccatccgggtcctgagcctgttcgatggcatcgccaccggtctgctggtgctgaaggacctgggcatccaggtggataggtacattgcctccgaggtgtgcgaggactccatcaccgtgggaatggtgcgtcatcagggcaagatcatgtacgtgggcgacgtgcggagcgtgacacagaagcatatccaggagtggggccctttcgacctggtgatcggcggcagcccttgcaatgacctgagcatcgtgaacccagcccggaagggcctgtacgagggaaccggcagactgttcttcgagttttacagactgctgcacgacgcccggcctaaggaaggcgacgaccggcccttcttttggctgttcgagaatgtggtggccatgggagtcagcgacaagcgggatattagccggttcctggagagcaaccccgtgatgatcgatgccaaggaagtgagcgccgcccaccgggccagatacttctggggcaatctgcctggcatgaacagacccctggccagcaccgtgaacgacaagctggagctgcaggagtgcctggagcacggccggatcgccaagttcagcaaggtgagaaccatcaccacccgaagcaacagcatcaaacaaggcaaggaccagcactttcctgtgttcatgaacgagaaggaggacatcctgtggtgtaccgagatggagagagtgttcgggttcccagtccactacacagatgtcagcaacatgtctagactggccagacagagactgctgggaagaagctggtccgtccctgtgatcagacacctgttcgcccctctgaaggagtacttcgcctgcgtgagcagcggcaacagcaacgccaacagccggggccccagcttctctagcggcctggtgccactgtccctgagagggagccacatgggccccatggagatctacaaaaccgtgagcgcctggaagcggcagcctgtgcgcgtgctgagcctgtttcggaatatcgataaagtcctgaaaagcctgggattcctggagagcggctctggctccggcggtggcaccctgaagtacgtggaggatgtgacaaacgtggtcagacgggatgtggagaagtggggccccttcgatctggtgtacggcagcacccaacccctgggcagctcttgtgaccggtgccctggctggtacatgtttcagttccaccggatcctgcagtacgccctgccgagacaggagtcccagcggccattcttttggattttcatggacaacttgctgctgaccgaggatgaccaggaaactaccactcggttcctgcagaccgaagccgtgaccctgcaggacgtgagaggccgggactaccagaacgccatgcgggtgtggtccaacatccctggactgaaaagcaagcacgcacctctgacccctaaagaagaggagtacctgcaggcccaggtgcggagcagaagcaagctggacgcccctaaggtggatctgctggtgaagaattgcctcctgcccctgagagagtacttcaagtatttcagccagaatagtctgcccctgggcggcccaagcagcggcgcccctcctcccagcggcggcagcccagccggctccccaacctctaccgaggagggcacctctgagtccgccacccccgagagcggccctggcacctccaccgagcccagcgagggcagcgcacccggcagccctgccggcagccccacctccacagaggagggaaccagcaccgagcccagcgaaggcagcgccccaggcaccagcaccgagcctagtgagggcggctctggcggcggcagcgcccaggagattaaacggatcaacaagatcagaagaagacttgtgaaagacagcaacaccaagaaggccggcaagacaggccccatgaaaaccctgctggttagagtgatgacacccgatctgagagagcggctggaaaacctgagaaagaagcctgaaaatatcccccagcccatcagcaatacatctagagccaacctgaataagctgctgaccgattacaccgaaatgaagaaggcgatcctgcatgtgtactgggaagagttccagaaggaccctgtgggcctgatgagccgggtggcccagcctgccagcaagaagatcgatcagaacaagctgaaacctgagatggacgagaagggcaacctgaccaccgccggctttgcctgctctcagtgtggccagcccctgttcgtgtacaagctggagcaggtgtctgagaagggcaaggcttacaccaactacttcggacggtgcaatgtggccgagcacgaaaagctgatcctgctggcccagctgaagcccgagaaggatagcgacgaagccgtgacatatagcctgggaaagtttgggcagagggccctggatttctacagcattcatgtgaccaaggagtccacccaccccgtgaagcccctggcccagatcgccggaaacagatacgcctccggacctgtgggaaaggccctgagcgacgcatgtatgggcacaatcgcctccttcctgtctaagtaccaggacatcatcatcgaacaccagaaggtggtgaagggcaaccagaagagactggagagcctgcgggagctggccggcaaggaaaacctggaataccctagcgtgaccctgccacctcagcctcacaccaaggagggcgttgatgcctacaacgaagtgatcgcccgggtgcgaatgtgggtgaacctgaacctgtggcagaagctgaagctaagcagagatgatgccaagcctctgctgagactgaagggattcccttcctttcctctggtcgagagacaggccaacgaagtggactggtgggacatggtgtgtaacgtgaagaagctgatcaacgagaaaaaggaggatggcaaggtgttttggcagaatctggctggctacaagagacaggaagccctgagaccatacctgagcagcgaggaagatcggaagaagggaaagaaattcgctcggtaccagctgggcgacctgctgctgcacctggaaaagaagcacggcgaggactggggaaaggtgtacgacgaggcctgggagcggattgacaagaaagtggaaggcctgagcaagcacatcaagctggaagaggaacggagaagcgaggacgcccagagcaaggccgccctgaccgactggctgcgggctaaggccagcttcgtgatcgagggcctgaaggaggccgacaaggacgagttctgcagatgcgagctgaagctgcagaagtggtacggggacctgcggggaaagcccttcgccatcgaagccgagaacagcatcctggacatcagcggcttcagcaagcagtacaactgtgccttcatctggcagaaggacggcgtgaagaagctgaacctgtacctgatcatcaactacttcaagggcggcaagctgcggttcaagaagatcaaacctgaagccttcgaagccaacagattctacaccgtgatcaacaaaaagagcggcgagatcgtgcccatggaggtgaacttcaacttcgacgaccccaacctgatcatcctgcctctggcctttggcaagagacagggcagagaattcatctggaacgacctgctgtccctggaaaccggcagcctgaagctggccaacggaagagtgatcgagaagacactgtacaacagaagaacccggcaggatgagcctgccctgttcgtggccctgaccttcgagcggcgggaggtcctggactcctccaatatcaaaccaatgaacctgatcggcgtggcaagaggcgaaaacatccccgccgtgatcgccctgaccgaccccgagggctgcccactgagccggtttaaggatagcctgggaaacccaacccacatcctgagaatcggcgagagctataaggagaagcagcggaccatccaggccaagaaggaggtggagcagcggagagccggcggctacagccggaagtacgccagcaaagccaagaatctggcagacgatatggtgagaaacaccgctagagatctgctgtactacgccgtgacccaggatgccatgctgatcttcgccaacctgagccggggcttcggccggcagggcaagcggaccttcatggccgagagacagtacacacggatggaggactggctgaccgccaagctggcctacgagggcctgagcaagacctacctgtccaagacactggcccagtacacctccaagacatgcagcaactgtgggtttaccatcaccagcgccgactacgacagggtgctggagaagctgaagaagacagcaacaggctggatgaccacaattaacggcaaggagctgaaggtggagggccagattacctactacaacagatacaagagacagaacgtagtcaaggacctgtccgtcgagctggatagactgagcgaagaatctgtgaacaacgacatctcctcctggacaaagggcagaagcggagaagctctgagcctcctgaagaaaagattctcccatagacccgtgcaggagaagttcgtgtgcctgaactgcggcttcgagacacacgcagccgagcaagccgccctgaacatcgccagatcctggctgttcctgcggagccaggagtacaagaaataccagacaaacaagacaaccggcaacaccgataagagagccttcgtcgagacctggcagtccttttaccggaagaagcttaaggaggtgtggaaacctgccgtgcggtctggcggatctggcggaggctccacaagcagcaaggccagcgtgaccttcggcgacctggccatctacttcagcagggaggagtgggagtggctgagccccatccagaaggacctgtacgaggacgtgatgctggagaactaccagaccctggtgagcctgggcctggtgtgcaggaggcccaacatcatcaccctgctggagaagggcaaggccccctggatggtggagcccagcaggaggaggaggggccccgagagcggcagcaagaggaccagccccaagaaaaagagaaaagtctaagctgccttctgcggggcttgccttctggccatgcccttcttctctcccttgcacctgtacctcttggtctttgaataaagcctgagtaggaaggctagcaaaaaaaaaaaaaaaaaaaaaaaaaaaaaaaaaaaaaaaaaaaaaaaaaaaaaaaaaaaaaaaaaaaaaaaaaaaaaaaa

SEQ ID NO: 6495 - RNA, 5797 nt, synthetic construct
  source 1..5797: mol_type = other RNA
aggaaataagagagaaaagaagagtaagaagaaatataagagccaccatggcccctaagaagaagcgtaaagtgagccggatggaacgcctcgtctacgaggtgcggcagaagtgcagaaacatcgaggacatctgcatctcctgcggatctctgaacgtgaccctggagcacccactgttcatcggcggcatgtgccagaactgtaaaaactgttttctggagtgtgcctatcaatacgacgatgacggctaccagagctactgcaccatctgttgcggcggaagagaggtgctgatgtgtggaaataacaactgctgccggtgcttctgcgtggaatgcgtggacctgctggtgggccccggcgccgcccaggccgctattaaggaagatccttggaactgctacatgtgcggccacaagggcacatacggcctgctgagacggagagaggactggcctagcagactgcagatgttcttcgccaataaccacgaccaggagttcgacccccctaaggtgtaccctcccgtccccgccgagaagagaaagcccatccgggtcctgagcctgttcgatggcatcgccaccggtctgctggtgctgaaggacctgggcatccaggtggataggtacattgcctccgaggtgtgcgaggactccatcaccgtgggaatggtgcgtcatcagggcaagatcatgtacgtgggcgacgtgcggagcgtgacacagaagcatatccaggagtggggccctttcgacctggtgatcggcggcagcccttgcaatgacctgagcatcgtgaacccagcccggaagggcctgtacgagggaaccggcagactgttcttcgagttttacagactgctgcacgacgcccggcctaaggaaggcgacgaccggcccttcttttggctgttcgagaatgtggtggccatgggagtcagcgacaagcgggatattagccggttcctggagagcaaccccgtgatgatcgatgccaaggaagtgagcgccgcccaccgggccagatacttctggggcaatctgcctggcatgaacagacccctggccagcaccgtgaacgacaagctggagctgcaggagtgcctggagcacggccggatcgccaagttcagcaaggtgagaaccatcaccacccgaagcaacagcatcaaacaaggcaaggaccagcactttcctgtgttcatgaacgagaaggaggacatcctgtggtgtaccgagatggagagagtgttcgggttcccagtccactacacagatgtcagcaacatgtctagactggccagacagagactgctgggaagaagctggtccgtccctgtgatcagacacctgttcgcccctctgaaggagtacttcgcctgcgtgagcagcggcaacagcaacgccaacagccggggccccagcttctctagcggcctggtgccactgtccctgagagggagccacatgggccccatggagatctacaaaaccgtgagcgcctggaagcggcagcctgtgcgcgtgctgagcctgtttcggaatatcgataaagtcctgaaaagcctgggattcctggagagcggctctggctccggcggtggcaccctgaagtacgtggaggatgtgacaaacgtggtcagacgggatgtggagaagtggggccccttcgatctggtgtacggcagcacccaacccctgggcagctcttgtgaccggtgccctggctggtacatgtttcagttccaccggatcctgcagtacgccctgccgagacaggagtcccagcggccattcttttggattttcatggacaacttgctgctgaccgaggatgaccaggaaactaccactcggttcctgcagaccgaagccgtgaccctgcaggacgtgagaggccgggactaccagaacgccatgcgggtgtggtccaacatccctggactgaaaagcaagcacgcacctctgacccctaaagaagaggagtacctgcaggcccaggtgcggagcagaagcaagctggacgcccctaaggtggatctgctggtgaagaattgcctcctgcccctgagagagtacttcaagtatttcagccagaatagtctgcccctgggcggcccaagcagcggcgcccctcctcccagcggcggcagcccagccggctccccaacctctaccgaggagggcacctctgagtccgccacccccgagagcggccctggcacctccaccgagcccagcgagggcagcgcacccggcagccctgccggcagccccacctccacagaggagggaaccagcaccgagcccagcgaaggcagcgccccaggcaccagcaccgagcctagtgagggcggctctggcggcggcagcgcccaggagattaaacggatcaacaagatcagaagaagacttgtgaaagacagcaacaccaagaaggccggcaagacaggccccatgaaaaccctgctggttagagtgatgacacccgatctgagagagcggctggaaaacctgagaaagaagcctgaaaatatcccccagcccatcagcaatacatctagagccaacctgaataagctgctgaccgattacaccgaaatgaagaaggcgatcctgcatgtgtactgggaagagttccagaaggaccctgtgggcctgatgagccgggtggcccagcctgccagcaagaagatcgatcagaacaagctgaaacctgagatggacgagaagggcaacctgaccaccgccggctttgcctgctctcagtgtggccagcccctgttcgtgtacaagctggagcaggtgtctgagaagggcaaggcttacaccaactacttcggacggtgcaatgtggccgagcacgaaaagctgatcctgctggcccagctgaagcccgagaaggatagcgacgaagccgtgacatatagcctgggaaagtttgggcagagggccctggatttctacagcattcatgtgaccaaggagtccacccaccccgtgaagcccctggcccagatcgccggaaacagatacgcctccggacctgtgggaaaggccctgagcgacgcatgtatgggcacaatcgcctccttcctgtctaagtaccaggacatcatcatcgaacaccagaaggtggtgaagggcaaccagaagagactggagagcctgcgggagctggccggcaaggaaaacctggaataccctagcgtgaccctgccacctcagcctcacaccaaggagggcgttgatgcctacaacgaagtgatcgcccgggtgcgaatgtgggtgaacctgaacctgtggcagaagctgaagctaagcagagatgatgccaagcctctgctgagactgaagggattcccttcctttcctctggtcgagagacaggccaacgaagtggactggtgggacatggtgtgtaacgtgaagaagctgatcaacgagaaaaaggaggatggcaaggtgttttggcagaatctggctggctacaagagacaggaagccctgagaccatacctgagcagcgaggaagatcggaagaagggaaagaaattcgctcggtaccagctgggcgacctgctgctgcacctggaaaagaagcacggcgaggactggggaaaggtgtacgacgaggcctgggagcggattgacaagaaagtggaaggcctgagcaagcacatcaagctggaagaggaacggagaagcgaggacgcccagagcaaggccgccctgaccgactggctgcgggctaaggccagcttcgtgatcgagggcctgaaggaggccgacaaggacgagttctgcagatgcgagctgaagctgcagaagtggtacggggacctgcggggaaagcccttcgccatcgaagccgagaacagcatcctggacatcagcggcttcagcaagcagtacaactgtgccttcatctggcagaaggacggcgtgaagaagctgaacctgtacctgatcatcaactacttcaagggcggcaagctgcggttcaagaagatcaaacctgaagccttcgaagccaacagattctacaccgtgatcaacaaaaagagcggcgagatcgtgcccatggaggtgaacttcaacttcgacgaccccaacctgatcatcctgcctctggcctttggcaagagacagggcagagaattcatctggaacgacctgctgtccctggaaaccggcagcctgaagctggccaacggaagagtgatcgagaagacactgtacaacagaagaacccggcaggatgagcctgccctgttcgtggccctgaccttcgagcggcgggaggtcctggactcctccaatatcaaaccaatgaacctgatcggcgtggcaagaggcgaaaacatccccgccgtgatcgccctgaccgaccccgagggctgcccactgagccggtttaaggatagcctgggaaacccaacccacatcctgagaatcggcgagagctataaggagaagcagcggaccatccaggccaagaaggaggtggagcagcggagagccggcggctacagccggaagtacgccagcaaagccaagaatctggcagacgatatggtgagaaacaccgctagagatctgctgtactacgccgtgacccaggatgccatgctgatcttcgccaacctgagccggggcttcggccggcagggcaagcggaccttcatggccgagagacagtacacacggatggaggactggctgaccgccaagctggcctacgagggcctgagcaagacctacctgtccaagacactggcccagtacacctccaagacatgcagcaactgtgggtttaccatcaccagcgccgactacgacagggtgctggagaagctgaagaagacagcaacaggctggatgaccacaattaacggcaaggagctgaaggtggagggccagattacctactacaacagatacaagagacagaacgtagtcaaggacctgtccgtcgagctggatagactgagcgaagaatctgtgaacaacgacatctcctcctggacaaagggcagaagcggagaagctctgagcctcctgaagaaaagattctcccatagacccgtgcaggagaagttcgtgtgcctgaactgcggcttcgagacacacgcagccgagcaagccgccctgaacatcgccagatcctggctgttcctgcggagccaggagtacaagaaataccagacaaacaagacaaccggcaacaccgataagagagccttcgtcgagacctggcagtccttttaccggaagaagcttaaggaggtgtggaaacctgccgtgcggtctggcggatctggcggaggctccacaagcacccaggagagcctgaccctggaggacgtggccgtggagttcagctgggaggagtggcagctgctggacaccgcccagaaggacctgtacagggacgtgatggtggagaactacaaccacctggtgagcctgggctaccagaccagcaagcccgacgccctgagcaagctggcccacggccaggagccctggatgaccgacgccaagatccagaacaagaactgccccggcatcaggaaggtgaccagccccaagaaaaagagaaaagtctaagctgccttctgcggggcttgccttctggccatgcccttcttctctcccttgcacctgtacctcttggtctttgaataaagcctgagtaggaaggctagcaaaaaaaaaaaaaaaaaaaaaaaaaaaaaaaaaaaaaaaaaaaaaaaaaaaaaaaaaaaaaaaaaaaaaaaaaaaaaaaa

SEQ ID NO: 6496 - RNA, 5797 nt, synthetic construct
  source 1..5797: mol_type = other RNA
aggaaataagagagaaaagaagagtaagaagaaatataagagccaccatggcccctaagaagaagcgtaaagtgagccggatggaacgcctcgtctacgaggtgcggcagaagtgcagaaacatcgaggacatctgcatctcctgcggatctctgaacgtgaccctggagcacccactgttcatcggcggcatgtgccagaactgtaaaaactgttttctggagtgtgcctatcaatacgacgatgacggctaccagagctactgcaccatctgttgcggcggaagagaggtgctgatgtgtggaaataacaactgctgccggtgcttctgcgtggaatgcgtggacctgctggtgggccccggcgccgcccaggccgctattaaggaagatccttggaactgctacatgtgcggccacaagggcacatacggcctgctgagacggagagaggactggcctagcagactgcagatgttcttcgccaataaccacgaccaggagttcgacccccctaaggtgtaccctcccgtccccgccgagaagagaaagcccatccgggtcctgagcctgttcgatggcatcgccaccggtctgctggtgctgaaggacctgggcatccaggtggataggtacattgcctccgaggtgtgcgaggactccatcaccgtgggaatggtgcgtcatcagggcaagatcatgtacgtgggcgacgtgcggagcgtgacacagaagcatatccaggagtggggccctttcgacctggtgatcggcggcagcccttgcaatgacctgagcatcgtgaacccagcccggaagggcctgtacgagggaaccggcagactgttcttcgagttttacagactgctgcacgacgcccggcctaaggaaggcgacgaccggcccttcttttggctgttcgagaatgtggtggccatgggagtcagcgacaagcgggatattagccggttcctggagagcaaccccgtgatgatcgatgccaaggaagtgagcgccgcccaccgggccagatacttctggggcaatctgcctggcatgaacagacccctggccagcaccgtgaacgacaagctggagctgcaggagtgcctggagcacggccggatcgccaagttcagcaaggtgagaaccatcaccacccgaagcaacagcatcaaacaaggcaaggaccagcactttcctgtgttcatgaacgagaaggaggacatcctgtggtgtaccgagatggagagagtgttcgggttcccagtccactacacagatgtcagcaacatgtctagactggccagacagagactgctgggaagaagctggtccgtccctgtgatcagacacctgttcgcccctctgaaggagtacttcgcctgcgtgagcagcggcaacagcaacgccaacagccggggccccagcttctctagcggcctggtgccactgtccctgagagggagccacatgggccccatggagatctacaaaaccgtgagcgcctggaagcggcagcctgtgcgcgtgctgagcctgtttcggaatatcgataaagtcctgaaaagcctgggattcctggagagcggctctggctccggcggtggcaccctgaagtacgtggaggatgtgacaaacgtggtcagacgggatgtggagaagtggggccccttcgatctggtgtacggcagcacccaacccctgggcagctcttgtgaccggtgccctggctggtacatgtttcagttccaccggatcctgcagtacgccctgccgagacaggagtcccagcggccattcttttggattttcatggacaacttgctgctgaccgaggatgaccaggaaactaccactcggttcctgcagaccgaagccgtgaccctgcaggacgtgagaggccgggactaccagaacgccatgcgggtgtggtccaacatccctggactgaaaagcaagcacgcacctctgacccctaaagaagaggagtacctgcaggcccaggtgcggagcagaagcaagctggacgcccctaaggtggatctgctggtgaagaattgcctcctgcccctgagagagtacttcaagtatttcagccagaatagtctgcccctgggcggcccaagcagcggcgcccctcctcccagcggcggcagcccagccggctccccaacctctaccgaggagggcacctctgagtccgccacccccgagagcggccctggcacctccaccgagcccagcgagggcagcgcacccggcagccctgccggcagccccacctccacagaggagggaaccagcaccgagcccagcgaaggcagcgccccaggcaccagcaccgagcctagtgagggcggctctggcggcggcagcgcccaggagattaaacggatcaacaagatcagaagaagacttgtgaaagacagcaacaccaagaaggccggcaagacaggccccatgaaaaccctgctggttagagtgatgacacccgatctgagagagcggctggaaaacctgagaaagaagcctgaaaatatcccccagcccatcagcaatacatctagagccaacctgaataagctgctgaccgattacaccgaaatgaagaaggcgatcctgcatgtgtactgggaagagttccagaaggaccctgtgggcctgatgagccgggtggcccagcctgccagcaagaagatcgatcagaacaagctgaaacctgagatggacgagaagggcaacctgaccaccgccggctttgcctgctctcagtgtggccagcccctgttcgtgtacaagctggagcaggtgtctgagaagggcaaggcttacaccaactacttcggacggtgcaatgtggccgagcacgaaaagctgatcctgctggcccagctgaagcccgagaaggatagcgacgaagccgtgacatatagcctgggaaagtttgggcagagggccctggatttctacagcattcatgtgaccaaggagtccacccaccccgtgaagcccctggcccagatcgccggaaacagatacgcctccggacctgtgggaaaggccctgagcgacgcatgtatgggcacaatcgcctccttcctgtctaagtaccaggacatcatcatcgaacaccagaaggtggtgaagggcaaccagaagagactggagagcctgcgggagctggccggcaaggaaaacctggaataccctagcgtgaccctgccacctcagcctcacaccaaggagggcgttgatgcctacaacgaagtgatcgcccgggtgcgaatgtgggtgaacctgaacctgtggcagaagctgaagctaagcagagatgatgccaagcctctgctgagactgaagggattcccttcctttcctctggtcgagagacaggccaacgaagtggactggtgggacatggtgtgtaacgtgaagaagctgatcaacgagaaaaaggaggatggcaaggtgttttggcagaatctggctggctacaagagacaggaagccctgagaccatacctgagcagcgaggaagatcggaagaagggaaagaaattcgctcggtaccagctgggcgacctgctgctgcacctggaaaagaagcacggcgaggactggggaaaggtgtacgacgaggcctgggagcggattgacaagaaagtggaaggcctgagcaagcacatcaagctggaagaggaacggagaagcgaggacgcccagagcaaggccgccctgaccgactggctgcgggctaaggccagcttcgtgatcgagggcctgaaggaggccgacaaggacgagttctgcagatgcgagctgaagctgcagaagtggtacggggacctgcggggaaagcccttcgccatcgaagccgagaacagcatcctggacatcagcggcttcagcaagcagtacaactgtgccttcatctggcagaaggacggcgtgaagaagctgaacctgtacctgatcatcaactacttcaagggcggcaagctgcggttcaagaagatcaaacctgaagccttcgaagccaacagattctacaccgtgatcaacaaaaagagcggcgagatcgtgcccatggaggtgaacttcaacttcgacgaccccaacctgatcatcctgcctctggcctttggcaagagacagggcagagaattcatctggaacgacctgctgtccctggaaaccggcagcctgaagctggccaacggaagagtgatcgagaagacactgtacaacagaagaacccggcaggatgagcctgccctgttcgtggccctgaccttcgagcggcgggaggtcctggactcctccaatatcaaaccaatgaacctgatcggcgtggcaagaggcgaaaacatccccgccgtgatcgccctgaccgaccccgagggctgcccactgagccggtttaaggatagcctgggaaacccaacccacatcctgagaatcggcgagagctataaggagaagcagcggaccatccaggccaagaaggaggtggagcagcggagagccggcggctacagccggaagtacgccagcaaagccaagaatctggcagacgatatggtgagaaacaccgctagagatctgctgtactacgccgtgacccaggatgccatgctgatcttcgccaacctgagccggggcttcggccggcagggcaagcggaccttcatggccgagagacagtacacacggatggaggactggctgaccgccaagctggcctacgagggcctgagcaagacctacctgtccaagacactggcccagtacacctccaagacatgcagcaactgtgggtttaccatcaccagcgccgactacgacagggtgctggagaagctgaagaagacagcaacaggctggatgaccacaattaacggcaaggagctgaaggtggagggccagattacctactacaacagatacaagagacagaacgtagtcaaggacctgtccgtcgagctggatagactgagcgaagaatctgtgaacaacgacatctcctcctggacaaagggcagaagcggagaagctctgagcctcctgaagaaaagattctcccatagacccgtgcaggagaagttcgtgtgcctgaactgcggcttcgagacacacgcagccgagcaagccgccctgaacatcgccagatcctggctgttcctgcggagccaggagtacaagaaataccagacaaacaagacaaccggcaacaccgataagagagccttcgtcgagacctggcagtccttttaccggaagaagcttaaggaggtgtggaaacctgccgtgcggtctggcggatctggcggaggctccacaagcagccagggccccgtgaagttcgaggacgtggccatctacctgtggaaggaggagtgggagctgatggacagcacccagaagaggctgtacaggcaggtgatgctggagacctacgagaacgtgctgagcgtgggcaccccccacgacaagcccgccatgatcgtgcacctggagcagggcgagaccgcctggagccccgccctgcagaggcccggcaaggagaagggcaggctgcacggccacaccagccccaagaaaaagagaaaagtctaagctgccttctgcggggcttgccttctggccatgcccttcttctctcccttgcacctgtacctcttggtctttgaataaagcctgagtaggaaggctagcaaaaaaaaaaaaaaaaaaaaaaaaaaaaaaaaaaaaaaaaaaaaaaaaaaaaaaaaaaaaaaaaaaaaaaaaaaaaaaaa

SEQ ID NO: 6497 - RNA, 5797 nt, synthetic construct
  source 1..5797: mol_type = other RNA
aggaaataagagagaaaagaagagtaagaagaaatataagagccaccatggcccctaagaagaagcgtaaagtgagccggatggaacgcctcgtctacgaggtgcggcagaagtgcagaaacatcgaggacatctgcatctcctgcggatctctgaacgtgaccctggagcacccactgttcatcggcggcatgtgccagaactgtaaaaactgttttctggagtgtgcctatcaatacgacgatgacggctaccagagctactgcaccatctgttgcggcggaagagaggtgctgatgtgtggaaataacaactgctgccggtgcttctgcgtggaatgcgtggacctgctggtgggccccggcgccgcccaggccgctattaaggaagatccttggaactgctacatgtgcggccacaagggcacatacggcctgctgagacggagagaggactggcctagcagactgcagatgttcttcgccaataaccacgaccaggagttcgacccccctaaggtgtaccctcccgtccccgccgagaagagaaagcccatccgggtcctgagcctgttcgatggcatcgccaccggtctgctggtgctgaaggacctgggcatccaggtggataggtacattgcctccgaggtgtgcgaggactccatcaccgtgggaatggtgcgtcatcagggcaagatcatgtacgtgggcgacgtgcggagcgtgacacagaagcatatccaggagtggggccctttcgacctggtgatcggcggcagcccttgcaatgacctgagcatcgtgaacccagcccggaagggcctgtacgagggaaccggcagactgttcttcgagttttacagactgctgcacgacgcccggcctaaggaaggcgacgaccggcccttcttttggctgttcgagaatgtggtggccatgggagtcagcgacaagcgggatattagccggttcctggagagcaaccccgtgatgatcgatgccaaggaagtgagcgccgcccaccgggccagatacttctggggcaatctgcctggcatgaacagacccctggccagcaccgtgaacgacaagctggagctgcaggagtgcctggagcacggccggatcgccaagttcagcaaggtgagaaccatcaccacccgaagcaacagcatcaaacaaggcaaggaccagcactttcctgtgttcatgaacgagaaggaggacatcctgtggtgtaccgagatggagagagtgttcgggttcccagtccactacacagatgtcagcaacatgtctagactggccagacagagactgctgggaagaagctggtccgtccctgtgatcagacacctgttcgcccctctgaaggagtacttcgcctgcgtgagcagcggcaacagcaacgccaacagccggggccccagcttctctagcggcctggtgccactgtccctgagagggagccacatgggccccatggagatctacaaaaccgtgagcgcctggaagcggcagcctgtgcgcgtgctgagcctgtttcggaatatcgataaagtcctgaaaagcctgggattcctggagagcggctctggctccggcggtggcaccctgaagtacgtggaggatgtgacaaacgtggtcagacgggatgtggagaagtggggccccttcgatctggtgtacggcagcacccaacccctgggcagctcttgtgaccggtgccctggctggtacatgtttcagttccaccggatcctgcagtacgccctgccgagacaggagtcccagcggccattcttttggattttcatggacaacttgctgctgaccgaggatgaccaggaaactaccactcggttcctgcagaccgaagccgtgaccctgcaggacgtgagaggccgggactaccagaacgccatgcgggtgtggtccaacatccctggactgaaaagcaagcacgcacctctgacccctaaagaagaggagtacctgcaggcccaggtgcggagcagaagcaagctggacgcccctaaggtggatctgctggtgaagaattgcctcctgcccctgagagagtacttcaagtatttcagccagaatagtctgcccctgggcggcccaagcagcggcgcccctcctcccagcggcggcagcccagccggctccccaacctctaccgaggagggcacctctgagtccgccacccccgagagcggccctggcacctccaccgagcccagcgagggcagcgcacccggcagccctgccggcagccccacctccacagaggagggaaccagcaccgagcccagcgaaggcagcgccccaggcaccagcaccgagcctagtgagggcggctctggcggcggcagcgcccaggagattaaacggatcaacaagatcagaagaagacttgtgaaagacagcaacaccaagaaggccggcaagacaggccccatgaaaaccctgctggttagagtgatgacacccgatctgagagagcggctggaaaacctgagaaagaagcctgaaaatatcccccagcccatcagcaatacatctagagccaacctgaataagctgctgaccgattacaccgaaatgaagaaggcgatcctgcatgtgtactgggaagagttccagaaggaccctgtgggcctgatgagccgggtggcccagcctgccagcaagaagatcgatcagaacaagctgaaacctgagatggacgagaagggcaacctgaccaccgccggctttgcctgctctcagtgtggccagcccctgttcgtgtacaagctggagcaggtgtctgagaagggcaaggcttacaccaactacttcggacggtgcaatgtggccgagcacgaaaagctgatcctgctggcccagctgaagcccgagaaggatagcgacgaagccgtgacatatagcctgggaaagtttgggcagagggccctggatttctacagcattcatgtgaccaaggagtccacccaccccgtgaagcccctggcccagatcgccggaaacagatacgcctccggacctgtgggaaaggccctgagcgacgcatgtatgggcacaatcgcctccttcctgtctaagtaccaggacatcatcatcgaacaccagaaggtggtgaagggcaaccagaagagactggagagcctgcgggagctggccggcaaggaaaacctggaataccctagcgtgaccctgccacctcagcctcacaccaaggagggcgttgatgcctacaacgaagtgatcgcccgggtgcgaatgtgggtgaacctgaacctgtggcagaagctgaagctaagcagagatgatgccaagcctctgctgagactgaagggattcccttcctttcctctggtcgagagacaggccaacgaagtggactggtgggacatggtgtgtaacgtgaagaagctgatcaacgagaaaaaggaggatggcaaggtgttttggcagaatctggctggctacaagagacaggaagccctgagaccatacctgagcagcgaggaagatcggaagaagggaaagaaattcgctcggtaccagctgggcgacctgctgctgcacctggaaaagaagcacggcgaggactggggaaaggtgtacgacgaggcctgggagcggattgacaagaaagtggaaggcctgagcaagcacatcaagctggaagaggaacggagaagcgaggacgcccagagcaaggccgccctgaccgactggctgcgggctaaggccagcttcgtgatcgagggcctgaaggaggccgacaaggacgagttctgcagatgcgagctgaagctgcagaagtggtacggggacctgcggggaaagcccttcgccatcgaagccgagaacagcatcctggacatcagcggcttcagcaagcagtacaactgtgccttcatctggcagaaggacggcgtgaagaagctgaacctgtacctgatcatcaactacttcaagggcggcaagctgcggttcaagaagatcaaacctgaagccttcgaagccaacagattctacaccgtgatcaacaaaaagagcggcgagatcgtgcccatggaggtgaacttcaacttcgacgaccccaacctgatcatcctgcctctggcctttggcaagagacagggcagagaattcatctggaacgacctgctgtccctggaaaccggcagcctgaagctggccaacggaagagtgatcgagaagacactgtacaacagaagaacccggcaggatgagcctgccctgttcgtggccctgaccttcgagcggcgggaggtcctggactcctccaatatcaaaccaatgaacctgatcggcgtggcaagaggcgaaaacatccccgccgtgatcgccctgaccgaccccgagggctgcccactgagccggtttaaggatagcctgggaaacccaacccacatcctgagaatcggcgagagctataaggagaagcagcggaccatccaggccaagaaggaggtggagcagcggagagccggcggctacagccggaagtacgccagcaaagccaagaatctggcagacgatatggtgagaaacaccgctagagatctgctgtactacgccgtgacccaggatgccatgctgatcttcgccaacctgagccggggcttcggccggcagggcaagcggaccttcatggccgagagacagtacacacggatggaggactggctgaccgccaagctggcctacgagggcctgagcaagacctacctgtccaagacactggcccagtacacctccaagacatgcagcaactgtgggtttaccatcaccagcgccgactacgacagggtgctggagaagctgaagaagacagcaacaggctggatgaccacaattaacggcaaggagctgaaggtggagggccagattacctactacaacagatacaagagacagaacgtagtcaaggacctgtccgtcgagctggatagactgagcgaagaatctgtgaacaacgacatctcctcctggacaaagggcagaagcggagaagctctgagcctcctgaagaaaagattctcccatagacccgtgcaggagaagttcgtgtgcctgaactgcggcttcgagacacacgcagccgagcaagccgccctgaacatcgccagatcctggctgttcctgcggagccaggagtacaagaaataccagacaaacaagacaaccggcaacaccgataagagagccttcgtcgagacctggcagtccttttaccggaagaagcttaaggaggtgtggaaacctgccgtgcggtctggcggatctggcggaggctccacaagcatgctgagccccgtgaccttcgaggacgtggccgtgtacttcaccgagggccagggcgccctgctggaccccaaccagagggccctgtacagggaggtgatgatggagaactacgagaacatggccagcctgggcttcctgttcatcaagcccgccctgatcagccagctggagcagggcgaggagctgtgggcccccgagagccagggcctggacgccgccgagatcagcgacaccagcgacaccagccccaagaaaaagagaaaagtctaagctgccttctgcggggcttgccttctggccatgcccttcttctctcccttgcacctgtacctcttggtctttgaataaagcctgagtaggaaggctagcaaaaaaaaaaaaaaaaaaaaaaaaaaaaaaaaaaaaaaaaaaaaaaaaaaaaaaaaaaaaaaaaaaaaaaaaaaaaaaaa

SEQ ID NO: 6498 - RNA, 5797 nt, synthetic construct
  source 1..5797: mol_type = other RNA
aggaaataagagagaaaagaagagtaagaagaaatataagagccaccatggcccctaagaagaagcgtaaagtgagccggatggaacgcctcgtctacgaggtgcggcagaagtgcagaaacatcgaggacatctgcatctcctgcggatctctgaacgtgaccctggagcacccactgttcatcggcggcatgtgccagaactgtaaaaactgttttctggagtgtgcctatcaatacgacgatgacggctaccagagctactgcaccatctgttgcggcggaagagaggtgctgatgtgtggaaataacaactgctgccggtgcttctgcgtggaatgcgtggacctgctggtgggccccggcgccgcccaggccgctattaaggaagatccttggaactgctacatgtgcggccacaagggcacatacggcctgctgagacggagagaggactggcctagcagactgcagatgttcttcgccaataaccacgaccaggagttcgacccccctaaggtgtaccctcccgtccccgccgagaagagaaagcccatccgggtcctgagcctgttcgatggcatcgccaccggtctgctggtgctgaaggacctgggcatccaggtggataggtacattgcctccgaggtgtgcgaggactccatcaccgtgggaatggtgcgtcatcagggcaagatcatgtacgtgggcgacgtgcggagcgtgacacagaagcatatccaggagtggggccctttcgacctggtgatcggcggcagcccttgcaatgacctgagcatcgtgaacccagcccggaagggcctgtacgagggaaccggcagactgttcttcgagttttacagactgctgcacgacgcccggcctaaggaaggcgacgaccggcccttcttttggctgttcgagaatgtggtggccatgggagtcagcgacaagcgggatattagccggttcctggagagcaaccccgtgatgatcgatgccaaggaagtgagcgccgcccaccgggccagatacttctggggcaatctgcctggcatgaacagacccctggccagcaccgtgaacgacaagctggagctgcaggagtgcctggagcacggccggatcgccaagttcagcaaggtgagaaccatcaccacccgaagcaacagcatcaaacaaggcaaggaccagcactttcctgtgttcatgaacgagaaggaggacatcctgtggtgtaccgagatggagagagtgttcgggttcccagtccactacacagatgtcagcaacatgtctagactggccagacagagactgctgggaagaagctggtccgtccctgtgatcagacacctgttcgcccctctgaaggagtacttcgcctgcgtgagcagcggcaacagcaacgccaacagccggggccccagcttctctagcggcctggtgccactgtccctgagagggagccacatgggccccatggagatctacaaaaccgtgagcgcctggaagcggcagcctgtgcgcgtgctgagcctgtttcggaatatcgataaagtcctgaaaagcctgggattcctggagagcggctctggctccggcggtggcaccctgaagtacgtggaggatgtgacaaacgtggtcagacgggatgtggagaagtggggccccttcgatctggtgtacggcagcacccaacccctgggcagctcttgtgaccggtgccctggctggtacatgtttcagttccaccggatcctgcagtacgccctgccgagacaggagtcccagcggccattcttttggattttcatggacaacttgctgctgaccgaggatgaccaggaaactaccactcggttcctgcagaccgaagccgtgaccctgcaggacgtgagaggccgggactaccagaacgccatgcgggtgtggtccaacatccctggactgaaaagcaagcacgcacctctgacccctaaagaagaggagtacctgcaggcccaggtgcggagcagaagcaagctggacgcccctaaggtggatctgctggtgaagaattgcctcctgcccctgagagagtacttcaagtatttcagccagaatagtctgcccctgggcggcccaagcagcggcgcccctcctcccagcggcggcagcccagccggctccccaacctctaccgaggagggcacctctgagtccgccacccccgagagcggccctggcacctccaccgagcccagcgagggcagcgcacccggcagccctgccggcagccccacctccacagaggagggaaccagcaccgagcccagcgaaggcagcgccccaggcaccagcaccgagcctagtgagggcggctctggcggcggcagcgcccaggagattaaacggatcaacaagatcagaagaagacttgtgaaagacagcaacaccaagaaggccggcaagacaggccccatgaaaaccctgctggttagagtgatgacacccgatctgagagagcggctggaaaacctgagaaagaagcctgaaaatatcccccagcccatcagcaatacatctagagccaacctgaataagctgctgaccgattacaccgaaatgaagaaggcgatcctgcatgtgtactgggaagagttccagaaggaccctgtgggcctgatgagccgggtggcccagcctgccagcaagaagatcgatcagaacaagctgaaacctgagatggacgagaagggcaacctgaccaccgccggctttgcctgctctcagtgtggccagcccctgttcgtgtacaagctggagcaggtgtctgagaagggcaaggcttacaccaactacttcggacggtgcaatgtggccgagcacgaaaagctgatcctgctggcccagctgaagcccgagaaggatagcgacgaagccgtgacatatagcctgggaaagtttgggcagagggccctggatttctacagcattcatgtgaccaaggagtccacccaccccgtgaagcccctggcccagatcgccggaaacagatacgcctccggacctgtgggaaaggccctgagcgacgcatgtatgggcacaatcgcctccttcctgtctaagtaccaggacatcatcatcgaacaccagaaggtggtgaagggcaaccagaagagactggagagcctgcgggagctggccggcaaggaaaacctggaataccctagcgtgaccctgccacctcagcctcacaccaaggagggcgttgatgcctacaacgaagtgatcgcccgggtgcgaatgtgggtgaacctgaacctgtggcagaagctgaagctaagcagagatgatgccaagcctctgctgagactgaagggattcccttcctttcctctggtcgagagacaggccaacgaagtggactggtgggacatggtgtgtaacgtgaagaagctgatcaacgagaaaaaggaggatggcaaggtgttttggcagaatctggctggctacaagagacaggaagccctgagaccatacctgagcagcgaggaagatcggaagaagggaaagaaattcgctcggtaccagctgggcgacctgctgctgcacctggaaaagaagcacggcgaggactggggaaaggtgtacgacgaggcctgggagcggattgacaagaaagtggaaggcctgagcaagcacatcaagctggaagaggaacggagaagcgaggacgcccagagcaaggccgccctgaccgactggctgcgggctaaggccagcttcgtgatcgagggcctgaaggaggccgacaaggacgagttctgcagatgcgagctgaagctgcagaagtggtacggggacctgcggggaaagcccttcgccatcgaagccgagaacagcatcctggacatcagcggcttcagcaagcagtacaactgtgccttcatctggcagaaggacggcgtgaagaagctgaacctgtacctgatcatcaactacttcaagggcggcaagctgcggttcaagaagatcaaacctgaagccttcgaagccaacagattctacaccgtgatcaacaaaaagagcggcgagatcgtgcccatggaggtgaacttcaacttcgacgaccccaacctgatcatcctgcctctggcctttggcaagagacagggcagagaattcatctggaacgacctgctgtccctggaaaccggcagcctgaagctggccaacggaagagtgatcgagaagacactgtacaacagaagaacccggcaggatgagcctgccctgttcgtggccctgaccttcgagcggcgggaggtcctggactcctccaatatcaaaccaatgaacctgatcggcgtggcaagaggcgaaaacatccccgccgtgatcgccctgaccgaccccgagggctgcccactgagccggtttaaggatagcctgggaaacccaacccacatcctgagaatcggcgagagctataaggagaagcagcggaccatccaggccaagaaggaggtggagcagcggagagccggcggctacagccggaagtacgccagcaaagccaagaatctggcagacgatatggtgagaaacaccgctagagatctgctgtactacgccgtgacccaggatgccatgctgatcttcgccaacctgagccggggcttcggccggcagggcaagcggaccttcatggccgagagacagtacacacggatggaggactggctgaccgccaagctggcctacgagggcctgagcaagacctacctgtccaagacactggcccagtacacctccaagacatgcagcaactgtgggtttaccatcaccagcgccgactacgacagggtgctggagaagctgaagaagacagcaacaggctggatgaccacaattaacggcaaggagctgaaggtggagggccagattacctactacaacagatacaagagacagaacgtagtcaaggacctgtccgtcgagctggatagactgagcgaagaatctgtgaacaacgacatctcctcctggacaaagggcagaagcggagaagctctgagcctcctgaagaaaagattctcccatagacccgtgcaggagaagttcgtgtgcctgaactgcggcttcgagacacacgcagccgagcaagccgccctgaacatcgccagatcctggctgttcctgcggagccaggagtacaagaaataccagacaaacaagacaaccggcaacaccgataagagagccttcgtcgagacctggcagtccttttaccggaagaagcttaaggaggtgtggaaacctgccgtgcggtctggcggatctggcggaggctccacaagcatgatgaccttcagggacgtggccatcgacttcagccaggaggagtggaagtggctgcagcccgcccagagggacctgtacaggtgcgtgatgctggagaactacggccacctggtgagcctgggcctgagcatcagcaagcccgacgtggtgagcctgctggagcagggcaaggagccctggctgggcaagaagggcatcagcgagagcagcggcgagatcaaggacttcagccccaagaacaccagccccaagaaaaagagaaaagtctaagctgccttctgcggggcttgccttctggccatgcccttcttctctcccttgcacctgtacctcttggtctttgaataaagcctgagtaggaaggctagcaaaaaaaaaaaaaaaaaaaaaaaaaaaaaaaaaaaaaaaaaaaaaaaaaaaaaaaaaaaaaaaaaaaaaaaaaaaaaaaa

SEQ ID NO: 6499 - RNA, 5797 nt, synthetic construct
  source 1..5797: mol_type = other RNA
aggaaataagagagaaaagaagagtaagaagaaatataagagccaccatggcccctaagaagaagcgtaaagtgagccggatggaacgcctcgtctacgaggtgcggcagaagtgcagaaacatcgaggacatctgcatctcctgcggatctctgaacgtgaccctggagcacccactgttcatcggcggcatgtgccagaactgtaaaaactgttttctggagtgtgcctatcaatacgacgatgacggctaccagagctactgcaccatctgttgcggcggaagagaggtgctgatgtgtggaaataacaactgctgccggtgcttctgcgtggaatgcgtggacctgctggtgggccccggcgccgcccaggccgctattaaggaagatccttggaactgctacatgtgcggccacaagggcacatacggcctgctgagacggagagaggactggcctagcagactgcagatgttcttcgccaataaccacgaccaggagttcgacccccctaaggtgtaccctcccgtccccgccgagaagagaaagcccatccgggtcctgagcctgttcgatggcatcgccaccggtctgctggtgctgaaggacctgggcatccaggtggataggtacattgcctccgaggtgtgcgaggactccatcaccgtgggaatggtgcgtcatcagggcaagatcatgtacgtgggcgacgtgcggagcgtgacacagaagcatatccaggagtggggccctttcgacctggtgatcggcggcagcccttgcaatgacctgagcatcgtgaacccagcccggaagggcctgtacgagggaaccggcagactgttcttcgagttttacagactgctgcacgacgcccggcctaaggaaggcgacgaccggcccttcttttggctgttcgagaatgtggtggccatgggagtcagcgacaagcgggatattagccggttcctggagagcaaccccgtgatgatcgatgccaaggaagtgagcgccgcccaccgggccagatacttctggggcaatctgcctggcatgaacagacccctggccagcaccgtgaacgacaagctggagctgcaggagtgcctggagcacggccggatcgccaagttcagcaaggtgagaaccatcaccacccgaagcaacagcatcaaacaaggcaaggaccagcactttcctgtgttcatgaacgagaaggaggacatcctgtggtgtaccgagatggagagagtgttcgggttcccagtccactacacagatgtcagcaacatgtctagactggccagacagagactgctgggaagaagctggtccgtccctgtgatcagacacctgttcgcccctctgaaggagtacttcgcctgcgtgagcagcggcaacagcaacgccaacagccggggccccagcttctctagcggcctggtgccactgtccctgagagggagccacatgggccccatggagatctacaaaaccgtgagcgcctggaagcggcagcctgtgcgcgtgctgagcctgtttcggaatatcgataaagtcctgaaaagcctgggattcctggagagcggctctggctccggcggtggcaccctgaagtacgtggaggatgtgacaaacgtggtcagacgggatgtggagaagtggggccccttcgatctggtgtacggcagcacccaacccctgggcagctcttgtgaccggtgccctggctggtacatgtttcagttccaccggatcctgcagtacgccctgccgagacaggagtcccagcggccattcttttggattttcatggacaacttgctgctgaccgaggatgaccaggaaactaccactcggttcctgcagaccgaagccgtgaccctgcaggacgtgagaggccgggactaccagaacgccatgcgggtgtggtccaacatccctggactgaaaagcaagcacgcacctctgacccctaaagaagaggagtacctgcaggcccaggtgcggagcagaagcaagctggacgcccctaaggtggatctgctggtgaagaattgcctcctgcccctgagagagtacttcaagtatttcagccagaatagtctgcccctgggcggcccaagcagcggcgcccctcctcccagcggcggcagcccagccggctccccaacctctaccgaggagggcacctctgagtccgccacccccgagagcggccctggcacctccaccgagcccagcgagggcagcgcacccggcagccctgccggcagccccacctccacagaggagggaaccagcaccgagcccagcgaaggcagcgccccaggcaccagcaccgagcctagtgagggcggctctggcggcggcagcgcccaggagattaaacggatcaacaagatcagaagaagacttgtgaaagacagcaacaccaagaaggccggcaagacaggccccatgaaaaccctgctggttagagtgatgacacccgatctgagagagcggctggaaaacctgagaaagaagcctgaaaatatcccccagcccatcagcaatacatctagagccaacctgaataagctgctgaccgattacaccgaaatgaagaaggcgatcctgcatgtgtactgggaagagttccagaaggaccctgtgggcctgatgagccgggtggcccagcctgccagcaagaagatcgatcagaacaagctgaaacctgagatggacgagaagggcaacctgaccaccgccggctttgcctgctctcagtgtggccagcccctgttcgtgtacaagctggagcaggtgtctgagaagggcaaggcttacaccaactacttcggacggtgcaatgtggccgagcacgaaaagctgatcctgctggcccagctgaagcccgagaaggatagcgacgaagccgtgacatatagcctgggaaagtttgggcagagggccctggatttctacagcattcatgtgaccaaggagtccacccaccccgtgaagcccctggcccagatcgccggaaacagatacgcctccggacctgtgggaaaggccctgagcgacgcatgtatgggcacaatcgcctccttcctgtctaagtaccaggacatcatcatcgaacaccagaaggtggtgaagggcaaccagaagagactggagagcctgcgggagctggccggcaaggaaaacctggaataccctagcgtgaccctgccacctcagcctcacaccaaggagggcgttgatgcctacaacgaagtgatcgcccgggtgcgaatgtgggtgaacctgaacctgtggcagaagctgaagctaagcagagatgatgccaagcctctgctgagactgaagggattcccttcctttcctctggtcgagagacaggccaacgaagtggactggtgggacatggtgtgtaacgtgaagaagctgatcaacgagaaaaaggaggatggcaaggtgttttggcagaatctggctggctacaagagacaggaagccctgagaccatacctgagcagcgaggaagatcggaagaagggaaagaaattcgctcggtaccagctgggcgacctgctgctgcacctggaaaagaagcacggcgaggactggggaaaggtgtacgacgaggcctgggagcggattgacaagaaagtggaaggcctgagcaagcacatcaagctggaagaggaacggagaagcgaggacgcccagagcaaggccgccctgaccgactggctgcgggctaaggccagcttcgtgatcgagggcctgaaggaggccgacaaggacgagttctgcagatgcgagctgaagctgcagaagtggtacggggacctgcggggaaagcccttcgccatcgaagccgagaacagcatcctggacatcagcggcttcagcaagcagtacaactgtgccttcatctggcagaaggacggcgtgaagaagctgaacctgtacctgatcatcaactacttcaagggcggcaagctgcggttcaagaagatcaaacctgaagccttcgaagccaacagattctacaccgtgatcaacaaaaagagcggcgagatcgtgcccatggaggtgaacttcaacttcgacgaccccaacctgatcatcctgcctctggcctttggcaagagacagggcagagaattcatctggaacgacctgctgtccctggaaaccggcagcctgaagctggccaacggaagagtgatcgagaagacactgtacaacagaagaacccggcaggatgagcctgccctgttcgtggccctgaccttcgagcggcgggaggtcctggactcctccaatatcaaaccaatgaacctgatcggcgtggcaagaggcgaaaacatccccgccgtgatcgccctgaccgaccccgagggctgcccactgagccggtttaaggatagcctgggaaacccaacccacatcctgagaatcggcgagagctataaggagaagcagcggaccatccaggccaagaaggaggtggagcagcggagagccggcggctacagccggaagtacgccagcaaagccaagaatctggcagacgatatggtgagaaacaccgctagagatctgctgtactacgccgtgacccaggatgccatgctgatcttcgccaacctgagccggggcttcggccggcagggcaagcggaccttcatggccgagagacagtacacacggatggaggactggctgaccgccaagctggcctacgagggcctgagcaagacctacctgtccaagacactggcccagtacacctccaagacatgcagcaactgtgggtttaccatcaccagcgccgactacgacagggtgctggagaagctgaagaagacagcaacaggctggatgaccacaattaacggcaaggagctgaaggtggagggccagattacctactacaacagatacaagagacagaacgtagtcaaggacctgtccgtcgagctggatagactgagcgaagaatctgtgaacaacgacatctcctcctggacaaagggcagaagcggagaagctctgagcctcctgaagaaaagattctcccatagacccgtgcaggagaagttcgtgtgcctgaactgcggcttcgagacacacgcagccgagcaagccgccctgaacatcgccagatcctggctgttcctgcggagccaggagtacaagaaataccagacaaacaagacaaccggcaacaccgataagagagccttcgtcgagacctggcagtccttttaccggaagaagcttaaggaggtgtggaaacctgccgtgcggtctggcggatctggcggaggctccacaagcgccgtgacccagctgaccttcgaggacgtggccgtgtacttcaccagggaggagtggaggtgcctgacccccgcccagaggaccctgtacagggacgtgatgctggacacctacaggaacctggtgagcgtgggcgtgagcccccccagcatgagcgtgatcctgcccctggagttccaggaggagccctgggtggcccagagccacgtgaccaccctgggcggcctgaacggctgggagggcaccagccccaagaaaaagagaaaagtctaagctgccttctgcggggcttgccttctggccatgcccttcttctctcccttgcacctgtacctcttggtctttgaataaagcctgagtaggaaggctagcaaaaaaaaaaaaaaaaaaaaaaaaaaaaaaaaaaaaaaaaaaaaaaaaaaaaaaaaaaaaaaaaaaaaaaaaaaaaaaaa

SEQ ID NO: 6500 - RNA, 5797 nt, synthetic construct
  source 1..5797: mol_type = other RNA
aggaaataagagagaaaagaagagtaagaagaaatataagagccaccatggcccctaagaagaagcgtaaagtgagccggatggaacgcctcgtctacgaggtgcggcagaagtgcagaaacatcgaggacatctgcatctcctgcggatctctgaacgtgaccctggagcacccactgttcatcggcggcatgtgccagaactgtaaaaactgttttctggagtgtgcctatcaatacgacgatgacggctaccagagctactgcaccatctgttgcggcggaagagaggtgctgatgtgtggaaataacaactgctgccggtgcttctgcgtggaatgcgtggacctgctggtgggccccggcgccgcccaggccgctattaaggaagatccttggaactgctacatgtgcggccacaagggcacatacggcctgctgagacggagagaggactggcctagcagactgcagatgttcttcgccaataaccacgaccaggagttcgacccccctaaggtgtaccctcccgtccccgccgagaagagaaagcccatccgggtcctgagcctgttcgatggcatcgccaccggtctgctggtgctgaaggacctgggcatccaggtggataggtacattgcctccgaggtgtgcgaggactccatcaccgtgggaatggtgcgtcatcagggcaagatcatgtacgtgggcgacgtgcggagcgtgacacagaagcatatccaggagtggggccctttcgacctggtgatcggcggcagcccttgcaatgacctgagcatcgtgaacccagcccggaagggcctgtacgagggaaccggcagactgttcttcgagttttacagactgctgcacgacgcccggcctaaggaaggcgacgaccggcccttcttttggctgttcgagaatgtggtggccatgggagtcagcgacaagcgggatattagccggttcctggagagcaaccccgtgatgatcgatgccaaggaagtgagcgccgcccaccgggccagatacttctggggcaatctgcctggcatgaacagacccctggccagcaccgtgaacgacaagctggagctgcaggagtgcctggagcacggccggatcgccaagttcagcaaggtgagaaccatcaccacccgaagcaacagcatcaaacaaggcaaggaccagcactttcctgtgttcatgaacgagaaggaggacatcctgtggtgtaccgagatggagagagtgttcgggttcccagtccactacacagatgtcagcaacatgtctagactggccagacagagactgctgggaagaagctggtccgtccctgtgatcagacacctgttcgcccctctgaaggagtacttcgcctgcgtgagcagcggcaacagcaacgccaacagccggggccccagcttctctagcggcctggtgccactgtccctgagagggagccacatgggccccatggagatctacaaaaccgtgagcgcctggaagcggcagcctgtgcgcgtgctgagcctgtttcggaatatcgataaagtcctgaaaagcctgggattcctggagagcggctctggctccggcggtggcaccctgaagtacgtggaggatgtgacaaacgtggtcagacgggatgtggagaagtggggccccttcgatctggtgtacggcagcacccaacccctgggcagctcttgtgaccggtgccctggctggtacatgtttcagttccaccggatcctgcagtacgccctgccgagacaggagtcccagcggccattcttttggattttcatggacaacttgctgctgaccgaggatgaccaggaaactaccactcggttcctgcagaccgaagccgtgaccctgcaggacgtgagaggccgggactaccagaacgccatgcgggtgtggtccaacatccctggactgaaaagcaagcacgcacctctgacccctaaagaagaggagtacctgcaggcccaggtgcggagcagaagcaagctggacgcccctaaggtggatctgctggtgaagaattgcctcctgcccctgagagagtacttcaagtatttcagccagaatagtctgcccctgggcggcccaagcagcggcgcccctcctcccagcggcggcagcccagccggctccccaacctctaccgaggagggcacctctgagtccgccacccccgagagcggccctggcacctccaccgagcccagcgagggcagcgcacccggcagccctgccggcagccccacctccacagaggagggaaccagcaccgagcccagcgaaggcagcgccccaggcaccagcaccgagcctagtgagggcggctctggcggcggcagcgcccaggagattaaacggatcaacaagatcagaagaagacttgtgaaagacagcaacaccaagaaggccggcaagacaggccccatgaaaaccctgctggttagagtgatgacacccgatctgagagagcggctggaaaacctgagaaagaagcctgaaaatatcccccagcccatcagcaatacatctagagccaacctgaataagctgctgaccgattacaccgaaatgaagaaggcgatcctgcatgtgtactgggaagagttccagaaggaccctgtgggcctgatgagccgggtggcccagcctgccagcaagaagatcgatcagaacaagctgaaacctgagatggacgagaagggcaacctgaccaccgccggctttgcctgctctcagtgtggccagcccctgttcgtgtacaagctggagcaggtgtctgagaagggcaaggcttacaccaactacttcggacggtgcaatgtggccgagcacgaaaagctgatcctgctggcccagctgaagcccgagaaggatagcgacgaagccgtgacatatagcctgggaaagtttgggcagagggccctggatttctacagcattcatgtgaccaaggagtccacccaccccgtgaagcccctggcccagatcgccggaaacagatacgcctccggacctgtgggaaaggccctgagcgacgcatgtatgggcacaatcgcctccttcctgtctaagtaccaggacatcatcatcgaacaccagaaggtggtgaagggcaaccagaagagactggagagcctgcgggagctggccggcaaggaaaacctggaataccctagcgtgaccctgccacctcagcctcacaccaaggagggcgttgatgcctacaacgaagtgatcgcccgggtgcgaatgtgggtgaacctgaacctgtggcagaagctgaagctaagcagagatgatgccaagcctctgctgagactgaagggattcccttcctttcctctggtcgagagacaggccaacgaagtggactggtgggacatggtgtgtaacgtgaagaagctgatcaacgagaaaaaggaggatggcaaggtgttttggcagaatctggctggctacaagagacaggaagccctgagaccatacctgagcagcgaggaagatcggaagaagggaaagaaattcgctcggtaccagctgggcgacctgctgctgcacctggaaaagaagcacggcgaggactggggaaaggtgtacgacgaggcctgggagcggattgacaagaaagtggaaggcctgagcaagcacatcaagctggaagaggaacggagaagcgaggacgcccagagcaaggccgccctgaccgactggctgcgggctaaggccagcttcgtgatcgagggcctgaaggaggccgacaaggacgagttctgcagatgcgagctgaagctgcagaagtggtacggggacctgcggggaaagcccttcgccatcgaagccgagaacagcatcctggacatcagcggcttcagcaagcagtacaactgtgccttcatctggcagaaggacggcgtgaagaagctgaacctgtacctgatcatcaactacttcaagggcggcaagctgcggttcaagaagatcaaacctgaagccttcgaagccaacagattctacaccgtgatcaacaaaaagagcggcgagatcgtgcccatggaggtgaacttcaacttcgacgaccccaacctgatcatcctgcctctggcctttggcaagagacagggcagagaattcatctggaacgacctgctgtccctggaaaccggcagcctgaagctggccaacggaagagtgatcgagaagacactgtacaacagaagaacccggcaggatgagcctgccctgttcgtggccctgaccttcgagcggcgggaggtcctggactcctccaatatcaaaccaatgaacctgatcggcgtggcaagaggcgaaaacatccccgccgtgatcgccctgaccgaccccgagggctgcccactgagccggtttaaggatagcctgggaaacccaacccacatcctgagaatcggcgagagctataaggagaagcagcggaccatccaggccaagaaggaggtggagcagcggagagccggcggctacagccggaagtacgccagcaaagccaagaatctggcagacgatatggtgagaaacaccgctagagatctgctgtactacgccgtgacccaggatgccatgctgatcttcgccaacctgagccggggcttcggccggcagggcaagcggaccttcatggccgagagacagtacacacggatggaggactggctgaccgccaagctggcctacgagggcctgagcaagacctacctgtccaagacactggcccagtacacctccaagacatgcagcaactgtgggtttaccatcaccagcgccgactacgacagggtgctggagaagctgaagaagacagcaacaggctggatgaccacaattaacggcaaggagctgaaggtggagggccagattacctactacaacagatacaagagacagaacgtagtcaaggacctgtccgtcgagctggatagactgagcgaagaatctgtgaacaacgacatctcctcctggacaaagggcagaagcggagaagctctgagcctcctgaagaaaagattctcccatagacccgtgcaggagaagttcgtgtgcctgaactgcggcttcgagacacacgcagccgagcaagccgccctgaacatcgccagatcctggctgttcctgcggagccaggagtacaagaaataccagacaaacaagacaaccggcaacaccgataagagagccttcgtcgagacctggcagtccttttaccggaagaagcttaaggaggtgtggaaacctgccgtgcggtctggcggatctggcggaggctccacaagcgccctgaggagcgtgatgttcagcgacatcagcatcgacttcagccccgaggagtgggagtacctggacctggagcagaagaacctgtacagggacgtgatgctggagaactacagcaacctggtgagcctgggctgcttcatcagcaagcccgtggtgatcagcctgctggagcagggcaaggagccctggaaggtggtgaggaagaggaggcagtaccccgacctggagaccaagtacgagaccagccccaagaaaaagagaaaagtctaagctgccttctgcggggcttgccttctggccatgcccttcttctctcccttgcacctgtacctcttggtctttgaataaagcctgagtaggaaggctagcaaaaaaaaaaaaaaaaaaaaaaaaaaaaaaaaaaaaaaaaaaaaaaaaaaaaaaaaaaaaaaaaaaaaaaaaaaaaaaaa

SEQ ID NO: 6501 - RNA, 5797 nt, synthetic construct
  source 1..5797: mol_type = other RNA
aggaaataagagagaaaagaagagtaagaagaaatataagagccaccatggcccctaagaagaagcgtaaagtgagccggatggaacgcctcgtctacgaggtgcggcagaagtgcagaaacatcgaggacatctgcatctcctgcggatctctgaacgtgaccctggagcacccactgttcatcggcggcatgtgccagaactgtaaaaactgttttctggagtgtgcctatcaatacgacgatgacggctaccagagctactgcaccatctgttgcggcggaagagaggtgctgatgtgtggaaataacaactgctgccggtgcttctgcgtggaatgcgtggacctgctggtgggccccggcgccgcccaggccgctattaaggaagatccttggaactgctacatgtgcggccacaagggcacatacggcctgctgagacggagagaggactggcctagcagactgcagatgttcttcgccaataaccacgaccaggagttcgacccccctaaggtgtaccctcccgtccccgccgagaagagaaagcccatccgggtcctgagcctgttcgatggcatcgccaccggtctgctggtgctgaaggacctgggcatccaggtggataggtacattgcctccgaggtgtgcgaggactccatcaccgtgggaatggtgcgtcatcagggcaagatcatgtacgtgggcgacgtgcggagcgtgacacagaagcatatccaggagtggggccctttcgacctggtgatcggcggcagcccttgcaatgacctgagcatcgtgaacccagcccggaagggcctgtacgagggaaccggcagactgttcttcgagttttacagactgctgcacgacgcccggcctaaggaaggcgacgaccggcccttcttttggctgttcgagaatgtggtggccatgggagtcagcgacaagcgggatattagccggttcctggagagcaaccccgtgatgatcgatgccaaggaagtgagcgccgcccaccgggccagatacttctggggcaatctgcctggcatgaacagacccctggccagcaccgtgaacgacaagctggagctgcaggagtgcctggagcacggccggatcgccaagttcagcaaggtgagaaccatcaccacccgaagcaacagcatcaaacaaggcaaggaccagcactttcctgtgttcatgaacgagaaggaggacatcctgtggtgtaccgagatggagagagtgttcgggttcccagtccactacacagatgtcagcaacatgtctagactggccagacagagactgctgggaagaagctggtccgtccctgtgatcagacacctgttcgcccctctgaaggagtacttcgcctgcgtgagcagcggcaacagcaacgccaacagccggggccccagcttctctagcggcctggtgccactgtccctgagagggagccacatgggccccatggagatctacaaaaccgtgagcgcctggaagcggcagcctgtgcgcgtgctgagcctgtttcggaatatcgataaagtcctgaaaagcctgggattcctggagagcggctctggctccggcggtggcaccctgaagtacgtggaggatgtgacaaacgtggtcagacgggatgtggagaagtggggccccttcgatctggtgtacggcagcacccaacccctgggcagctcttgtgaccggtgccctggctggtacatgtttcagttccaccggatcctgcagtacgccctgccgagacaggagtcccagcggccattcttttggattttcatggacaacttgctgctgaccgaggatgaccaggaaactaccactcggttcctgcagaccgaagccgtgaccctgcaggacgtgagaggccgggactaccagaacgccatgcgggtgtggtccaacatccctggactgaaaagcaagcacgcacctctgacccctaaagaagaggagtacctgcaggcccaggtgcggagcagaagcaagctggacgcccctaaggtggatctgctggtgaagaattgcctcctgcccctgagagagtacttcaagtatttcagccagaatagtctgcccctgggcggcccaagcagcggcgcccctcctcccagcggcggcagcccagccggctccccaacctctaccgaggagggcacctctgagtccgccacccccgagagcggccctggcacctccaccgagcccagcgagggcagcgcacccggcagccctgccggcagccccacctccacagaggagggaaccagcaccgagcccagcgaaggcagcgccccaggcaccagcaccgagcctagtgagggcggctctggcggcggcagcgcccaggagattaaacggatcaacaagatcagaagaagacttgtgaaagacagcaacaccaagaaggccggcaagacaggccccatgaaaaccctgctggttagagtgatgacacccgatctgagagagcggctggaaaacctgagaaagaagcctgaaaatatcccccagcccatcagcaatacatctagagccaacctgaataagctgctgaccgattacaccgaaatgaagaaggcgatcctgcatgtgtactgggaagagttccagaaggaccctgtgggcctgatgagccgggtggcccagcctgccagcaagaagatcgatcagaacaagctgaaacctgagatggacgagaagggcaacctgaccaccgccggctttgcctgctctcagtgtggccagcccctgttcgtgtacaagctggagcaggtgtctgagaagggcaaggcttacaccaactacttcggacggtgcaatgtggccgagcacgaaaagctgatcctgctggcccagctgaagcccgagaaggatagcgacgaagccgtgacatatagcctgggaaagtttgggcagagggccctggatttctacagcattcatgtgaccaaggagtccacccaccccgtgaagcccctggcccagatcgccggaaacagatacgcctccggacctgtgggaaaggccctgagcgacgcatgtatgggcacaatcgcctccttcctgtctaagtaccaggacatcatcatcgaacaccagaaggtggtgaagggcaaccagaagagactggagagcctgcgggagctggccggcaaggaaaacctggaataccctagcgtgaccctgccacctcagcctcacaccaaggagggcgttgatgcctacaacgaagtgatcgcccgggtgcgaatgtgggtgaacctgaacctgtggcagaagctgaagctaagcagagatgatgccaagcctctgctgagactgaagggattcccttcctttcctctggtcgagagacaggccaacgaagtggactggtgggacatggtgtgtaacgtgaagaagctgatcaacgagaaaaaggaggatggcaaggtgttttggcagaatctggctggctacaagagacaggaagccctgagaccatacctgagcagcgaggaagatcggaagaagggaaagaaattcgctcggtaccagctgggcgacctgctgctgcacctggaaaagaagcacggcgaggactggggaaaggtgtacgacgaggcctgggagcggattgacaagaaagtggaaggcctgagcaagcacatcaagctggaagaggaacggagaagcgaggacgcccagagcaaggccgccctgaccgactggctgcgggctaaggccagcttcgtgatcgagggcctgaaggaggccgacaaggacgagttctgcagatgcgagctgaagctgcagaagtggtacggggacctgcggggaaagcccttcgccatcgaagccgagaacagcatcctggacatcagcggcttcagcaagcagtacaactgtgccttcatctggcagaaggacggcgtgaagaagctgaacctgtacctgatcatcaactacttcaagggcggcaagctgcggttcaagaagatcaaacctgaagccttcgaagccaacagattctacaccgtgatcaacaaaaagagcggcgagatcgtgcccatggaggtgaacttcaacttcgacgaccccaacctgatcatcctgcctctggcctttggcaagagacagggcagagaattcatctggaacgacctgctgtccctggaaaccggcagcctgaagctggccaacggaagagtgatcgagaagacactgtacaacagaagaacccggcaggatgagcctgccctgttcgtggccctgaccttcgagcggcgggaggtcctggactcctccaatatcaaaccaatgaacctgatcggcgtggcaagaggcgaaaacatccccgccgtgatcgccctgaccgaccccgagggctgcccactgagccggtttaaggatagcctgggaaacccaacccacatcctgagaatcggcgagagctataaggagaagcagcggaccatccaggccaagaaggaggtggagcagcggagagccggcggctacagccggaagtacgccagcaaagccaagaatctggcagacgatatggtgagaaacaccgctagagatctgctgtactacgccgtgacccaggatgccatgctgatcttcgccaacctgagccggggcttcggccggcagggcaagcggaccttcatggccgagagacagtacacacggatggaggactggctgaccgccaagctggcctacgagggcctgagcaagacctacctgtccaagacactggcccagtacacctccaagacatgcagcaactgtgggtttaccatcaccagcgccgactacgacagggtgctggagaagctgaagaagacagcaacaggctggatgaccacaattaacggcaaggagctgaaggtggagggccagattacctactacaacagatacaagagacagaacgtagtcaaggacctgtccgtcgagctggatagactgagcgaagaatctgtgaacaacgacatctcctcctggacaaagggcagaagcggagaagctctgagcctcctgaagaaaagattctcccatagacccgtgcaggagaagttcgtgtgcctgaactgcggcttcgagacacacgcagccgagcaagccgccctgaacatcgccagatcctggctgttcctgcggagccaggagtacaagaaataccagacaaacaagacaaccggcaacaccgataagagagccttcgtcgagacctggcagtccttttaccggaagaagcttaaggaggtgtggaaacctgccgtgcggtctggcggatctggcggaggctccacaagcgccgagatcaccctgatgaaccaggcccaggacagcaggagcatcctgttccaggagagcgtgaccttcgaggacgtggccgtgaacttcaccaacagggagtggcagtgcctgacctacgcccagaggcacctgtacaaggacgtgatgctggagaactacggcaacatggtgagcctgggcttccccttccccaagccccccctgatcagccacctggagagggaggtggacccctgcgtgaccagccccaagaaaaagagaaaagtctaagctgccttctgcggggcttgccttctggccatgcccttcttctctcccttgcacctgtacctcttggtctttgaataaagcctgagtaggaaggctagcaaaaaaaaaaaaaaaaaaaaaaaaaaaaaaaaaaaaaaaaaaaaaaaaaaaaaaaaaaaaaaaaaaaaaaaaaaaaaaaa

SEQ ID NO: 6502 - RNA, 5797 nt, synthetic construct
  source 1..5797: mol_type = other RNA
aggaaataagagagaaaagaagagtaagaagaaatataagagccaccatggcccctaagaagaagcgtaaagtgagccggatggaacgcctcgtctacgaggtgcggcagaagtgcagaaacatcgaggacatctgcatctcctgcggatctctgaacgtgaccctggagcacccactgttcatcggcggcatgtgccagaactgtaaaaactgttttctggagtgtgcctatcaatacgacgatgacggctaccagagctactgcaccatctgttgcggcggaagagaggtgctgatgtgtggaaataacaactgctgccggtgcttctgcgtggaatgcgtggacctgctggtgggccccggcgccgcccaggccgctattaaggaagatccttggaactgctacatgtgcggccacaagggcacatacggcctgctgagacggagagaggactggcctagcagactgcagatgttcttcgccaataaccacgaccaggagttcgacccccctaaggtgtaccctcccgtccccgccgagaagagaaagcccatccgggtcctgagcctgttcgatggcatcgccaccggtctgctggtgctgaaggacctgggcatccaggtggataggtacattgcctccgaggtgtgcgaggactccatcaccgtgggaatggtgcgtcatcagggcaagatcatgtacgtgggcgacgtgcggagcgtgacacagaagcatatccaggagtggggccctttcgacctggtgatcggcggcagcccttgcaatgacctgagcatcgtgaacccagcccggaagggcctgtacgagggaaccggcagactgttcttcgagttttacagactgctgcacgacgcccggcctaaggaaggcgacgaccggcccttcttttggctgttcgagaatgtggtggccatgggagtcagcgacaagcgggatattagccggttcctggagagcaaccccgtgatgatcgatgccaaggaagtgagcgccgcccaccgggccagatacttctggggcaatctgcctggcatgaacagacccctggccagcaccgtgaacgacaagctggagctgcaggagtgcctggagcacggccggatcgccaagttcagcaaggtgagaaccatcaccacccgaagcaacagcatcaaacaaggcaaggaccagcactttcctgtgttcatgaacgagaaggaggacatcctgtggtgtaccgagatggagagagtgttcgggttcccagtccactacacagatgtcagcaacatgtctagactggccagacagagactgctgggaagaagctggtccgtccctgtgatcagacacctgttcgcccctctgaaggagtacttcgcctgcgtgagcagcggcaacagcaacgccaacagccggggccccagcttctctagcggcctggtgccactgtccctgagagggagccacatgggccccatggagatctacaaaaccgtgagcgcctggaagcggcagcctgtgcgcgtgctgagcctgtttcggaatatcgataaagtcctgaaaagcctgggattcctggagagcggctctggctccggcggtggcaccctgaagtacgtggaggatgtgacaaacgtggtcagacgggatgtggagaagtggggccccttcgatctggtgtacggcagcacccaacccctgggcagctcttgtgaccggtgccctggctggtacatgtttcagttccaccggatcctgcagtacgccctgccgagacaggagtcccagcggccattcttttggattttcatggacaacttgctgctgaccgaggatgaccaggaaactaccactcggttcctgcagaccgaagccgtgaccctgcaggacgtgagaggccgggactaccagaacgccatgcgggtgtggtccaacatccctggactgaaaagcaagcacgcacctctgacccctaaagaagaggagtacctgcaggcccaggtgcggagcagaagcaagctggacgcccctaaggtggatctgctggtgaagaattgcctcctgcccctgagagagtacttcaagtatttcagccagaatagtctgcccctgggcggcccaagcagcggcgcccctcctcccagcggcggcagcccagccggctccccaacctctaccgaggagggcacctctgagtccgccacccccgagagcggccctggcacctccaccgagcccagcgagggcagcgcacccggcagccctgccggcagccccacctccacagaggagggaaccagcaccgagcccagcgaaggcagcgccccaggcaccagcaccgagcctagtgagggcggctctggcggcggcagcgcccaggagattaaacggatcaacaagatcagaagaagacttgtgaaagacagcaacaccaagaaggccggcaagacaggccccatgaaaaccctgctggttagagtgatgacacccgatctgagagagcggctggaaaacctgagaaagaagcctgaaaatatcccccagcccatcagcaatacatctagagccaacctgaataagctgctgaccgattacaccgaaatgaagaaggcgatcctgcatgtgtactgggaagagttccagaaggaccctgtgggcctgatgagccgggtggcccagcctgccagcaagaagatcgatcagaacaagctgaaacctgagatggacgagaagggcaacctgaccaccgccggctttgcctgctctcagtgtggccagcccctgttcgtgtacaagctggagcaggtgtctgagaagggcaaggcttacaccaactacttcggacggtgcaatgtggccgagcacgaaaagctgatcctgctggcccagctgaagcccgagaaggatagcgacgaagccgtgacatatagcctgggaaagtttgggcagagggccctggatttctacagcattcatgtgaccaaggagtccacccaccccgtgaagcccctggcccagatcgccggaaacagatacgcctccggacctgtgggaaaggccctgagcgacgcatgtatgggcacaatcgcctccttcctgtctaagtaccaggacatcatcatcgaacaccagaaggtggtgaagggcaaccagaagagactggagagcctgcgggagctggccggcaaggaaaacctggaataccctagcgtgaccctgccacctcagcctcacaccaaggagggcgttgatgcctacaacgaagtgatcgcccgggtgcgaatgtgggtgaacctgaacctgtggcagaagctgaagctaagcagagatgatgccaagcctctgctgagactgaagggattcccttcctttcctctggtcgagagacaggccaacgaagtggactggtgggacatggtgtgtaacgtgaagaagctgatcaacgagaaaaaggaggatggcaaggtgttttggcagaatctggctggctacaagagacaggaagccctgagaccatacctgagcagcgaggaagatcggaagaagggaaagaaattcgctcggtaccagctgggcgacctgctgctgcacctggaaaagaagcacggcgaggactggggaaaggtgtacgacgaggcctgggagcggattgacaagaaagtggaaggcctgagcaagcacatcaagctggaagaggaacggagaagcgaggacgcccagagcaaggccgccctgaccgactggctgcgggctaaggccagcttcgtgatcgagggcctgaaggaggccgacaaggacgagttctgcagatgcgagctgaagctgcagaagtggtacggggacctgcggggaaagcccttcgccatcgaagccgagaacagcatcctggacatcagcggcttcagcaagcagtacaactgtgccttcatctggcagaaggacggcgtgaagaagctgaacctgtacctgatcatcaactacttcaagggcggcaagctgcggttcaagaagatcaaacctgaagccttcgaagccaacagattctacaccgtgatcaacaaaaagagcggcgagatcgtgcccatggaggtgaacttcaacttcgacgaccccaacctgatcatcctgcctctggcctttggcaagagacagggcagagaattcatctggaacgacctgctgtccctggaaaccggcagcctgaagctggccaacggaagagtgatcgagaagacactgtacaacagaagaacccggcaggatgagcctgccctgttcgtggccctgaccttcgagcggcgggaggtcctggactcctccaatatcaaaccaatgaacctgatcggcgtggcaagaggcgaaaacatccccgccgtgatcgccctgaccgaccccgagggctgcccactgagccggtttaaggatagcctgggaaacccaacccacatcctgagaatcggcgagagctataaggagaagcagcggaccatccaggccaagaaggaggtggagcagcggagagccggcggctacagccggaagtacgccagcaaagccaagaatctggcagacgatatggtgagaaacaccgctagagatctgctgtactacgccgtgacccaggatgccatgctgatcttcgccaacctgagccggggcttcggccggcagggcaagcggaccttcatggccgagagacagtacacacggatggaggactggctgaccgccaagctggcctacgagggcctgagcaagacctacctgtccaagacactggcccagtacacctccaagacatgcagcaactgtgggtttaccatcaccagcgccgactacgacagggtgctggagaagctgaagaagacagcaacaggctggatgaccacaattaacggcaaggagctgaaggtggagggccagattacctactacaacagatacaagagacagaacgtagtcaaggacctgtccgtcgagctggatagactgagcgaagaatctgtgaacaacgacatctcctcctggacaaagggcagaagcggagaagctctgagcctcctgaagaaaagattctcccatagacccgtgcaggagaagttcgtgtgcctgaactgcggcttcgagacacacgcagccgagcaagccgccctgaacatcgccagatcctggctgttcctgcggagccaggagtacaagaaataccagacaaacaagacaaccggcaacaccgataagagagccttcgtcgagacctggcagtccttttaccggaagaagcttaaggaggtgtggaaacctgccgtgcggtctggcggatctggcggaggctccacaagcaggcccagggccgtgaagttcgccgacgtggccgtgtacttcagcaccgaggagtggggctgcctgaggcccgcccagagggccctgtacagggacgtgatgagggagacctacggccacctgggcgccctgggctgcgccggccccaagcccgccctgatcagctggctggagaggaacaccgacgactgggagcccgccgccctggacccccaggagtgccccaggggcgtggccgtgcagaccagccccaagaaaaagagaaaagtctaagctgccttctgcggggcttgccttctggccatgcccttcttctctcccttgcacctgtacctcttggtctttgaataaagcctgagtaggaaggctagcaaaaaaaaaaaaaaaaaaaaaaaaaaaaaaaaaaaaaaaaaaaaaaaaaaaaaaaaaaaaaaaaaaaaaaaaaaaaaaaa

SEQ ID NO: 6503 - RNA, 5797 nt, synthetic construct
  source 1..5797: mol_type = other RNA
aggaaataagagagaaaagaagagtaagaagaaatataagagccaccatggcccctaagaagaagcgtaaagtgagccggatggaacgcctcgtctacgaggtgcggcagaagtgcagaaacatcgaggacatctgcatctcctgcggatctctgaacgtgaccctggagcacccactgttcatcggcggcatgtgccagaactgtaaaaactgttttctggagtgtgcctatcaatacgacgatgacggctaccagagctactgcaccatctgttgcggcggaagagaggtgctgatgtgtggaaataacaactgctgccggtgcttctgcgtggaatgcgtggacctgctggtgggccccggcgccgcccaggccgctattaaggaagatccttggaactgctacatgtgcggccacaagggcacatacggcctgctgagacggagagaggactggcctagcagactgcagatgttcttcgccaataaccacgaccaggagttcgacccccctaaggtgtaccctcccgtccccgccgagaagagaaagcccatccgggtcctgagcctgttcgatggcatcgccaccggtctgctggtgctgaaggacctgggcatccaggtggataggtacattgcctccgaggtgtgcgaggactccatcaccgtgggaatggtgcgtcatcagggcaagatcatgtacgtgggcgacgtgcggagcgtgacacagaagcatatccaggagtggggccctttcgacctggtgatcggcggcagcccttgcaatgacctgagcatcgtgaacccagcccggaagggcctgtacgagggaaccggcagactgttcttcgagttttacagactgctgcacgacgcccggcctaaggaaggcgacgaccggcccttcttttggctgttcgagaatgtggtggccatgggagtcagcgacaagcgggatattagccggttcctggagagcaaccccgtgatgatcgatgccaaggaagtgagcgccgcccaccgggccagatacttctggggcaatctgcctggcatgaacagacccctggccagcaccgtgaacgacaagctggagctgcaggagtgcctggagcacggccggatcgccaagttcagcaaggtgagaaccatcaccacccgaagcaacagcatcaaacaaggcaaggaccagcactttcctgtgttcatgaacgagaaggaggacatcctgtggtgtaccgagatggagagagtgttcgggttcccagtccactacacagatgtcagcaacatgtctagactggccagacagagactgctgggaagaagctggtccgtccctgtgatcagacacctgttcgcccctctgaaggagtacttcgcctgcgtgagcagcggcaacagcaacgccaacagccggggccccagcttctctagcggcctggtgccactgtccctgagagggagccacatgggccccatggagatctacaaaaccgtgagcgcctggaagcggcagcctgtgcgcgtgctgagcctgtttcggaatatcgataaagtcctgaaaagcctgggattcctggagagcggctctggctccggcggtggcaccctgaagtacgtggaggatgtgacaaacgtggtcagacgggatgtggagaagtggggccccttcgatctggtgtacggcagcacccaacccctgggcagctcttgtgaccggtgccctggctggtacatgtttcagttccaccggatcctgcagtacgccctgccgagacaggagtcccagcggccattcttttggattttcatggacaacttgctgctgaccgaggatgaccaggaaactaccactcggttcctgcagaccgaagccgtgaccctgcaggacgtgagaggccgggactaccagaacgccatgcgggtgtggtccaacatccctggactgaaaagcaagcacgcacctctgacccctaaagaagaggagtacctgcaggcccaggtgcggagcagaagcaagctggacgcccctaaggtggatctgctggtgaagaattgcctcctgcccctgagagagtacttcaagtatttcagccagaatagtctgcccctgggcggcccaagcagcggcgcccctcctcccagcggcggcagcccagccggctccccaacctctaccgaggagggcacctctgagtccgccacccccgagagcggccctggcacctccaccgagcccagcgagggcagcgcacccggcagccctgccggcagccccacctccacagaggagggaaccagcaccgagcccagcgaaggcagcgccccaggcaccagcaccgagcctagtgagggcggctctggcggcggcagcgcccaggagattaaacggatcaacaagatcagaagaagacttgtgaaagacagcaacaccaagaaggccggcaagacaggccccatgaaaaccctgctggttagagtgatgacacccgatctgagagagcggctggaaaacctgagaaagaagcctgaaaatatcccccagcccatcagcaatacatctagagccaacctgaataagctgctgaccgattacaccgaaatgaagaaggcgatcctgcatgtgtactgggaagagttccagaaggaccctgtgggcctgatgagccgggtggcccagcctgccagcaagaagatcgatcagaacaagctgaaacctgagatggacgagaagggcaacctgaccaccgccggctttgcctgctctcagtgtggccagcccctgttcgtgtacaagctggagcaggtgtctgagaagggcaaggcttacaccaactacttcggacggtgcaatgtggccgagcacgaaaagctgatcctgctggcccagctgaagcccgagaaggatagcgacgaagccgtgacatatagcctgggaaagtttgggcagagggccctggatttctacagcattcatgtgaccaaggagtccacccaccccgtgaagcccctggcccagatcgccggaaacagatacgcctccggacctgtgggaaaggccctgagcgacgcatgtatgggcacaatcgcctccttcctgtctaagtaccaggacatcatcatcgaacaccagaaggtggtgaagggcaaccagaagagactggagagcctgcgggagctggccggcaaggaaaacctggaataccctagcgtgaccctgccacctcagcctcacaccaaggagggcgttgatgcctacaacgaagtgatcgcccgggtgcgaatgtgggtgaacctgaacctgtggcagaagctgaagctaagcagagatgatgccaagcctctgctgagactgaagggattcccttcctttcctctggtcgagagacaggccaacgaagtggactggtgggacatggtgtgtaacgtgaagaagctgatcaacgagaaaaaggaggatggcaaggtgttttggcagaatctggctggctacaagagacaggaagccctgagaccatacctgagcagcgaggaagatcggaagaagggaaagaaattcgctcggtaccagctgggcgacctgctgctgcacctggaaaagaagcacggcgaggactggggaaaggtgtacgacgaggcctgggagcggattgacaagaaagtggaaggcctgagcaagcacatcaagctggaagaggaacggagaagcgaggacgcccagagcaaggccgccctgaccgactggctgcgggctaaggccagcttcgtgatcgagggcctgaaggaggccgacaaggacgagttctgcagatgcgagctgaagctgcagaagtggtacggggacctgcggggaaagcccttcgccatcgaagccgagaacagcatcctggacatcagcggcttcagcaagcagtacaactgtgccttcatctggcagaaggacggcgtgaagaagctgaacctgtacctgatcatcaactacttcaagggcggcaagctgcggttcaagaagatcaaacctgaagccttcgaagccaacagattctacaccgtgatcaacaaaaagagcggcgagatcgtgcccatggaggtgaacttcaacttcgacgaccccaacctgatcatcctgcctctggcctttggcaagagacagggcagagaattcatctggaacgacctgctgtccctggaaaccggcagcctgaagctggccaacggaagagtgatcgagaagacactgtacaacagaagaacccggcaggatgagcctgccctgttcgtggccctgaccttcgagcggcgggaggtcctggactcctccaatatcaaaccaatgaacctgatcggcgtggcaagaggcgaaaacatccccgccgtgatcgccctgaccgaccccgagggctgcccactgagccggtttaaggatagcctgggaaacccaacccacatcctgagaatcggcgagagctataaggagaagcagcggaccatccaggccaagaaggaggtggagcagcggagagccggcggctacagccggaagtacgccagcaaagccaagaatctggcagacgatatggtgagaaacaccgctagagatctgctgtactacgccgtgacccaggatgccatgctgatcttcgccaacctgagccggggcttcggccggcagggcaagcggaccttcatggccgagagacagtacacacggatggaggactggctgaccgccaagctggcctacgagggcctgagcaagacctacctgtccaagacactggcccagtacacctccaagacatgcagcaactgtgggtttaccatcaccagcgccgactacgacagggtgctggagaagctgaagaagacagcaacaggctggatgaccacaattaacggcaaggagctgaaggtggagggccagattacctactacaacagatacaagagacagaacgtagtcaaggacctgtccgtcgagctggatagactgagcgaagaatctgtgaacaacgacatctcctcctggacaaagggcagaagcggagaagctctgagcctcctgaagaaaagattctcccatagacccgtgcaggagaagttcgtgtgcctgaactgcggcttcgagacacacgcagccgagcaagccgccctgaacatcgccagatcctggctgttcctgcggagccaggagtacaagaaataccagacaaacaagacaaccggcaacaccgataagagagccttcgtcgagacctggcagtccttttaccggaagaagcttaaggaggtgtggaaacctgccgtgcggtctggcggatctggcggaggctccacaagcggccaggagagcgtgagcttcaaggacgtgaccgtggacttcacctgggacgagtggctgcagctgaccggcatgcagaggaccctgtacagggacgtgatgctggagaactacagccacctggtgagcgtgggctgctgcatcaccaagcccgaggtgatcttcaagctggagcagggcgaggagccctggcccagggagggcgagctgcccggcaggagggaccccgacaggagccaggagaccagccccaagaaaaagagaaaagtctaagctgccttctgcggggcttgccttctggccatgcccttcttctctcccttgcacctgtacctcttggtctttgaataaagcctgagtaggaaggctagcaaaaaaaaaaaaaaaaaaaaaaaaaaaaaaaaaaaaaaaaaaaaaaaaaaaaaaaaaaaaaaaaaaaaaaaaaaaaaaaa

SEQ ID NO: 6504 - RNA, 5797 nt, synthetic construct
  source 1..5797: mol_type = other RNA
aggaaataagagagaaaagaagagtaagaagaaatataagagccaccatggcccctaagaagaagcgtaaagtgagccggatggaacgcctcgtctacgaggtgcggcagaagtgcagaaacatcgaggacatctgcatctcctgcggatctctgaacgtgaccctggagcacccactgttcatcggcggcatgtgccagaactgtaaaaactgttttctggagtgtgcctatcaatacgacgatgacggctaccagagctactgcaccatctgttgcggcggaagagaggtgctgatgtgtggaaataacaactgctgccggtgcttctgcgtggaatgcgtggacctgctggtgggccccggcgccgcccaggccgctattaaggaagatccttggaactgctacatgtgcggccacaagggcacatacggcctgctgagacggagagaggactggcctagcagactgcagatgttcttcgccaataaccacgaccaggagttcgacccccctaaggtgtaccctcccgtccccgccgagaagagaaagcccatccgggtcctgagcctgttcgatggcatcgccaccggtctgctggtgctgaaggacctgggcatccaggtggataggtacattgcctccgaggtgtgcgaggactccatcaccgtgggaatggtgcgtcatcagggcaagatcatgtacgtgggcgacgtgcggagcgtgacacagaagcatatccaggagtggggccctttcgacctggtgatcggcggcagcccttgcaatgacctgagcatcgtgaacccagcccggaagggcctgtacgagggaaccggcagactgttcttcgagttttacagactgctgcacgacgcccggcctaaggaaggcgacgaccggcccttcttttggctgttcgagaatgtggtggccatgggagtcagcgacaagcgggatattagccggttcctggagagcaaccccgtgatgatcgatgccaaggaagtgagcgccgcccaccgggccagatacttctggggcaatctgcctggcatgaacagacccctggccagcaccgtgaacgacaagctggagctgcaggagtgcctggagcacggccggatcgccaagttcagcaaggtgagaaccatcaccacccgaagcaacagcatcaaacaaggcaaggaccagcactttcctgtgttcatgaacgagaaggaggacatcctgtggtgtaccgagatggagagagtgttcgggttcccagtccactacacagatgtcagcaacatgtctagactggccagacagagactgctgggaagaagctggtccgtccctgtgatcagacacctgttcgcccctctgaaggagtacttcgcctgcgtgagcagcggcaacagcaacgccaacagccggggccccagcttctctagcggcctggtgccactgtccctgagagggagccacatgggccccatggagatctacaaaaccgtgagcgcctggaagcggcagcctgtgcgcgtgctgagcctgtttcggaatatcgataaagtcctgaaaagcctgggattcctggagagcggctctggctccggcggtggcaccctgaagtacgtggaggatgtgacaaacgtggtcagacgggatgtggagaagtggggccccttcgatctggtgtacggcagcacccaacccctgggcagctcttgtgaccggtgccctggctggtacatgtttcagttccaccggatcctgcagtacgccctgccgagacaggagtcccagcggccattcttttggattttcatggacaacttgctgctgaccgaggatgaccaggaaactaccactcggttcctgcagaccgaagccgtgaccctgcaggacgtgagaggccgggactaccagaacgccatgcgggtgtggtccaacatccctggactgaaaagcaagcacgcacctctgacccctaaagaagaggagtacctgcaggcccaggtgcggagcagaagcaagctggacgcccctaaggtggatctgctggtgaagaattgcctcctgcccctgagagagtacttcaagtatttcagccagaatagtctgcccctgggcggcccaagcagcggcgcccctcctcccagcggcggcagcccagccggctccccaacctctaccgaggagggcacctctgagtccgccacccccgagagcggccctggcacctccaccgagcccagcgagggcagcgcacccggcagccctgccggcagccccacctccacagaggagggaaccagcaccgagcccagcgaaggcagcgccccaggcaccagcaccgagcctagtgagggcggctctggcggcggcagcgcccaggagattaaacggatcaacaagatcagaagaagacttgtgaaagacagcaacaccaagaaggccggcaagacaggccccatgaaaaccctgctggttagagtgatgacacccgatctgagagagcggctggaaaacctgagaaagaagcctgaaaatatcccccagcccatcagcaatacatctagagccaacctgaataagctgctgaccgattacaccgaaatgaagaaggcgatcctgcatgtgtactgggaagagttccagaaggaccctgtgggcctgatgagccgggtggcccagcctgccagcaagaagatcgatcagaacaagctgaaacctgagatggacgagaagggcaacctgaccaccgccggctttgcctgctctcagtgtggccagcccctgttcgtgtacaagctggagcaggtgtctgagaagggcaaggcttacaccaactacttcggacggtgcaatgtggccgagcacgaaaagctgatcctgctggcccagctgaagcccgagaaggatagcgacgaagccgtgacatatagcctgggaaagtttgggcagagggccctggatttctacagcattcatgtgaccaaggagtccacccaccccgtgaagcccctggcccagatcgccggaaacagatacgcctccggacctgtgggaaaggccctgagcgacgcatgtatgggcacaatcgcctccttcctgtctaagtaccaggacatcatcatcgaacaccagaaggtggtgaagggcaaccagaagagactggagagcctgcgggagctggccggcaaggaaaacctggaataccctagcgtgaccctgccacctcagcctcacaccaaggagggcgttgatgcctacaacgaagtgatcgcccgggtgcgaatgtgggtgaacctgaacctgtggcagaagctgaagctaagcagagatgatgccaagcctctgctgagactgaagggattcccttcctttcctctggtcgagagacaggccaacgaagtggactggtgggacatggtgtgtaacgtgaagaagctgatcaacgagaaaaaggaggatggcaaggtgttttggcagaatctggctggctacaagagacaggaagccctgagaccatacctgagcagcgaggaagatcggaagaagggaaagaaattcgctcggtaccagctgggcgacctgctgctgcacctggaaaagaagcacggcgaggactggggaaaggtgtacgacgaggcctgggagcggattgacaagaaagtggaaggcctgagcaagcacatcaagctggaagaggaacggagaagcgaggacgcccagagcaaggccgccctgaccgactggctgcgggctaaggccagcttcgtgatcgagggcctgaaggaggccgacaaggacgagttctgcagatgcgagctgaagctgcagaagtggtacggggacctgcggggaaagcccttcgccatcgaagccgagaacagcatcctggacatcagcggcttcagcaagcagtacaactgtgccttcatctggcagaaggacggcgtgaagaagctgaacctgtacctgatcatcaactacttcaagggcggcaagctgcggttcaagaagatcaaacctgaagccttcgaagccaacagattctacaccgtgatcaacaaaaagagcggcgagatcgtgcccatggaggtgaacttcaacttcgacgaccccaacctgatcatcctgcctctggcctttggcaagagacagggcagagaattcatctggaacgacctgctgtccctggaaaccggcagcctgaagctggccaacggaagagtgatcgagaagacactgtacaacagaagaacccggcaggatgagcctgccctgttcgtggccctgaccttcgagcggcgggaggtcctggactcctccaatatcaaaccaatgaacctgatcggcgtggcaagaggcgaaaacatccccgccgtgatcgccctgaccgaccccgagggctgcccactgagccggtttaaggatagcctgggaaacccaacccacatcctgagaatcggcgagagctataaggagaagcagcggaccatccaggccaagaaggaggtggagcagcggagagccggcggctacagccggaagtacgccagcaaagccaagaatctggcagacgatatggtgagaaacaccgctagagatctgctgtactacgccgtgacccaggatgccatgctgatcttcgccaacctgagccggggcttcggccggcagggcaagcggaccttcatggccgagagacagtacacacggatggaggactggctgaccgccaagctggcctacgagggcctgagcaagacctacctgtccaagacactggcccagtacacctccaagacatgcagcaactgtgggtttaccatcaccagcgccgactacgacagggtgctggagaagctgaagaagacagcaacaggctggatgaccacaattaacggcaaggagctgaaggtggagggccagattacctactacaacagatacaagagacagaacgtagtcaaggacctgtccgtcgagctggatagactgagcgaagaatctgtgaacaacgacatctcctcctggacaaagggcagaagcggagaagctctgagcctcctgaagaaaagattctcccatagacccgtgcaggagaagttcgtgtgcctgaactgcggcttcgagacacacgcagccgagcaagccgccctgaacatcgccagatcctggctgttcctgcggagccaggagtacaagaaataccagacaaacaagacaaccggcaacaccgataagagagccttcgtcgagacctggcagtccttttaccggaagaagcttaaggaggtgtggaaacctgccgtgcggtctggcggatctggcggaggctccacaagccaggacgccgtgaccttcaaggacgtggccatctacttcagccccgaggagtgggtgaggctgagcgccggccagagggagctgtaccaggaggtgatgctggacaactacgagctggtgaccagcctggacagggagtgcaagctgctgtacaagatggaccccgaggaggagccctgcgagggcgtgccctgcaggggcgtggacagcggcgccctggacaacagcagcaccagcgcctgcaccagccccaagaaaaagagaaaagtctaagctgccttctgcggggcttgccttctggccatgcccttcttctctcccttgcacctgtacctcttggtctttgaataaagcctgagtaggaaggctagcaaaaaaaaaaaaaaaaaaaaaaaaaaaaaaaaaaaaaaaaaaaaaaaaaaaaaaaaaaaaaaaaaaaaaaaaaaaaaaaa

SEQ ID NO: 6505 - RNA, 5797 nt, synthetic construct
  source 1..5797: mol_type = other RNA
aggaaataagagagaaaagaagagtaagaagaaatataagagccaccatggcccctaagaagaagcgtaaagtgagccggatggaacgcctcgtctacgaggtgcggcagaagtgcagaaacatcgaggacatctgcatctcctgcggatctctgaacgtgaccctggagcacccactgttcatcggcggcatgtgccagaactgtaaaaactgttttctggagtgtgcctatcaatacgacgatgacggctaccagagctactgcaccatctgttgcggcggaagagaggtgctgatgtgtggaaataacaactgctgccggtgcttctgcgtggaatgcgtggacctgctggtgggccccggcgccgcccaggccgctattaaggaagatccttggaactgctacatgtgcggccacaagggcacatacggcctgctgagacggagagaggactggcctagcagactgcagatgttcttcgccaataaccacgaccaggagttcgacccccctaaggtgtaccctcccgtccccgccgagaagagaaagcccatccgggtcctgagcctgttcgatggcatcgccaccggtctgctggtgctgaaggacctgggcatccaggtggataggtacattgcctccgaggtgtgcgaggactccatcaccgtgggaatggtgcgtcatcagggcaagatcatgtacgtgggcgacgtgcggagcgtgacacagaagcatatccaggagtggggccctttcgacctggtgatcggcggcagcccttgcaatgacctgagcatcgtgaacccagcccggaagggcctgtacgagggaaccggcagactgttcttcgagttttacagactgctgcacgacgcccggcctaaggaaggcgacgaccggcccttcttttggctgttcgagaatgtggtggccatgggagtcagcgacaagcgggatattagccggttcctggagagcaaccccgtgatgatcgatgccaaggaagtgagcgccgcccaccgggccagatacttctggggcaatctgcctggcatgaacagacccctggccagcaccgtgaacgacaagctggagctgcaggagtgcctggagcacggccggatcgccaagttcagcaaggtgagaaccatcaccacccgaagcaacagcatcaaacaaggcaaggaccagcactttcctgtgttcatgaacgagaaggaggacatcctgtggtgtaccgagatggagagagtgttcgggttcccagtccactacacagatgtcagcaacatgtctagactggccagacagagactgctgggaagaagctggtccgtccctgtgatcagacacctgttcgcccctctgaaggagtacttcgcctgcgtgagcagcggcaacagcaacgccaacagccggggccccagcttctctagcggcctggtgccactgtccctgagagggagccacatgggccccatggagatctacaaaaccgtgagcgcctggaagcggcagcctgtgcgcgtgctgagcctgtttcggaatatcgataaagtcctgaaaagcctgggattcctggagagcggctctggctccggcggtggcaccctgaagtacgtggaggatgtgacaaacgtggtcagacgggatgtggagaagtggggccccttcgatctggtgtacggcagcacccaacccctgggcagctcttgtgaccggtgccctggctggtacatgtttcagttccaccggatcctgcagtacgccctgccgagacaggagtcccagcggccattcttttggattttcatggacaacttgctgctgaccgaggatgaccaggaaactaccactcggttcctgcagaccgaagccgtgaccctgcaggacgtgagaggccgggactaccagaacgccatgcgggtgtggtccaacatccctggactgaaaagcaagcacgcacctctgacccctaaagaagaggagtacctgcaggcccaggtgcggagcagaagcaagctggacgcccctaaggtggatctgctggtgaagaattgcctcctgcccctgagagagtacttcaagtatttcagccagaatagtctgcccctgggcggcccaagcagcggcgcccctcctcccagcggcggcagcccagccggctccccaacctctaccgaggagggcacctctgagtccgccacccccgagagcggccctggcacctccaccgagcccagcgagggcagcgcacccggcagccctgccggcagccccacctccacagaggagggaaccagcaccgagcccagcgaaggcagcgccccaggcaccagcaccgagcctagtgagggcggctctggcggcggcagcgcccaggagattaaacggatcaacaagatcagaagaagacttgtgaaagacagcaacaccaagaaggccggcaagacaggccccatgaaaaccctgctggttagagtgatgacacccgatctgagagagcggctggaaaacctgagaaagaagcctgaaaatatcccccagcccatcagcaatacatctagagccaacctgaataagctgctgaccgattacaccgaaatgaagaaggcgatcctgcatgtgtactgggaagagttccagaaggaccctgtgggcctgatgagccgggtggcccagcctgccagcaagaagatcgatcagaacaagctgaaacctgagatggacgagaagggcaacctgaccaccgccggctttgcctgctctcagtgtggccagcccctgttcgtgtacaagctggagcaggtgtctgagaagggcaaggcttacaccaactacttcggacggtgcaatgtggccgagcacgaaaagctgatcctgctggcccagctgaagcccgagaaggatagcgacgaagccgtgacatatagcctgggaaagtttgggcagagggccctggatttctacagcattcatgtgaccaaggagtccacccaccccgtgaagcccctggcccagatcgccggaaacagatacgcctccggacctgtgggaaaggccctgagcgacgcatgtatgggcacaatcgcctccttcctgtctaagtaccaggacatcatcatcgaacaccagaaggtggtgaagggcaaccagaagagactggagagcctgcgggagctggccggcaaggaaaacctggaataccctagcgtgaccctgccacctcagcctcacaccaaggagggcgttgatgcctacaacgaagtgatcgcccgggtgcgaatgtgggtgaacctgaacctgtggcagaagctgaagctaagcagagatgatgccaagcctctgctgagactgaagggattcccttcctttcctctggtcgagagacaggccaacgaagtggactggtgggacatggtgtgtaacgtgaagaagctgatcaacgagaaaaaggaggatggcaaggtgttttggcagaatctggctggctacaagagacaggaagccctgagaccatacctgagcagcgaggaagatcggaagaagggaaagaaattcgctcggtaccagctgggcgacctgctgctgcacctggaaaagaagcacggcgaggactggggaaaggtgtacgacgaggcctgggagcggattgacaagaaagtggaaggcctgagcaagcacatcaagctggaagaggaacggagaagcgaggacgcccagagcaaggccgccctgaccgactggctgcgggctaaggccagcttcgtgatcgagggcctgaaggaggccgacaaggacgagttctgcagatgcgagctgaagctgcagaagtggtacggggacctgcggggaaagcccttcgccatcgaagccgagaacagcatcctggacatcagcggcttcagcaagcagtacaactgtgccttcatctggcagaaggacggcgtgaagaagctgaacctgtacctgatcatcaactacttcaagggcggcaagctgcggttcaagaagatcaaacctgaagccttcgaagccaacagattctacaccgtgatcaacaaaaagagcggcgagatcgtgcccatggaggtgaacttcaacttcgacgaccccaacctgatcatcctgcctctggcctttggcaagagacagggcagagaattcatctggaacgacctgctgtccctggaaaccggcagcctgaagctggccaacggaagagtgatcgagaagacactgtacaacagaagaacccggcaggatgagcctgccctgttcgtggccctgaccttcgagcggcgggaggtcctggactcctccaatatcaaaccaatgaacctgatcggcgtggcaagaggcgaaaacatccccgccgtgatcgccctgaccgaccccgagggctgcccactgagccggtttaaggatagcctgggaaacccaacccacatcctgagaatcggcgagagctataaggagaagcagcggaccatccaggccaagaaggaggtggagcagcggagagccggcggctacagccggaagtacgccagcaaagccaagaatctggcagacgatatggtgagaaacaccgctagagatctgctgtactacgccgtgacccaggatgccatgctgatcttcgccaacctgagccggggcttcggccggcagggcaagcggaccttcatggccgagagacagtacacacggatggaggactggctgaccgccaagctggcctacgagggcctgagcaagacctacctgtccaagacactggcccagtacacctccaagacatgcagcaactgtgggtttaccatcaccagcgccgactacgacagggtgctggagaagctgaagaagacagcaacaggctggatgaccacaattaacggcaaggagctgaaggtggagggccagattacctactacaacagatacaagagacagaacgtagtcaaggacctgtccgtcgagctggatagactgagcgaagaatctgtgaacaacgacatctcctcctggacaaagggcagaagcggagaagctctgagcctcctgaagaaaagattctcccatagacccgtgcaggagaagttcgtgtgcctgaactgcggcttcgagacacacgcagccgagcaagccgccctgaacatcgccagatcctggctgttcctgcggagccaggagtacaagaaataccagacaaacaagacaaccggcaacaccgataagagagccttcgtcgagacctggcagtccttttaccggaagaagcttaaggaggtgtggaaacctgccgtgcggtctggcggatctggcggaggctccacaagcatggacagcgtggccttcgaggacgtggccgtgaacttcacccaggaggagtggagcctgctggaccccagccagaagaacctgtacagggaggtgatgcaggagaccctgaggaacctggccagcatcggcgagaagtggaaggaccagtacatcgaggaccagtacaagaaccccaggaacaacctgaggagcctgctgggcgagagggtggacgagaacaccgaggagaaccactgcggcaccagccccaagaaaaagagaaaagtctaagctgccttctgcggggcttgccttctggccatgcccttcttctctcccttgcacctgtacctcttggtctttgaataaagcctgagtaggaaggctagcaaaaaaaaaaaaaaaaaaaaaaaaaaaaaaaaaaaaaaaaaaaaaaaaaaaaaaaaaaaaaaaaaaaaaaaaaaaaaaaa

SEQ ID NO: 6506 - RNA, 5797 nt, synthetic construct
  source 1..5797: mol_type = other RNA
aggaaataagagagaaaagaagagtaagaagaaatataagagccaccatggcccctaagaagaagcgtaaagtgagccggatggaacgcctcgtctacgaggtgcggcagaagtgcagaaacatcgaggacatctgcatctcctgcggatctctgaacgtgaccctggagcacccactgttcatcggcggcatgtgccagaactgtaaaaactgttttctggagtgtgcctatcaatacgacgatgacggctaccagagctactgcaccatctgttgcggcggaagagaggtgctgatgtgtggaaataacaactgctgccggtgcttctgcgtggaatgcgtggacctgctggtgggccccggcgccgcccaggccgctattaaggaagatccttggaactgctacatgtgcggccacaagggcacatacggcctgctgagacggagagaggactggcctagcagactgcagatgttcttcgccaataaccacgaccaggagttcgacccccctaaggtgtaccctcccgtccccgccgagaagagaaagcccatccgggtcctgagcctgttcgatggcatcgccaccggtctgctggtgctgaaggacctgggcatccaggtggataggtacattgcctccgaggtgtgcgaggactccatcaccgtgggaatggtgcgtcatcagggcaagatcatgtacgtgggcgacgtgcggagcgtgacacagaagcatatccaggagtggggccctttcgacctggtgatcggcggcagcccttgcaatgacctgagcatcgtgaacccagcccggaagggcctgtacgagggaaccggcagactgttcttcgagttttacagactgctgcacgacgcccggcctaaggaaggcgacgaccggcccttcttttggctgttcgagaatgtggtggccatgggagtcagcgacaagcgggatattagccggttcctggagagcaaccccgtgatgatcgatgccaaggaagtgagcgccgcccaccgggccagatacttctggggcaatctgcctggcatgaacagacccctggccagcaccgtgaacgacaagctggagctgcaggagtgcctggagcacggccggatcgccaagttcagcaaggtgagaaccatcaccacccgaagcaacagcatcaaacaaggcaaggaccagcactttcctgtgttcatgaacgagaaggaggacatcctgtggtgtaccgagatggagagagtgttcgggttcccagtccactacacagatgtcagcaacatgtctagactggccagacagagactgctgggaagaagctggtccgtccctgtgatcagacacctgttcgcccctctgaaggagtacttcgcctgcgtgagcagcggcaacagcaacgccaacagccggggccccagcttctctagcggcctggtgccactgtccctgagagggagccacatgggccccatggagatctacaaaaccgtgagcgcctggaagcggcagcctgtgcgcgtgctgagcctgtttcggaatatcgataaagtcctgaaaagcctgggattcctggagagcggctctggctccggcggtggcaccctgaagtacgtggaggatgtgacaaacgtggtcagacgggatgtggagaagtggggccccttcgatctggtgtacggcagcacccaacccctgggcagctcttgtgaccggtgccctggctggtacatgtttcagttccaccggatcctgcagtacgccctgccgagacaggagtcccagcggccattcttttggattttcatggacaacttgctgctgaccgaggatgaccaggaaactaccactcggttcctgcagaccgaagccgtgaccctgcaggacgtgagaggccgggactaccagaacgccatgcgggtgtggtccaacatccctggactgaaaagcaagcacgcacctctgacccctaaagaagaggagtacctgcaggcccaggtgcggagcagaagcaagctggacgcccctaaggtggatctgctggtgaagaattgcctcctgcccctgagagagtacttcaagtatttcagccagaatagtctgcccctgggcggcccaagcagcggcgcccctcctcccagcggcggcagcccagccggctccccaacctctaccgaggagggcacctctgagtccgccacccccgagagcggccctggcacctccaccgagcccagcgagggcagcgcacccggcagccctgccggcagccccacctccacagaggagggaaccagcaccgagcccagcgaaggcagcgccccaggcaccagcaccgagcctagtgagggcggctctggcggcggcagcgcccaggagattaaacggatcaacaagatcagaagaagacttgtgaaagacagcaacaccaagaaggccggcaagacaggccccatgaaaaccctgctggttagagtgatgacacccgatctgagagagcggctggaaaacctgagaaagaagcctgaaaatatcccccagcccatcagcaatacatctagagccaacctgaataagctgctgaccgattacaccgaaatgaagaaggcgatcctgcatgtgtactgggaagagttccagaaggaccctgtgggcctgatgagccgggtggcccagcctgccagcaagaagatcgatcagaacaagctgaaacctgagatggacgagaagggcaacctgaccaccgccggctttgcctgctctcagtgtggccagcccctgttcgtgtacaagctggagcaggtgtctgagaagggcaaggcttacaccaactacttcggacggtgcaatgtggccgagcacgaaaagctgatcctgctggcccagctgaagcccgagaaggatagcgacgaagccgtgacatatagcctgggaaagtttgggcagagggccctggatttctacagcattcatgtgaccaaggagtccacccaccccgtgaagcccctggcccagatcgccggaaacagatacgcctccggacctgtgggaaaggccctgagcgacgcatgtatgggcacaatcgcctccttcctgtctaagtaccaggacatcatcatcgaacaccagaaggtggtgaagggcaaccagaagagactggagagcctgcgggagctggccggcaaggaaaacctggaataccctagcgtgaccctgccacctcagcctcacaccaaggagggcgttgatgcctacaacgaagtgatcgcccgggtgcgaatgtgggtgaacctgaacctgtggcagaagctgaagctaagcagagatgatgccaagcctctgctgagactgaagggattcccttcctttcctctggtcgagagacaggccaacgaagtggactggtgggacatggtgtgtaacgtgaagaagctgatcaacgagaaaaaggaggatggcaaggtgttttggcagaatctggctggctacaagagacaggaagccctgagaccatacctgagcagcgaggaagatcggaagaagggaaagaaattcgctcggtaccagctgggcgacctgctgctgcacctggaaaagaagcacggcgaggactggggaaaggtgtacgacgaggcctgggagcggattgacaagaaagtggaaggcctgagcaagcacatcaagctggaagaggaacggagaagcgaggacgcccagagcaaggccgccctgaccgactggctgcgggctaaggccagcttcgtgatcgagggcctgaaggaggccgacaaggacgagttctgcagatgcgagctgaagctgcagaagtggtacggggacctgcggggaaagcccttcgccatcgaagccgagaacagcatcctggacatcagcggcttcagcaagcagtacaactgtgccttcatctggcagaaggacggcgtgaagaagctgaacctgtacctgatcatcaactacttcaagggcggcaagctgcggttcaagaagatcaaacctgaagccttcgaagccaacagattctacaccgtgatcaacaaaaagagcggcgagatcgtgcccatggaggtgaacttcaacttcgacgaccccaacctgatcatcctgcctctggcctttggcaagagacagggcagagaattcatctggaacgacctgctgtccctggaaaccggcagcctgaagctggccaacggaagagtgatcgagaagacactgtacaacagaagaacccggcaggatgagcctgccctgttcgtggccctgaccttcgagcggcgggaggtcctggactcctccaatatcaaaccaatgaacctgatcggcgtggcaagaggcgaaaacatccccgccgtgatcgccctgaccgaccccgagggctgcccactgagccggtttaaggatagcctgggaaacccaacccacatcctgagaatcggcgagagctataaggagaagcagcggaccatccaggccaagaaggaggtggagcagcggagagccggcggctacagccggaagtacgccagcaaagccaagaatctggcagacgatatggtgagaaacaccgctagagatctgctgtactacgccgtgacccaggatgccatgctgatcttcgccaacctgagccggggcttcggccggcagggcaagcggaccttcatggccgagagacagtacacacggatggaggactggctgaccgccaagctggcctacgagggcctgagcaagacctacctgtccaagacactggcccagtacacctccaagacatgcagcaactgtgggtttaccatcaccagcgccgactacgacagggtgctggagaagctgaagaagacagcaacaggctggatgaccacaattaacggcaaggagctgaaggtggagggccagattacctactacaacagatacaagagacagaacgtagtcaaggacctgtccgtcgagctggatagactgagcgaagaatctgtgaacaacgacatctcctcctggacaaagggcagaagcggagaagctctgagcctcctgaagaaaagattctcccatagacccgtgcaggagaagttcgtgtgcctgaactgcggcttcgagacacacgcagccgagcaagccgccctgaacatcgccagatcctggctgttcctgcggagccaggagtacaagaaataccagacaaacaagacaaccggcaacaccgataagagagccttcgtcgagacctggcagtccttttaccggaagaagcttaaggaggtgtggaaacctgccgtgcggtctggcggatctggcggaggctccacaagccaggcccaggaggtgctgatgttcgacgacgtggccgtgaggttcacctgggaggagtggcagctgctgaaccccgcccagaaggccctgtacagggacgtgatgctggagaactacaggagcctggtgagcgtgggctggagggccagcaagcccgacctgctgagccagctggagaggggcgagccctggaccatcgagggcgagaaccactgcggcaccccccccgagatctggaaggccaccagccccaagaaaaagagaaaagtctaagctgccttctgcggggcttgccttctggccatgcccttcttctctcccttgcacctgtacctcttggtctttgaataaagcctgagtaggaaggctagcaaaaaaaaaaaaaaaaaaaaaaaaaaaaaaaaaaaaaaaaaaaaaaaaaaaaaaaaaaaaaaaaaaaaaaaaaaaaaaaa

SEQ ID NO: 6507 - RNA, 5797 nt, synthetic construct
  source 1..5797: mol_type = other RNA
aggaaataagagagaaaagaagagtaagaagaaatataagagccaccatggcccctaagaagaagcgtaaagtgagccggatggaacgcctcgtctacgaggtgcggcagaagtgcagaaacatcgaggacatctgcatctcctgcggatctctgaacgtgaccctggagcacccactgttcatcggcggcatgtgccagaactgtaaaaactgttttctggagtgtgcctatcaatacgacgatgacggctaccagagctactgcaccatctgttgcggcggaagagaggtgctgatgtgtggaaataacaactgctgccggtgcttctgcgtggaatgcgtggacctgctggtgggccccggcgccgcccaggccgctattaaggaagatccttggaactgctacatgtgcggccacaagggcacatacggcctgctgagacggagagaggactggcctagcagactgcagatgttcttcgccaataaccacgaccaggagttcgacccccctaaggtgtaccctcccgtccccgccgagaagagaaagcccatccgggtcctgagcctgttcgatggcatcgccaccggtctgctggtgctgaaggacctgggcatccaggtggataggtacattgcctccgaggtgtgcgaggactccatcaccgtgggaatggtgcgtcatcagggcaagatcatgtacgtgggcgacgtgcggagcgtgacacagaagcatatccaggagtggggccctttcgacctggtgatcggcggcagcccttgcaatgacctgagcatcgtgaacccagcccggaagggcctgtacgagggaaccggcagactgttcttcgagttttacagactgctgcacgacgcccggcctaaggaaggcgacgaccggcccttcttttggctgttcgagaatgtggtggccatgggagtcagcgacaagcgggatattagccggttcctggagagcaaccccgtgatgatcgatgccaaggaagtgagcgccgcccaccgggccagatacttctggggcaatctgcctggcatgaacagacccctggccagcaccgtgaacgacaagctggagctgcaggagtgcctggagcacggccggatcgccaagttcagcaaggtgagaaccatcaccacccgaagcaacagcatcaaacaaggcaaggaccagcactttcctgtgttcatgaacgagaaggaggacatcctgtggtgtaccgagatggagagagtgttcgggttcccagtccactacacagatgtcagcaacatgtctagactggccagacagagactgctgggaagaagctggtccgtccctgtgatcagacacctgttcgcccctctgaaggagtacttcgcctgcgtgagcagcggcaacagcaacgccaacagccggggccccagcttctctagcggcctggtgccactgtccctgagagggagccacatgggccccatggagatctacaaaaccgtgagcgcctggaagcggcagcctgtgcgcgtgctgagcctgtttcggaatatcgataaagtcctgaaaagcctgggattcctggagagcggctctggctccggcggtggcaccctgaagtacgtggaggatgtgacaaacgtggtcagacgggatgtggagaagtggggccccttcgatctggtgtacggcagcacccaacccctgggcagctcttgtgaccggtgccctggctggtacatgtttcagttccaccggatcctgcagtacgccctgccgagacaggagtcccagcggccattcttttggattttcatggacaacttgctgctgaccgaggatgaccaggaaactaccactcggttcctgcagaccgaagccgtgaccctgcaggacgtgagaggccgggactaccagaacgccatgcgggtgtggtccaacatccctggactgaaaagcaagcacgcacctctgacccctaaagaagaggagtacctgcaggcccaggtgcggagcagaagcaagctggacgcccctaaggtggatctgctggtgaagaattgcctcctgcccctgagagagtacttcaagtatttcagccagaatagtctgcccctgggcggcccaagcagcggcgcccctcctcccagcggcggcagcccagccggctccccaacctctaccgaggagggcacctctgagtccgccacccccgagagcggccctggcacctccaccgagcccagcgagggcagcgcacccggcagccctgccggcagccccacctccacagaggagggaaccagcaccgagcccagcgaaggcagcgccccaggcaccagcaccgagcctagtgagggcggctctggcggcggcagcgcccaggagattaaacggatcaacaagatcagaagaagacttgtgaaagacagcaacaccaagaaggccggcaagacaggccccatgaaaaccctgctggttagagtgatgacacccgatctgagagagcggctggaaaacctgagaaagaagcctgaaaatatcccccagcccatcagcaatacatctagagccaacctgaataagctgctgaccgattacaccgaaatgaagaaggcgatcctgcatgtgtactgggaagagttccagaaggaccctgtgggcctgatgagccgggtggcccagcctgccagcaagaagatcgatcagaacaagctgaaacctgagatggacgagaagggcaacctgaccaccgccggctttgcctgctctcagtgtggccagcccctgttcgtgtacaagctggagcaggtgtctgagaagggcaaggcttacaccaactacttcggacggtgcaatgtggccgagcacgaaaagctgatcctgctggcccagctgaagcccgagaaggatagcgacgaagccgtgacatatagcctgggaaagtttgggcagagggccctggatttctacagcattcatgtgaccaaggagtccacccaccccgtgaagcccctggcccagatcgccggaaacagatacgcctccggacctgtgggaaaggccctgagcgacgcatgtatgggcacaatcgcctccttcctgtctaagtaccaggacatcatcatcgaacaccagaaggtggtgaagggcaaccagaagagactggagagcctgcgggagctggccggcaaggaaaacctggaataccctagcgtgaccctgccacctcagcctcacaccaaggagggcgttgatgcctacaacgaagtgatcgcccgggtgcgaatgtgggtgaacctgaacctgtggcagaagctgaagctaagcagagatgatgccaagcctctgctgagactgaagggattcccttcctttcctctggtcgagagacaggccaacgaagtggactggtgggacatggtgtgtaacgtgaagaagctgatcaacgagaaaaaggaggatggcaaggtgttttggcagaatctggctggctacaagagacaggaagccctgagaccatacctgagcagcgaggaagatcggaagaagggaaagaaattcgctcggtaccagctgggcgacctgctgctgcacctggaaaagaagcacggcgaggactggggaaaggtgtacgacgaggcctgggagcggattgacaagaaagtggaaggcctgagcaagcacatcaagctggaagaggaacggagaagcgaggacgcccagagcaaggccgccctgaccgactggctgcgggctaaggccagcttcgtgatcgagggcctgaaggaggccgacaaggacgagttctgcagatgcgagctgaagctgcagaagtggtacggggacctgcggggaaagcccttcgccatcgaagccgagaacagcatcctggacatcagcggcttcagcaagcagtacaactgtgccttcatctggcagaaggacggcgtgaagaagctgaacctgtacctgatcatcaactacttcaagggcggcaagctgcggttcaagaagatcaaacctgaagccttcgaagccaacagattctacaccgtgatcaacaaaaagagcggcgagatcgtgcccatggaggtgaacttcaacttcgacgaccccaacctgatcatcctgcctctggcctttggcaagagacagggcagagaattcatctggaacgacctgctgtccctggaaaccggcagcctgaagctggccaacggaagagtgatcgagaagacactgtacaacagaagaacccggcaggatgagcctgccctgttcgtggccctgaccttcgagcggcgggaggtcctggactcctccaatatcaaaccaatgaacctgatcggcgtggcaagaggcgaaaacatccccgccgtgatcgccctgaccgaccccgagggctgcccactgagccggtttaaggatagcctgggaaacccaacccacatcctgagaatcggcgagagctataaggagaagcagcggaccatccaggccaagaaggaggtggagcagcggagagccggcggctacagccggaagtacgccagcaaagccaagaatctggcagacgatatggtgagaaacaccgctagagatctgctgtactacgccgtgacccaggatgccatgctgatcttcgccaacctgagccggggcttcggccggcagggcaagcggaccttcatggccgagagacagtacacacggatggaggactggctgaccgccaagctggcctacgagggcctgagcaagacctacctgtccaagacactggcccagtacacctccaagacatgcagcaactgtgggtttaccatcaccagcgccgactacgacagggtgctggagaagctgaagaagacagcaacaggctggatgaccacaattaacggcaaggagctgaaggtggagggccagattacctactacaacagatacaagagacagaacgtagtcaaggacctgtccgtcgagctggatagactgagcgaagaatctgtgaacaacgacatctcctcctggacaaagggcagaagcggagaagctctgagcctcctgaagaaaagattctcccatagacccgtgcaggagaagttcgtgtgcctgaactgcggcttcgagacacacgcagccgagcaagccgccctgaacatcgccagatcctggctgttcctgcggagccaggagtacaagaaataccagacaaacaagacaaccggcaacaccgataagagagccttcgtcgagacctggcagtccttttaccggaagaagcttaaggaggtgtggaaacctgccgtgcggtctggcggatctggcggaggctccacaagcctgcaggagagcgtgaccttcagggacgtggccgtgctgttcagccaggacgagtggctgcacctggacagcgcccagaggaccctgtacagggaggtgatgctggagaactacaacaacctggccagcctgggcatccccttcagcatgcccaaggtgatctgccagctgcagcagggcgaggacccctgcaccgtggagggcgaggtgcccagcgacagctgcatcgacgccaagggccagaccagccccaagaaaaagagaaaagtctaagctgccttctgcggggcttgccttctggccatgcccttcttctctcccttgcacctgtacctcttggtctttgaataaagcctgagtaggaaggctagcaaaaaaaaaaaaaaaaaaaaaaaaaaaaaaaaaaaaaaaaaaaaaaaaaaaaaaaaaaaaaaaaaaaaaaaaaaaaaaaa

SEQ ID NO: 6508 - RNA, 5794 nt, synthetic construct
  source 1..5794: mol_type = other RNA
aggaaataagagagaaaagaagagtaagaagaaatataagagccaccatggcccctaagaagaagcgtaaagtgagccggatggaacgcctcgtctacgaggtgcggcagaagtgcagaaacatcgaggacatctgcatctcctgcggatctctgaacgtgaccctggagcacccactgttcatcggcggcatgtgccagaactgtaaaaactgttttctggagtgtgcctatcaatacgacgatgacggctaccagagctactgcaccatctgttgcggcggaagagaggtgctgatgtgtggaaataacaactgctgccggtgcttctgcgtggaatgcgtggacctgctggtgggccccggcgccgcccaggccgctattaaggaagatccttggaactgctacatgtgcggccacaagggcacatacggcctgctgagacggagagaggactggcctagcagactgcagatgttcttcgccaataaccacgaccaggagttcgacccccctaaggtgtaccctcccgtccccgccgagaagagaaagcccatccgggtcctgagcctgttcgatggcatcgccaccggtctgctggtgctgaaggacctgggcatccaggtggataggtacattgcctccgaggtgtgcgaggactccatcaccgtgggaatggtgcgtcatcagggcaagatcatgtacgtgggcgacgtgcggagcgtgacacagaagcatatccaggagtggggccctttcgacctggtgatcggcggcagcccttgcaatgacctgagcatcgtgaacccagcccggaagggcctgtacgagggaaccggcagactgttcttcgagttttacagactgctgcacgacgcccggcctaaggaaggcgacgaccggcccttcttttggctgttcgagaatgtggtggccatgggagtcagcgacaagcgggatattagccggttcctggagagcaaccccgtgatgatcgatgccaaggaagtgagcgccgcccaccgggccagatacttctggggcaatctgcctggcatgaacagacccctggccagcaccgtgaacgacaagctggagctgcaggagtgcctggagcacggccggatcgccaagttcagcaaggtgagaaccatcaccacccgaagcaacagcatcaaacaaggcaaggaccagcactttcctgtgttcatgaacgagaaggaggacatcctgtggtgtaccgagatggagagagtgttcgggttcccagtccactacacagatgtcagcaacatgtctagactggccagacagagactgctgggaagaagctggtccgtccctgtgatcagacacctgttcgcccctctgaaggagtacttcgcctgcgtgagcagcggcaacagcaacgccaacagccggggccccagcttctctagcggcctggtgccactgtccctgagagggagccacatgggccccatggagatctacaaaaccgtgagcgcctggaagcggcagcctgtgcgcgtgctgagcctgtttcggaatatcgataaagtcctgaaaagcctgggattcctggagagcggctctggctccggcggtggcaccctgaagtacgtggaggatgtgacaaacgtggtcagacgggatgtggagaagtggggccccttcgatctggtgtacggcagcacccaacccctgggcagctcttgtgaccggtgccctggctggtacatgtttcagttccaccggatcctgcagtacgccctgccgagacaggagtcccagcggccattcttttggattttcatggacaacttgctgctgaccgaggatgaccaggaaactaccactcggttcctgcagaccgaagccgtgaccctgcaggacgtgagaggccgggactaccagaacgccatgcgggtgtggtccaacatccctggactgaaaagcaagcacgcacctctgacccctaaagaagaggagtacctgcaggcccaggtgcggagcagaagcaagctggacgcccctaaggtggatctgctggtgaagaattgcctcctgcccctgagagagtacttcaagtatttcagccagaatagtctgcccctgggcggcccaagcagcggcgcccctcctcccagcggcggcagcccagccggctccccaacctctaccgaggagggcacctctgagtccgccacccccgagagcggccctggcacctccaccgagcccagcgagggcagcgcacccggcagccctgccggcagccccacctccacagaggagggaaccagcaccgagcccagcgaaggcagcgccccaggcaccagcaccgagcctagtgagggcggctctggcggcggcagcgcccaggagattaaacggatcaacaagatcagaagaagacttgtgaaagacagcaacaccaagaaggccggcaagacaggccccatgaaaaccctgctggttagagtgatgacacccgatctgagagagcggctggaaaacctgagaaagaagcctgaaaatatcccccagcccatcagcaatacatctagagccaacctgaataagctgctgaccgattacaccgaaatgaagaaggcgatcctgcatgtgtactgggaagagttccagaaggaccctgtgggcctgatgagccgggtggcccagcctgccagcaagaagatcgatcagaacaagctgaaacctgagatggacgagaagggcaacctgaccaccgccggctttgcctgctctcagtgtggccagcccctgttcgtgtacaagctggagcaggtgtctgagaagggcaaggcttacaccaactacttcggacggtgcaatgtggccgagcacgaaaagctgatcctgctggcccagctgaagcccgagaaggatagcgacgaagccgtgacatatagcctgggaaagtttgggcagagggccctggatttctacagcattcatgtgaccaaggagtccacccaccccgtgaagcccctggcccagatcgccggaaacagatacgcctccggacctgtgggaaaggccctgagcgacgcatgtatgggcacaatcgcctccttcctgtctaagtaccaggacatcatcatcgaacaccagaaggtggtgaagggcaaccagaagagactggagagcctgcgggagctggccggcaaggaaaacctggaataccctagcgtgaccctgccacctcagcctcacaccaaggagggcgttgatgcctacaacgaagtgatcgcccgggtgcgaatgtgggtgaacctgaacctgtggcagaagctgaagctaagcagagatgatgccaagcctctgctgagactgaagggattcccttcctttcctctggtcgagagacaggccaacgaagtggactggtgggacatggtgtgtaacgtgaagaagctgatcaacgagaaaaaggaggatggcaaggtgttttggcagaatctggctggctacaagagacaggaagccctgagaccatacctgagcagcgaggaagatcggaagaagggaaagaaattcgctcggtaccagctgggcgacctgctgctgcacctggaaaagaagcacggcgaggactggggaaaggtgtacgacgaggcctgggagcggattgacaagaaagtggaaggcctgagcaagcacatcaagctggaagaggaacggagaagcgaggacgcccagagcaaggccgccctgaccgactggctgcgggctaaggccagcttcgtgatcgagggcctgaaggaggccgacaaggacgagttctgcagatgcgagctgaagctgcagaagtggtacggggacctgcggggaaagcccttcgccatcgaagccgagaacagcatcctggacatcagcggcttcagcaagcagtacaactgtgccttcatctggcagaaggacggcgtgaagaagctgaacctgtacctgatcatcaactacttcaagggcggcaagctgcggttcaagaagatcaaacctgaagccttcgaagccaacagattctacaccgtgatcaacaaaaagagcggcgagatcgtgcccatggaggtgaacttcaacttcgacgaccccaacctgatcatcctgcctctggcctttggcaagagacagggcagagaattcatctggaacgacctgctgtccctggaaaccggcagcctgaagctggccaacggaagagtgatcgagaagacactgtacaacagaagaacccggcaggatgagcctgccctgttcgtggccctgaccttcgagcggcgggaggtcctggactcctccaatatcaaaccaatgaacctgatcggcgtggcaagaggcgaaaacatccccgccgtgatcgccctgaccgaccccgagggctgcccactgagccggtttaaggatagcctgggaaacccaacccacatcctgagaatcggcgagagctataaggagaagcagcggaccatccaggccaagaaggaggtggagcagcggagagccggcggctacagccggaagtacgccagcaaagccaagaatctggcagacgatatggtgagaaacaccgctagagatctgctgtactacgccgtgacccaggatgccatgctgatcttcgccaacctgagccggggcttcggccggcagggcaagcggaccttcatggccgagagacagtacacacggatggaggactggctgaccgccaagctggcctacgagggcctgagcaagacctacctgtccaagacactggcccagtacacctccaagacatgcagcaactgtgggtttaccatcaccagcgccgactacgacagggtgctggagaagctgaagaagacagcaacaggctggatgaccacaattaacggcaaggagctgaaggtggagggccagattacctactacaacagatacaagagacagaacgtagtcaaggacctgtccgtcgagctggatagactgagcgaagaatctgtgaacaacgacatctcctcctggacaaagggcagaagcggagaagctctgagcctcctgaagaaaagattctcccatagacccgtgcaggagaagttcgtgtgcctgaactgcggcttcgagacacacgcagccgagcaagccgccctgaacatcgccagatcctggctgttcctgcggagccaggagtacaagaaataccagacaaacaagacaaccggcaacaccgataagagagccttcgtcgagacctggcagtccttttaccggaagaagcttaaggaggtgtggaaacctgccgtgcggtctggcggatctggcggaggctccacaagcagccaggtgaccttcagcgacgtggccatcgacttcagccacgaggagtgggcctgcctggacagcgcccagagagacctgtacaaggacgtgatggtgcagaactacgagaacctggtgagcgtgggcctgagcgtgaccaagccctacgtgatcatgctgctggaggacggcaaggagccctggatgatggagaagaagctgagcaaggcctaccccttccccctgagccacagcgtgaccagccccaagaaaaagagaaaagtctaagctgccttctgcggggcttgccttctggccatgcccttcttctctcccttgcacctgtacctcttggtctttgaataaagcctgagtaggaaggctagcaaaaaaaaaaaaaaaaaaaaaaaaaaaaaaaaaaaaaaaaaaaaaaaaaaaaaaaaaaaaaaaaaaaaaaaaaaaaaaaa

SEQ ID NO: 6509 - RNA, 5797 nt, synthetic construct
  source 1..5797: mol_type = other RNA
aggaaataagagagaaaagaagagtaagaagaaatataagagccaccatggcccctaagaagaagcgtaaagtgagccggatggaacgcctcgtctacgaggtgcggcagaagtgcagaaacatcgaggacatctgcatctcctgcggatctctgaacgtgaccctggagcacccactgttcatcggcggcatgtgccagaactgtaaaaactgttttctggagtgtgcctatcaatacgacgatgacggctaccagagctactgcaccatctgttgcggcggaagagaggtgctgatgtgtggaaataacaactgctgccggtgcttctgcgtggaatgcgtggacctgctggtgggccccggcgccgcccaggccgctattaaggaagatccttggaactgctacatgtgcggccacaagggcacatacggcctgctgagacggagagaggactggcctagcagactgcagatgttcttcgccaataaccacgaccaggagttcgacccccctaaggtgtaccctcccgtccccgccgagaagagaaagcccatccgggtcctgagcctgttcgatggcatcgccaccggtctgctggtgctgaaggacctgggcatccaggtggataggtacattgcctccgaggtgtgcgaggactccatcaccgtgggaatggtgcgtcatcagggcaagatcatgtacgtgggcgacgtgcggagcgtgacacagaagcatatccaggagtggggccctttcgacctggtgatcggcggcagcccttgcaatgacctgagcatcgtgaacccagcccggaagggcctgtacgagggaaccggcagactgttcttcgagttttacagactgctgcacgacgcccggcctaaggaaggcgacgaccggcccttcttttggctgttcgagaatgtggtggccatgggagtcagcgacaagcgggatattagccggttcctggagagcaaccccgtgatgatcgatgccaaggaagtgagcgccgcccaccgggccagatacttctggggcaatctgcctggcatgaacagacccctggccagcaccgtgaacgacaagctggagctgcaggagtgcctggagcacggccggatcgccaagttcagcaaggtgagaaccatcaccacccgaagcaacagcatcaaacaaggcaaggaccagcactttcctgtgttcatgaacgagaaggaggacatcctgtggtgtaccgagatggagagagtgttcgggttcccagtccactacacagatgtcagcaacatgtctagactggccagacagagactgctgggaagaagctggtccgtccctgtgatcagacacctgttcgcccctctgaaggagtacttcgcctgcgtgagcagcggcaacagcaacgccaacagccggggccccagcttctctagcggcctggtgccactgtccctgagagggagccacatgggccccatggagatctacaaaaccgtgagcgcctggaagcggcagcctgtgcgcgtgctgagcctgtttcggaatatcgataaagtcctgaaaagcctgggattcctggagagcggctctggctccggcggtggcaccctgaagtacgtggaggatgtgacaaacgtggtcagacgggatgtggagaagtggggccccttcgatctggtgtacggcagcacccaacccctgggcagctcttgtgaccggtgccctggctggtacatgtttcagttccaccggatcctgcagtacgccctgccgagacaggagtcccagcggccattcttttggattttcatggacaacttgctgctgaccgaggatgaccaggaaactaccactcggttcctgcagaccgaagccgtgaccctgcaggacgtgagaggccgggactaccagaacgccatgcgggtgtggtccaacatccctggactgaaaagcaagcacgcacctctgacccctaaagaagaggagtacctgcaggcccaggtgcggagcagaagcaagctggacgcccctaaggtggatctgctggtgaagaattgcctcctgcccctgagagagtacttcaagtatttcagccagaatagtctgcccctgggcggcccaagcagcggcgcccctcctcccagcggcggcagcccagccggctccccaacctctaccgaggagggcacctctgagtccgccacccccgagagcggccctggcacctccaccgagcccagcgagggcagcgcacccggcagccctgccggcagccccacctccacagaggagggaaccagcaccgagcccagcgaaggcagcgccccaggcaccagcaccgagcctagtgagggcggctctggcggcggcagcgcccaggagattaaacggatcaacaagatcagaagaagacttgtgaaagacagcaacaccaagaaggccggcaagacaggccccatgaaaaccctgctggttagagtgatgacacccgatctgagagagcggctggaaaacctgagaaagaagcctgaaaatatcccccagcccatcagcaatacatctagagccaacctgaataagctgctgaccgattacaccgaaatgaagaaggcgatcctgcatgtgtactgggaagagttccagaaggaccctgtgggcctgatgagccgggtggcccagcctgccagcaagaagatcgatcagaacaagctgaaacctgagatggacgagaagggcaacctgaccaccgccggctttgcctgctctcagtgtggccagcccctgttcgtgtacaagctggagcaggtgtctgagaagggcaaggcttacaccaactacttcggacggtgcaatgtggccgagcacgaaaagctgatcctgctggcccagctgaagcccgagaaggatagcgacgaagccgtgacatatagcctgggaaagtttgggcagagggccctggatttctacagcattcatgtgaccaaggagtccacccaccccgtgaagcccctggcccagatcgccggaaacagatacgcctccggacctgtgggaaaggccctgagcgacgcatgtatgggcacaatcgcctccttcctgtctaagtaccaggacatcatcatcgaacaccagaaggtggtgaagggcaaccagaagagactggagagcctgcgggagctggccggcaaggaaaacctggaataccctagcgtgaccctgccacctcagcctcacaccaaggagggcgttgatgcctacaacgaagtgatcgcccgggtgcgaatgtgggtgaacctgaacctgtggcagaagctgaagctaagcagagatgatgccaagcctctgctgagactgaagggattcccttcctttcctctggtcgagagacaggccaacgaagtggactggtgggacatggtgtgtaacgtgaagaagctgatcaacgagaaaaaggaggatggcaaggtgttttggcagaatctggctggctacaagagacaggaagccctgagaccatacctgagcagcgaggaagatcggaagaagggaaagaaattcgctcggtaccagctgggcgacctgctgctgcacctggaaaagaagcacggcgaggactggggaaaggtgtacgacgaggcctgggagcggattgacaagaaagtggaaggcctgagcaagcacatcaagctggaagaggaacggagaagcgaggacgcccagagcaaggccgccctgaccgactggctgcgggctaaggccagcttcgtgatcgagggcctgaaggaggccgacaaggacgagttctgcagatgcgagctgaagctgcagaagtggtacggggacctgcggggaaagcccttcgccatcgaagccgagaacagcatcctggacatcagcggcttcagcaagcagtacaactgtgccttcatctggcagaaggacggcgtgaagaagctgaacctgtacctgatcatcaactacttcaagggcggcaagctgcggttcaagaagatcaaacctgaagccttcgaagccaacagattctacaccgtgatcaacaaaaagagcggcgagatcgtgcccatggaggtgaacttcaacttcgacgaccccaacctgatcatcctgcctctggcctttggcaagagacagggcagagaattcatctggaacgacctgctgtccctggaaaccggcagcctgaagctggccaacggaagagtgatcgagaagacactgtacaacagaagaacccggcaggatgagcctgccctgttcgtggccctgaccttcgagcggcgggaggtcctggactcctccaatatcaaaccaatgaacctgatcggcgtggcaagaggcgaaaacatccccgccgtgatcgccctgaccgaccccgagggctgcccactgagccggtttaaggatagcctgggaaacccaacccacatcctgagaatcggcgagagctataaggagaagcagcggaccatccaggccaagaaggaggtggagcagcggagagccggcggctacagccggaagtacgccagcaaagccaagaatctggcagacgatatggtgagaaacaccgctagagatctgctgtactacgccgtgacccaggatgccatgctgatcttcgccaacctgagccggggcttcggccggcagggcaagcggaccttcatggccgagagacagtacacacggatggaggactggctgaccgccaagctggcctacgagggcctgagcaagacctacctgtccaagacactggcccagtacacctccaagacatgcagcaactgtgggtttaccatcaccagcgccgactacgacagggtgctggagaagctgaagaagacagcaacaggctggatgaccacaattaacggcaaggagctgaaggtggagggccagattacctactacaacagatacaagagacagaacgtagtcaaggacctgtccgtcgagctggatagactgagcgaagaatctgtgaacaacgacatctcctcctggacaaagggcagaagcggagaagctctgagcctcctgaagaaaagattctcccatagacccgtgcaggagaagttcgtgtgcctgaactgcggcttcgagacacacgcagccgagcaagccgccctgaacatcgccagatcctggctgttcctgcggagccaggagtacaagaaataccagacaaacaagacaaccggcaacaccgataagagagccttcgtcgagacctggcagtccttttaccggaagaagcttaaggaggtgtggaaacctgccgtgcggtctggcggatctggcggaggctccacaagcgacgccgtgaccttccccgacgtggccatcgacttcagcagggacgagtgggagtgcctgaacctggcccagaggaccctgtacaggaaggtgatgctggagaactacaggaccctggtgagcgtgggcctgtgcgtgagcaagcccgacgtgatcagcctgctggagcagggcgaggagccctgggtgaccgacggcgagatggccggcggcctgtgcccccacagcgagtgcgtgtggatgaccagccccaagaaaaagagaaaagtctaagctgccttctgcggggcttgccttctggccatgcccttcttctctcccttgcacctgtacctcttggtctttgaataaagcctgagtaggaaggctagcaaaaaaaaaaaaaaaaaaaaaaaaaaaaaaaaaaaaaaaaaaaaaaaaaaaaaaaaaaaaaaaaaaaaaaaaaaaaaaaa

SEQ ID NO: 6510 - RNA, 5797 nt, synthetic construct
  source 1..5797: mol_type = other RNA
aggaaataagagagaaaagaagagtaagaagaaatataagagccaccatggcccctaagaagaagcgtaaagtgagccggatggaacgcctcgtctacgaggtgcggcagaagtgcagaaacatcgaggacatctgcatctcctgcggatctctgaacgtgaccctggagcacccactgttcatcggcggcatgtgccagaactgtaaaaactgttttctggagtgtgcctatcaatacgacgatgacggctaccagagctactgcaccatctgttgcggcggaagagaggtgctgatgtgtggaaataacaactgctgccggtgcttctgcgtggaatgcgtggacctgctggtgggccccggcgccgcccaggccgctattaaggaagatccttggaactgctacatgtgcggccacaagggcacatacggcctgctgagacggagagaggactggcctagcagactgcagatgttcttcgccaataaccacgaccaggagttcgacccccctaaggtgtaccctcccgtccccgccgagaagagaaagcccatccgggtcctgagcctgttcgatggcatcgccaccggtctgctggtgctgaaggacctgggcatccaggtggataggtacattgcctccgaggtgtgcgaggactccatcaccgtgggaatggtgcgtcatcagggcaagatcatgtacgtgggcgacgtgcggagcgtgacacagaagcatatccaggagtggggccctttcgacctggtgatcggcggcagcccttgcaatgacctgagcatcgtgaacccagcccggaagggcctgtacgagggaaccggcagactgttcttcgagttttacagactgctgcacgacgcccggcctaaggaaggcgacgaccggcccttcttttggctgttcgagaatgtggtggccatgggagtcagcgacaagcgggatattagccggttcctggagagcaaccccgtgatgatcgatgccaaggaagtgagcgccgcccaccgggccagatacttctggggcaatctgcctggcatgaacagacccctggccagcaccgtgaacgacaagctggagctgcaggagtgcctggagcacggccggatcgccaagttcagcaaggtgagaaccatcaccacccgaagcaacagcatcaaacaaggcaaggaccagcactttcctgtgttcatgaacgagaaggaggacatcctgtggtgtaccgagatggagagagtgttcgggttcccagtccactacacagatgtcagcaacatgtctagactggccagacagagactgctgggaagaagctggtccgtccctgtgatcagacacctgttcgcccctctgaaggagtacttcgcctgcgtgagcagcggcaacagcaacgccaacagccggggccccagcttctctagcggcctggtgccactgtccctgagagggagccacatgggccccatggagatctacaaaaccgtgagcgcctggaagcggcagcctgtgcgcgtgctgagcctgtttcggaatatcgataaagtcctgaaaagcctgggattcctggagagcggctctggctccggcggtggcaccctgaagtacgtggaggatgtgacaaacgtggtcagacgggatgtggagaagtggggccccttcgatctggtgtacggcagcacccaacccctgggcagctcttgtgaccggtgccctggctggtacatgtttcagttccaccggatcctgcagtacgccctgccgagacaggagtcccagcggccattcttttggattttcatggacaacttgctgctgaccgaggatgaccaggaaactaccactcggttcctgcagaccgaagccgtgaccctgcaggacgtgagaggccgggactaccagaacgccatgcgggtgtggtccaacatccctggactgaaaagcaagcacgcacctctgacccctaaagaagaggagtacctgcaggcccaggtgcggagcagaagcaagctggacgcccctaaggtggatctgctggtgaagaattgcctcctgcccctgagagagtacttcaagtatttcagccagaatagtctgcccctgggcggcccaagcagcggcgcccctcctcccagcggcggcagcccagccggctccccaacctctaccgaggagggcacctctgagtccgccacccccgagagcggccctggcacctccaccgagcccagcgagggcagcgcacccggcagccctgccggcagccccacctccacagaggagggaaccagcaccgagcccagcgaaggcagcgccccaggcaccagcaccgagcctagtgagggcggctctggcggcggcagcgcccaggagattaaacggatcaacaagatcagaagaagacttgtgaaagacagcaacaccaagaaggccggcaagacaggccccatgaaaaccctgctggttagagtgatgacacccgatctgagagagcggctggaaaacctgagaaagaagcctgaaaatatcccccagcccatcagcaatacatctagagccaacctgaataagctgctgaccgattacaccgaaatgaagaaggcgatcctgcatgtgtactgggaagagttccagaaggaccctgtgggcctgatgagccgggtggcccagcctgccagcaagaagatcgatcagaacaagctgaaacctgagatggacgagaagggcaacctgaccaccgccggctttgcctgctctcagtgtggccagcccctgttcgtgtacaagctggagcaggtgtctgagaagggcaaggcttacaccaactacttcggacggtgcaatgtggccgagcacgaaaagctgatcctgctggcccagctgaagcccgagaaggatagcgacgaagccgtgacatatagcctgggaaagtttgggcagagggccctggatttctacagcattcatgtgaccaaggagtccacccaccccgtgaagcccctggcccagatcgccggaaacagatacgcctccggacctgtgggaaaggccctgagcgacgcatgtatgggcacaatcgcctccttcctgtctaagtaccaggacatcatcatcgaacaccagaaggtggtgaagggcaaccagaagagactggagagcctgcgggagctggccggcaaggaaaacctggaataccctagcgtgaccctgccacctcagcctcacaccaaggagggcgttgatgcctacaacgaagtgatcgcccgggtgcgaatgtgggtgaacctgaacctgtggcagaagctgaagctaagcagagatgatgccaagcctctgctgagactgaagggattcccttcctttcctctggtcgagagacaggccaacgaagtggactggtgggacatggtgtgtaacgtgaagaagctgatcaacgagaaaaaggaggatggcaaggtgttttggcagaatctggctggctacaagagacaggaagccctgagaccatacctgagcagcgaggaagatcggaagaagggaaagaaattcgctcggtaccagctgggcgacctgctgctgcacctggaaaagaagcacggcgaggactggggaaaggtgtacgacgaggcctgggagcggattgacaagaaagtggaaggcctgagcaagcacatcaagctggaagaggaacggagaagcgaggacgcccagagcaaggccgccctgaccgactggctgcgggctaaggccagcttcgtgatcgagggcctgaaggaggccgacaaggacgagttctgcagatgcgagctgaagctgcagaagtggtacggggacctgcggggaaagcccttcgccatcgaagccgagaacagcatcctggacatcagcggcttcagcaagcagtacaactgtgccttcatctggcagaaggacggcgtgaagaagctgaacctgtacctgatcatcaactacttcaagggcggcaagctgcggttcaagaagatcaaacctgaagccttcgaagccaacagattctacaccgtgatcaacaaaaagagcggcgagatcgtgcccatggaggtgaacttcaacttcgacgaccccaacctgatcatcctgcctctggcctttggcaagagacagggcagagaattcatctggaacgacctgctgtccctggaaaccggcagcctgaagctggccaacggaagagtgatcgagaagacactgtacaacagaagaacccggcaggatgagcctgccctgttcgtggccctgaccttcgagcggcgggaggtcctggactcctccaatatcaaaccaatgaacctgatcggcgtggcaagaggcgaaaacatccccgccgtgatcgccctgaccgaccccgagggctgcccactgagccggtttaaggatagcctgggaaacccaacccacatcctgagaatcggcgagagctataaggagaagcagcggaccatccaggccaagaaggaggtggagcagcggagagccggcggctacagccggaagtacgccagcaaagccaagaatctggcagacgatatggtgagaaacaccgctagagatctgctgtactacgccgtgacccaggatgccatgctgatcttcgccaacctgagccggggcttcggccggcagggcaagcggaccttcatggccgagagacagtacacacggatggaggactggctgaccgccaagctggcctacgagggcctgagcaagacctacctgtccaagacactggcccagtacacctccaagacatgcagcaactgtgggtttaccatcaccagcgccgactacgacagggtgctggagaagctgaagaagacagcaacaggctggatgaccacaattaacggcaaggagctgaaggtggagggccagattacctactacaacagatacaagagacagaacgtagtcaaggacctgtccgtcgagctggatagactgagcgaagaatctgtgaacaacgacatctcctcctggacaaagggcagaagcggagaagctctgagcctcctgaagaaaagattctcccatagacccgtgcaggagaagttcgtgtgcctgaactgcggcttcgagacacacgcagccgagcaagccgccctgaacatcgccagatcctggctgttcctgcggagccaggagtacaagaaataccagacaaacaagacaaccggcaacaccgataagagagccttcgtcgagacctggcagtccttttaccggaagaagcttaaggaggtgtggaaacctgccgtgcggtctggcggatctggcggaggctccacaagcttccagggcctgatgaccttcgaggacgtgaccgtggagttcacccagtgggagtggggccagctggaccccgcccagaaggacctgtacagggaggtgatgctggagaacttcaggaacctggccagcctgggcctgcccctgagcaagccctacgtgatctgccagctggaggagggccaggagccctgcatgctggagaaggagatcagcgtgggcacccagagcgtgggcgaggccaccaccagccccaagaaaaagagaaaagtctaagctgccttctgcggggcttgccttctggccatgcccttcttctctcccttgcacctgtacctcttggtctttgaataaagcctgagtaggaaggctagcaaaaaaaaaaaaaaaaaaaaaaaaaaaaaaaaaaaaaaaaaaaaaaaaaaaaaaaaaaaaaaaaaaaaaaaaaaaaaaaa

SEQ ID NO: 6511 - RNA, 5797 nt, synthetic construct
  source 1..5797: mol_type = other RNA
aggaaataagagagaaaagaagagtaagaagaaatataagagccaccatggcccctaagaagaagcgtaaagtgagccggatggaacgcctcgtctacgaggtgcggcagaagtgcagaaacatcgaggacatctgcatctcctgcggatctctgaacgtgaccctggagcacccactgttcatcggcggcatgtgccagaactgtaaaaactgttttctggagtgtgcctatcaatacgacgatgacggctaccagagctactgcaccatctgttgcggcggaagagaggtgctgatgtgtggaaataacaactgctgccggtgcttctgcgtggaatgcgtggacctgctggtgggccccggcgccgcccaggccgctattaaggaagatccttggaactgctacatgtgcggccacaagggcacatacggcctgctgagacggagagaggactggcctagcagactgcagatgttcttcgccaataaccacgaccaggagttcgacccccctaaggtgtaccctcccgtccccgccgagaagagaaagcccatccgggtcctgagcctgttcgatggcatcgccaccggtctgctggtgctgaaggacctgggcatccaggtggataggtacattgcctccgaggtgtgcgaggactccatcaccgtgggaatggtgcgtcatcagggcaagatcatgtacgtgggcgacgtgcggagcgtgacacagaagcatatccaggagtggggccctttcgacctggtgatcggcggcagcccttgcaatgacctgagcatcgtgaacccagcccggaagggcctgtacgagggaaccggcagactgttcttcgagttttacagactgctgcacgacgcccggcctaaggaaggcgacgaccggcccttcttttggctgttcgagaatgtggtggccatgggagtcagcgacaagcgggatattagccggttcctggagagcaaccccgtgatgatcgatgccaaggaagtgagcgccgcccaccgggccagatacttctggggcaatctgcctggcatgaacagacccctggccagcaccgtgaacgacaagctggagctgcaggagtgcctggagcacggccggatcgccaagttcagcaaggtgagaaccatcaccacccgaagcaacagcatcaaacaaggcaaggaccagcactttcctgtgttcatgaacgagaaggaggacatcctgtggtgtaccgagatggagagagtgttcgggttcccagtccactacacagatgtcagcaacatgtctagactggccagacagagactgctgggaagaagctggtccgtccctgtgatcagacacctgttcgcccctctgaaggagtacttcgcctgcgtgagcagcggcaacagcaacgccaacagccggggccccagcttctctagcggcctggtgccactgtccctgagagggagccacatgggccccatggagatctacaaaaccgtgagcgcctggaagcggcagcctgtgcgcgtgctgagcctgtttcggaatatcgataaagtcctgaaaagcctgggattcctggagagcggctctggctccggcggtggcaccctgaagtacgtggaggatgtgacaaacgtggtcagacgggatgtggagaagtggggccccttcgatctggtgtacggcagcacccaacccctgggcagctcttgtgaccggtgccctggctggtacatgtttcagttccaccggatcctgcagtacgccctgccgagacaggagtcccagcggccattcttttggattttcatggacaacttgctgctgaccgaggatgaccaggaaactaccactcggttcctgcagaccgaagccgtgaccctgcaggacgtgagaggccgggactaccagaacgccatgcgggtgtggtccaacatccctggactgaaaagcaagcacgcacctctgacccctaaagaagaggagtacctgcaggcccaggtgcggagcagaagcaagctggacgcccctaaggtggatctgctggtgaagaattgcctcctgcccctgagagagtacttcaagtatttcagccagaatagtctgcccctgggcggcccaagcagcggcgcccctcctcccagcggcggcagcccagccggctccccaacctctaccgaggagggcacctctgagtccgccacccccgagagcggccctggcacctccaccgagcccagcgagggcagcgcacccggcagccctgccggcagccccacctccacagaggagggaaccagcaccgagcccagcgaaggcagcgccccaggcaccagcaccgagcctagtgagggcggctctggcggcggcagcgcccaggagattaaacggatcaacaagatcagaagaagacttgtgaaagacagcaacaccaagaaggccggcaagacaggccccatgaaaaccctgctggttagagtgatgacacccgatctgagagagcggctggaaaacctgagaaagaagcctgaaaatatcccccagcccatcagcaatacatctagagccaacctgaataagctgctgaccgattacaccgaaatgaagaaggcgatcctgcatgtgtactgggaagagttccagaaggaccctgtgggcctgatgagccgggtggcccagcctgccagcaagaagatcgatcagaacaagctgaaacctgagatggacgagaagggcaacctgaccaccgccggctttgcctgctctcagtgtggccagcccctgttcgtgtacaagctggagcaggtgtctgagaagggcaaggcttacaccaactacttcggacggtgcaatgtggccgagcacgaaaagctgatcctgctggcccagctgaagcccgagaaggatagcgacgaagccgtgacatatagcctgggaaagtttgggcagagggccctggatttctacagcattcatgtgaccaaggagtccacccaccccgtgaagcccctggcccagatcgccggaaacagatacgcctccggacctgtgggaaaggccctgagcgacgcatgtatgggcacaatcgcctccttcctgtctaagtaccaggacatcatcatcgaacaccagaaggtggtgaagggcaaccagaagagactggagagcctgcgggagctggccggcaaggaaaacctggaataccctagcgtgaccctgccacctcagcctcacaccaaggagggcgttgatgcctacaacgaagtgatcgcccgggtgcgaatgtgggtgaacctgaacctgtggcagaagctgaagctaagcagagatgatgccaagcctctgctgagactgaagggattcccttcctttcctctggtcgagagacaggccaacgaagtggactggtgggacatggtgtgtaacgtgaagaagctgatcaacgagaaaaaggaggatggcaaggtgttttggcagaatctggctggctacaagagacaggaagccctgagaccatacctgagcagcgaggaagatcggaagaagggaaagaaattcgctcggtaccagctgggcgacctgctgctgcacctggaaaagaagcacggcgaggactggggaaaggtgtacgacgaggcctgggagcggattgacaagaaagtggaaggcctgagcaagcacatcaagctggaagaggaacggagaagcgaggacgcccagagcaaggccgccctgaccgactggctgcgggctaaggccagcttcgtgatcgagggcctgaaggaggccgacaaggacgagttctgcagatgcgagctgaagctgcagaagtggtacggggacctgcggggaaagcccttcgccatcgaagccgagaacagcatcctggacatcagcggcttcagcaagcagtacaactgtgccttcatctggcagaaggacggcgtgaagaagctgaacctgtacctgatcatcaactacttcaagggcggcaagctgcggttcaagaagatcaaacctgaagccttcgaagccaacagattctacaccgtgatcaacaaaaagagcggcgagatcgtgcccatggaggtgaacttcaacttcgacgaccccaacctgatcatcctgcctctggcctttggcaagagacagggcagagaattcatctggaacgacctgctgtccctggaaaccggcagcctgaagctggccaacggaagagtgatcgagaagacactgtacaacagaagaacccggcaggatgagcctgccctgttcgtggccctgaccttcgagcggcgggaggtcctggactcctccaatatcaaaccaatgaacctgatcggcgtggcaagaggcgaaaacatccccgccgtgatcgccctgaccgaccccgagggctgcccactgagccggtttaaggatagcctgggaaacccaacccacatcctgagaatcggcgagagctataaggagaagcagcggaccatccaggccaagaaggaggtggagcagcggagagccggcggctacagccggaagtacgccagcaaagccaagaatctggcagacgatatggtgagaaacaccgctagagatctgctgtactacgccgtgacccaggatgccatgctgatcttcgccaacctgagccggggcttcggccggcagggcaagcggaccttcatggccgagagacagtacacacggatggaggactggctgaccgccaagctggcctacgagggcctgagcaagacctacctgtccaagacactggcccagtacacctccaagacatgcagcaactgtgggtttaccatcaccagcgccgactacgacagggtgctggagaagctgaagaagacagcaacaggctggatgaccacaattaacggcaaggagctgaaggtggagggccagattacctactacaacagatacaagagacagaacgtagtcaaggacctgtccgtcgagctggatagactgagcgaagaatctgtgaacaacgacatctcctcctggacaaagggcagaagcggagaagctctgagcctcctgaagaaaagattctcccatagacccgtgcaggagaagttcgtgtgcctgaactgcggcttcgagacacacgcagccgagcaagccgccctgaacatcgccagatcctggctgttcctgcggagccaggagtacaagaaataccagacaaacaagacaaccggcaacaccgataagagagccttcgtcgagacctggcagtccttttaccggaagaagcttaaggaggtgtggaaacctgccgtgcggtctggcggatctggcggaggctccacaagcagcgaggagagcgtgaccttcgaggacgtggccatctacttcagcgagaacgagtggaccggcctggcccccgcccagagggtgctgtacagggacgtgatgctggagaactacggcgccgtggccgccctggccgccttccccttccccaagcccgccctgatcagccagctggagaggggcgaggccccctggtgcaaggccccccagggcgccctggacggcgagggccccaggggcatcaccagccccaagaaaaagagaaaagtctaagctgccttctgcggggcttgccttctggccatgcccttcttctctcccttgcacctgtacctcttggtctttgaataaagcctgagtaggaaggctagcaaaaaaaaaaaaaaaaaaaaaaaaaaaaaaaaaaaaaaaaaaaaaaaaaaaaaaaaaaaaaaaaaaaaaaaaaaaaaaaa

SEQ ID NO: 6512 - RNA, 5794 nt, synthetic construct
  source 1..5794: mol_type = other RNA
aggaaataagagagaaaagaagagtaagaagaaatataagagccaccatggcccctaagaagaagcgtaaagtgagccggatggaacgcctcgtctacgaggtgcggcagaagtgcagaaacatcgaggacatctgcatctcctgcggatctctgaacgtgaccctggagcacccactgttcatcggcggcatgtgccagaactgtaaaaactgttttctggagtgtgcctatcaatacgacgatgacggctaccagagctactgcaccatctgttgcggcggaagagaggtgctgatgtgtggaaataacaactgctgccggtgcttctgcgtggaatgcgtggacctgctggtgggccccggcgccgcccaggccgctattaaggaagatccttggaactgctacatgtgcggccacaagggcacatacggcctgctgagacggagagaggactggcctagcagactgcagatgttcttcgccaataaccacgaccaggagttcgacccccctaaggtgtaccctcccgtccccgccgagaagagaaagcccatccgggtcctgagcctgttcgatggcatcgccaccggtctgctggtgctgaaggacctgggcatccaggtggataggtacattgcctccgaggtgtgcgaggactccatcaccgtgggaatggtgcgtcatcagggcaagatcatgtacgtgggcgacgtgcggagcgtgacacagaagcatatccaggagtggggccctttcgacctggtgatcggcggcagcccttgcaatgacctgagcatcgtgaacccagcccggaagggcctgtacgagggaaccggcagactgttcttcgagttttacagactgctgcacgacgcccggcctaaggaaggcgacgaccggcccttcttttggctgttcgagaatgtggtggccatgggagtcagcgacaagcgggatattagccggttcctggagagcaaccccgtgatgatcgatgccaaggaagtgagcgccgcccaccgggccagatacttctggggcaatctgcctggcatgaacagacccctggccagcaccgtgaacgacaagctggagctgcaggagtgcctggagcacggccggatcgccaagttcagcaaggtgagaaccatcaccacccgaagcaacagcatcaaacaaggcaaggaccagcactttcctgtgttcatgaacgagaaggaggacatcctgtggtgtaccgagatggagagagtgttcgggttcccagtccactacacagatgtcagcaacatgtctagactggccagacagagactgctgggaagaagctggtccgtccctgtgatcagacacctgttcgcccctctgaaggagtacttcgcctgcgtgagcagcggcaacagcaacgccaacagccggggccccagcttctctagcggcctggtgccactgtccctgagagggagccacatgggccccatggagatctacaaaaccgtgagcgcctggaagcggcagcctgtgcgcgtgctgagcctgtttcggaatatcgataaagtcctgaaaagcctgggattcctggagagcggctctggctccggcggtggcaccctgaagtacgtggaggatgtgacaaacgtggtcagacgggatgtggagaagtggggccccttcgatctggtgtacggcagcacccaacccctgggcagctcttgtgaccggtgccctggctggtacatgtttcagttccaccggatcctgcagtacgccctgccgagacaggagtcccagcggccattcttttggattttcatggacaacttgctgctgaccgaggatgaccaggaaactaccactcggttcctgcagaccgaagccgtgaccctgcaggacgtgagaggccgggactaccagaacgccatgcgggtgtggtccaacatccctggactgaaaagcaagcacgcacctctgacccctaaagaagaggagtacctgcaggcccaggtgcggagcagaagcaagctggacgcccctaaggtggatctgctggtgaagaattgcctcctgcccctgagagagtacttcaagtatttcagccagaatagtctgcccctgggcggcccaagcagcggcgcccctcctcccagcggcggcagcccagccggctccccaacctctaccgaggagggcacctctgagtccgccacccccgagagcggccctggcacctccaccgagcccagcgagggcagcgcacccggcagccctgccggcagccccacctccacagaggagggaaccagcaccgagcccagcgaaggcagcgccccaggcaccagcaccgagcctagtgagggcggctctggcggcggcagcgcccaggagattaaacggatcaacaagatcagaagaagacttgtgaaagacagcaacaccaagaaggccggcaagacaggccccatgaaaaccctgctggttagagtgatgacacccgatctgagagagcggctggaaaacctgagaaagaagcctgaaaatatcccccagcccatcagcaatacatctagagccaacctgaataagctgctgaccgattacaccgaaatgaagaaggcgatcctgcatgtgtactgggaagagttccagaaggaccctgtgggcctgatgagccgggtggcccagcctgccagcaagaagatcgatcagaacaagctgaaacctgagatggacgagaagggcaacctgaccaccgccggctttgcctgctctcagtgtggccagcccctgttcgtgtacaagctggagcaggtgtctgagaagggcaaggcttacaccaactacttcggacggtgcaatgtggccgagcacgaaaagctgatcctgctggcccagctgaagcccgagaaggatagcgacgaagccgtgacatatagcctgggaaagtttgggcagagggccctggatttctacagcattcatgtgaccaaggagtccacccaccccgtgaagcccctggcccagatcgccggaaacagatacgcctccggacctgtgggaaaggccctgagcgacgcatgtatgggcacaatcgcctccttcctgtctaagtaccaggacatcatcatcgaacaccagaaggtggtgaagggcaaccagaagagactggagagcctgcgggagctggccggcaaggaaaacctggaataccctagcgtgaccctgccacctcagcctcacaccaaggagggcgttgatgcctacaacgaagtgatcgcccgggtgcgaatgtgggtgaacctgaacctgtggcagaagctgaagctaagcagagatgatgccaagcctctgctgagactgaagggattcccttcctttcctctggtcgagagacaggccaacgaagtggactggtgggacatggtgtgtaacgtgaagaagctgatcaacgagaaaaaggaggatggcaaggtgttttggcagaatctggctggctacaagagacaggaagccctgagaccatacctgagcagcgaggaagatcggaagaagggaaagaaattcgctcggtaccagctgggcgacctgctgctgcacctggaaaagaagcacggcgaggactggggaaaggtgtacgacgaggcctgggagcggattgacaagaaagtggaaggcctgagcaagcacatcaagctggaagaggaacggagaagcgaggacgcccagagcaaggccgccctgaccgactggctgcgggctaaggccagcttcgtgatcgagggcctgaaggaggccgacaaggacgagttctgcagatgcgagctgaagctgcagaagtggtacggggacctgcggggaaagcccttcgccatcgaagccgagaacagcatcctggacatcagcggcttcagcaagcagtacaactgtgccttcatctggcagaaggacggcgtgaagaagctgaacctgtacctgatcatcaactacttcaagggcggcaagctgcggttcaagaagatcaaacctgaagccttcgaagccaacagattctacaccgtgatcaacaaaaagagcggcgagatcgtgcccatggaggtgaacttcaacttcgacgaccccaacctgatcatcctgcctctggcctttggcaagagacagggcagagaattcatctggaacgacctgctgtccctggaaaccggcagcctgaagctggccaacggaagagtgatcgagaagacactgtacaacagaagaacccggcaggatgagcctgccctgttcgtggccctgaccttcgagcggcgggaggtcctggactcctccaatatcaaaccaatgaacctgatcggcgtggcaagaggcgaaaacatccccgccgtgatcgccctgaccgaccccgagggctgcccactgagccggtttaaggatagcctgggaaacccaacccacatcctgagaatcggcgagagctataaggagaagcagcggaccatccaggccaagaaggaggtggagcagcggagagccggcggctacagccggaagtacgccagcaaagccaagaatctggcagacgatatggtgagaaacaccgctagagatctgctgtactacgccgtgacccaggatgccatgctgatcttcgccaacctgagccggggcttcggccggcagggcaagcggaccttcatggccgagagacagtacacacggatggaggactggctgaccgccaagctggcctacgagggcctgagcaagacctacctgtccaagacactggcccagtacacctccaagacatgcagcaactgtgggtttaccatcaccagcgccgactacgacagggtgctggagaagctgaagaagacagcaacaggctggatgaccacaattaacggcaaggagctgaaggtggagggccagattacctactacaacagatacaagagacagaacgtagtcaaggacctgtccgtcgagctggatagactgagcgaagaatctgtgaacaacgacatctcctcctggacaaagggcagaagcggagaagctctgagcctcctgaagaaaagattctcccatagacccgtgcaggagaagttcgtgtgcctgaactgcggcttcgagacacacgcagccgagcaagccgccctgaacatcgccagatcctggctgttcctgcggagccaggagtacaagaaataccagacaaacaagacaaccggcaacaccgataagagagccttcgtcgagacctggcagtccttttaccggaagaagcttaaggaggtgtggaaacctgccgtgcggtctggcggatctggcggaggctccacaagcgagcccctgaagttcagagacgtggccatcgagttcagcctggaggagtggcagtgcctggacaccatccagcagaacctgtacagaaacgtgatgctggagaactacagaaacctggtgttcctgggcatcgtggtgagcaagcccgacctgatcacctgcctggagcaggagaaggagccctggaccagaaagagacacagaatggtggccgagccccccgtgatctgcagccacttcaccagccccaagaaaaagagaaaagtctaagctgccttctgcggggcttgccttctggccatgcccttcttctctcccttgcacctgtacctcttggtctttgaataaagcctgagtaggaaggctagcaaaaaaaaaaaaaaaaaaaaaaaaaaaaaaaaaaaaaaaaaaaaaaaaaaaaaaaaaaaaaaaaaaaaaaaaaaaaaaaa

SEQ ID NO: 6513 - RNA, 5797 nt, synthetic construct
  source 1..5797: mol_type = other RNA
aggaaataagagagaaaagaagagtaagaagaaatataagagccaccatggcccctaagaagaagcgtaaagtgagccggatggaacgcctcgtctacgaggtgcggcagaagtgcagaaacatcgaggacatctgcatctcctgcggatctctgaacgtgaccctggagcacccactgttcatcggcggcatgtgccagaactgtaaaaactgttttctggagtgtgcctatcaatacgacgatgacggctaccagagctactgcaccatctgttgcggcggaagagaggtgctgatgtgtggaaataacaactgctgccggtgcttctgcgtggaatgcgtggacctgctggtgggccccggcgccgcccaggccgctattaaggaagatccttggaactgctacatgtgcggccacaagggcacatacggcctgctgagacggagagaggactggcctagcagactgcagatgttcttcgccaataaccacgaccaggagttcgacccccctaaggtgtaccctcccgtccccgccgagaagagaaagcccatccgggtcctgagcctgttcgatggcatcgccaccggtctgctggtgctgaaggacctgggcatccaggtggataggtacattgcctccgaggtgtgcgaggactccatcaccgtgggaatggtgcgtcatcagggcaagatcatgtacgtgggcgacgtgcggagcgtgacacagaagcatatccaggagtggggccctttcgacctggtgatcggcggcagcccttgcaatgacctgagcatcgtgaacccagcccggaagggcctgtacgagggaaccggcagactgttcttcgagttttacagactgctgcacgacgcccggcctaaggaaggcgacgaccggcccttcttttggctgttcgagaatgtggtggccatgggagtcagcgacaagcgggatattagccggttcctggagagcaaccccgtgatgatcgatgccaaggaagtgagcgccgcccaccgggccagatacttctggggcaatctgcctggcatgaacagacccctggccagcaccgtgaacgacaagctggagctgcaggagtgcctggagcacggccggatcgccaagttcagcaaggtgagaaccatcaccacccgaagcaacagcatcaaacaaggcaaggaccagcactttcctgtgttcatgaacgagaaggaggacatcctgtggtgtaccgagatggagagagtgttcgggttcccagtccactacacagatgtcagcaacatgtctagactggccagacagagactgctgggaagaagctggtccgtccctgtgatcagacacctgttcgcccctctgaaggagtacttcgcctgcgtgagcagcggcaacagcaacgccaacagccggggccccagcttctctagcggcctggtgccactgtccctgagagggagccacatgggccccatggagatctacaaaaccgtgagcgcctggaagcggcagcctgtgcgcgtgctgagcctgtttcggaatatcgataaagtcctgaaaagcctgggattcctggagagcggctctggctccggcggtggcaccctgaagtacgtggaggatgtgacaaacgtggtcagacgggatgtggagaagtggggccccttcgatctggtgtacggcagcacccaacccctgggcagctcttgtgaccggtgccctggctggtacatgtttcagttccaccggatcctgcagtacgccctgccgagacaggagtcccagcggccattcttttggattttcatggacaacttgctgctgaccgaggatgaccaggaaactaccactcggttcctgcagaccgaagccgtgaccctgcaggacgtgagaggccgggactaccagaacgccatgcgggtgtggtccaacatccctggactgaaaagcaagcacgcacctctgacccctaaagaagaggagtacctgcaggcccaggtgcggagcagaagcaagctggacgcccctaaggtggatctgctggtgaagaattgcctcctgcccctgagagagtacttcaagtatttcagccagaatagtctgcccctgggcggcccaagcagcggcgcccctcctcccagcggcggcagcccagccggctccccaacctctaccgaggagggcacctctgagtccgccacccccgagagcggccctggcacctccaccgagcccagcgagggcagcgcacccggcagccctgccggcagccccacctccacagaggagggaaccagcaccgagcccagcgaaggcagcgccccaggcaccagcaccgagcctagtgagggcggctctggcggcggcagcgcccaggagattaaacggatcaacaagatcagaagaagacttgtgaaagacagcaacaccaagaaggccggcaagacaggccccatgaaaaccctgctggttagagtgatgacacccgatctgagagagcggctggaaaacctgagaaagaagcctgaaaatatcccccagcccatcagcaatacatctagagccaacctgaataagctgctgaccgattacaccgaaatgaagaaggcgatcctgcatgtgtactgggaagagttccagaaggaccctgtgggcctgatgagccgggtggcccagcctgccagcaagaagatcgatcagaacaagctgaaacctgagatggacgagaagggcaacctgaccaccgccggctttgcctgctctcagtgtggccagcccctgttcgtgtacaagctggagcaggtgtctgagaagggcaaggcttacaccaactacttcggacggtgcaatgtggccgagcacgaaaagctgatcctgctggcccagctgaagcccgagaaggatagcgacgaagccgtgacatatagcctgggaaagtttgggcagagggccctggatttctacagcattcatgtgaccaaggagtccacccaccccgtgaagcccctggcccagatcgccggaaacagatacgcctccggacctgtgggaaaggccctgagcgacgcatgtatgggcacaatcgcctccttcctgtctaagtaccaggacatcatcatcgaacaccagaaggtggtgaagggcaaccagaagagactggagagcctgcgggagctggccggcaaggaaaacctggaataccctagcgtgaccctgccacctcagcctcacaccaaggagggcgttgatgcctacaacgaagtgatcgcccgggtgcgaatgtgggtgaacctgaacctgtggcagaagctgaagctaagcagagatgatgccaagcctctgctgagactgaagggattcccttcctttcctctggtcgagagacaggccaacgaagtggactggtgggacatggtgtgtaacgtgaagaagctgatcaacgagaaaaaggaggatggcaaggtgttttggcagaatctggctggctacaagagacaggaagccctgagaccatacctgagcagcgaggaagatcggaagaagggaaagaaattcgctcggtaccagctgggcgacctgctgctgcacctggaaaagaagcacggcgaggactggggaaaggtgtacgacgaggcctgggagcggattgacaagaaagtggaaggcctgagcaagcacatcaagctggaagaggaacggagaagcgaggacgcccagagcaaggccgccctgaccgactggctgcgggctaaggccagcttcgtgatcgagggcctgaaggaggccgacaaggacgagttctgcagatgcgagctgaagctgcagaagtggtacggggacctgcggggaaagcccttcgccatcgaagccgagaacagcatcctggacatcagcggcttcagcaagcagtacaactgtgccttcatctggcagaaggacggcgtgaagaagctgaacctgtacctgatcatcaactacttcaagggcggcaagctgcggttcaagaagatcaaacctgaagccttcgaagccaacagattctacaccgtgatcaacaaaaagagcggcgagatcgtgcccatggaggtgaacttcaacttcgacgaccccaacctgatcatcctgcctctggcctttggcaagagacagggcagagaattcatctggaacgacctgctgtccctggaaaccggcagcctgaagctggccaacggaagagtgatcgagaagacactgtacaacagaagaacccggcaggatgagcctgccctgttcgtggccctgaccttcgagcggcgggaggtcctggactcctccaatatcaaaccaatgaacctgatcggcgtggcaagaggcgaaaacatccccgccgtgatcgccctgaccgaccccgagggctgcccactgagccggtttaaggatagcctgggaaacccaacccacatcctgagaatcggcgagagctataaggagaagcagcggaccatccaggccaagaaggaggtggagcagcggagagccggcggctacagccggaagtacgccagcaaagccaagaatctggcagacgatatggtgagaaacaccgctagagatctgctgtactacgccgtgacccaggatgccatgctgatcttcgccaacctgagccggggcttcggccggcagggcaagcggaccttcatggccgagagacagtacacacggatggaggactggctgaccgccaagctggcctacgagggcctgagcaagacctacctgtccaagacactggcccagtacacctccaagacatgcagcaactgtgggtttaccatcaccagcgccgactacgacagggtgctggagaagctgaagaagacagcaacaggctggatgaccacaattaacggcaaggagctgaaggtggagggccagattacctactacaacagatacaagagacagaacgtagtcaaggacctgtccgtcgagctggatagactgagcgaagaatctgtgaacaacgacatctcctcctggacaaagggcagaagcggagaagctctgagcctcctgaagaaaagattctcccatagacccgtgcaggagaagttcgtgtgcctgaactgcggcttcgagacacacgcagccgagcaagccgccctgaacatcgccagatcctggctgttcctgcggagccaggagtacaagaaataccagacaaacaagacaaccggcaacaccgataagagagccttcgtcgagacctggcagtccttttaccggaagaagcttaaggaggtgtggaaacctgccgtgcggtctggcggatctggcggaggctccacaagcctgctgaccttcgaggacgtggccgtgagcttcagcgaggaggagtggaagctgctggaccccgcccagaagatcctgtacaacgacgtgatgcaggagaactacgagaccgtgatcagcctgggcctgaagctgaagaacgacaccggcaacgaccagcccatcagcgtgagcgccctggagatccaggccagcggcaggaaggtgctgaggaaggccaggatgaaggtggcccagaagaccaccagccccaagaaaaagagaaaagtctaagctgccttctgcggggcttgccttctggccatgcccttcttctctcccttgcacctgtacctcttggtctttgaataaagcctgagtaggaaggctagcaaaaaaaaaaaaaaaaaaaaaaaaaaaaaaaaaaaaaaaaaaaaaaaaaaaaaaaaaaaaaaaaaaaaaaaaaaaaaaaa

SEQ ID NO: 6514 - RNA, 5797 nt, synthetic construct
  source 1..5797: mol_type = other RNA
aggaaataagagagaaaagaagagtaagaagaaatataagagccaccatggcccctaagaagaagcgtaaagtgagccggatggaacgcctcgtctacgaggtgcggcagaagtgcagaaacatcgaggacatctgcatctcctgcggatctctgaacgtgaccctggagcacccactgttcatcggcggcatgtgccagaactgtaaaaactgttttctggagtgtgcctatcaatacgacgatgacggctaccagagctactgcaccatctgttgcggcggaagagaggtgctgatgtgtggaaataacaactgctgccggtgcttctgcgtggaatgcgtggacctgctggtgggccccggcgccgcccaggccgctattaaggaagatccttggaactgctacatgtgcggccacaagggcacatacggcctgctgagacggagagaggactggcctagcagactgcagatgttcttcgccaataaccacgaccaggagttcgacccccctaaggtgtaccctcccgtccccgccgagaagagaaagcccatccgggtcctgagcctgttcgatggcatcgccaccggtctgctggtgctgaaggacctgggcatccaggtggataggtacattgcctccgaggtgtgcgaggactccatcaccgtgggaatggtgcgtcatcagggcaagatcatgtacgtgggcgacgtgcggagcgtgacacagaagcatatccaggagtggggccctttcgacctggtgatcggcggcagcccttgcaatgacctgagcatcgtgaacccagcccggaagggcctgtacgagggaaccggcagactgttcttcgagttttacagactgctgcacgacgcccggcctaaggaaggcgacgaccggcccttcttttggctgttcgagaatgtggtggccatgggagtcagcgacaagcgggatattagccggttcctggagagcaaccccgtgatgatcgatgccaaggaagtgagcgccgcccaccgggccagatacttctggggcaatctgcctggcatgaacagacccctggccagcaccgtgaacgacaagctggagctgcaggagtgcctggagcacggccggatcgccaagttcagcaaggtgagaaccatcaccacccgaagcaacagcatcaaacaaggcaaggaccagcactttcctgtgttcatgaacgagaaggaggacatcctgtggtgtaccgagatggagagagtgttcgggttcccagtccactacacagatgtcagcaacatgtctagactggccagacagagactgctgggaagaagctggtccgtccctgtgatcagacacctgttcgcccctctgaaggagtacttcgcctgcgtgagcagcggcaacagcaacgccaacagccggggccccagcttctctagcggcctggtgccactgtccctgagagggagccacatgggccccatggagatctacaaaaccgtgagcgcctggaagcggcagcctgtgcgcgtgctgagcctgtttcggaatatcgataaagtcctgaaaagcctgggattcctggagagcggctctggctccggcggtggcaccctgaagtacgtggaggatgtgacaaacgtggtcagacgggatgtggagaagtggggccccttcgatctggtgtacggcagcacccaacccctgggcagctcttgtgaccggtgccctggctggtacatgtttcagttccaccggatcctgcagtacgccctgccgagacaggagtcccagcggccattcttttggattttcatggacaacttgctgctgaccgaggatgaccaggaaactaccactcggttcctgcagaccgaagccgtgaccctgcaggacgtgagaggccgggactaccagaacgccatgcgggtgtggtccaacatccctggactgaaaagcaagcacgcacctctgacccctaaagaagaggagtacctgcaggcccaggtgcggagcagaagcaagctggacgcccctaaggtggatctgctggtgaagaattgcctcctgcccctgagagagtacttcaagtatttcagccagaatagtctgcccctgggcggcccaagcagcggcgcccctcctcccagcggcggcagcccagccggctccccaacctctaccgaggagggcacctctgagtccgccacccccgagagcggccctggcacctccaccgagcccagcgagggcagcgcacccggcagccctgccggcagccccacctccacagaggagggaaccagcaccgagcccagcgaaggcagcgccccaggcaccagcaccgagcctagtgagggcggctctggcggcggcagcgcccaggagattaaacggatcaacaagatcagaagaagacttgtgaaagacagcaacaccaagaaggccggcaagacaggccccatgaaaaccctgctggttagagtgatgacacccgatctgagagagcggctggaaaacctgagaaagaagcctgaaaatatcccccagcccatcagcaatacatctagagccaacctgaataagctgctgaccgattacaccgaaatgaagaaggcgatcctgcatgtgtactgggaagagttccagaaggaccctgtgggcctgatgagccgggtggcccagcctgccagcaagaagatcgatcagaacaagctgaaacctgagatggacgagaagggcaacctgaccaccgccggctttgcctgctctcagtgtggccagcccctgttcgtgtacaagctggagcaggtgtctgagaagggcaaggcttacaccaactacttcggacggtgcaatgtggccgagcacgaaaagctgatcctgctggcccagctgaagcccgagaaggatagcgacgaagccgtgacatatagcctgggaaagtttgggcagagggccctggatttctacagcattcatgtgaccaaggagtccacccaccccgtgaagcccctggcccagatcgccggaaacagatacgcctccggacctgtgggaaaggccctgagcgacgcatgtatgggcacaatcgcctccttcctgtctaagtaccaggacatcatcatcgaacaccagaaggtggtgaagggcaaccagaagagactggagagcctgcgggagctggccggcaaggaaaacctggaataccctagcgtgaccctgccacctcagcctcacaccaaggagggcgttgatgcctacaacgaagtgatcgcccgggtgcgaatgtgggtgaacctgaacctgtggcagaagctgaagctaagcagagatgatgccaagcctctgctgagactgaagggattcccttcctttcctctggtcgagagacaggccaacgaagtggactggtgggacatggtgtgtaacgtgaagaagctgatcaacgagaaaaaggaggatggcaaggtgttttggcagaatctggctggctacaagagacaggaagccctgagaccatacctgagcagcgaggaagatcggaagaagggaaagaaattcgctcggtaccagctgggcgacctgctgctgcacctggaaaagaagcacggcgaggactggggaaaggtgtacgacgaggcctgggagcggattgacaagaaagtggaaggcctgagcaagcacatcaagctggaagaggaacggagaagcgaggacgcccagagcaaggccgccctgaccgactggctgcgggctaaggccagcttcgtgatcgagggcctgaaggaggccgacaaggacgagttctgcagatgcgagctgaagctgcagaagtggtacggggacctgcggggaaagcccttcgccatcgaagccgagaacagcatcctggacatcagcggcttcagcaagcagtacaactgtgccttcatctggcagaaggacggcgtgaagaagctgaacctgtacctgatcatcaactacttcaagggcggcaagctgcggttcaagaagatcaaacctgaagccttcgaagccaacagattctacaccgtgatcaacaaaaagagcggcgagatcgtgcccatggaggtgaacttcaacttcgacgaccccaacctgatcatcctgcctctggcctttggcaagagacagggcagagaattcatctggaacgacctgctgtccctggaaaccggcagcctgaagctggccaacggaagagtgatcgagaagacactgtacaacagaagaacccggcaggatgagcctgccctgttcgtggccctgaccttcgagcggcgggaggtcctggactcctccaatatcaaaccaatgaacctgatcggcgtggcaagaggcgaaaacatccccgccgtgatcgccctgaccgaccccgagggctgcccactgagccggtttaaggatagcctgggaaacccaacccacatcctgagaatcggcgagagctataaggagaagcagcggaccatccaggccaagaaggaggtggagcagcggagagccggcggctacagccggaagtacgccagcaaagccaagaatctggcagacgatatggtgagaaacaccgctagagatctgctgtactacgccgtgacccaggatgccatgctgatcttcgccaacctgagccggggcttcggccggcagggcaagcggaccttcatggccgagagacagtacacacggatggaggactggctgaccgccaagctggcctacgagggcctgagcaagacctacctgtccaagacactggcccagtacacctccaagacatgcagcaactgtgggtttaccatcaccagcgccgactacgacagggtgctggagaagctgaagaagacagcaacaggctggatgaccacaattaacggcaaggagctgaaggtggagggccagattacctactacaacagatacaagagacagaacgtagtcaaggacctgtccgtcgagctggatagactgagcgaagaatctgtgaacaacgacatctcctcctggacaaagggcagaagcggagaagctctgagcctcctgaagaaaagattctcccatagacccgtgcaggagaagttcgtgtgcctgaactgcggcttcgagacacacgcagccgagcaagccgccctgaacatcgccagatcctggctgttcctgcggagccaggagtacaagaaataccagacaaacaagacaaccggcaacaccgataagagagccttcgtcgagacctggcagtccttttaccggaagaagcttaaggaggtgtggaaacctgccgtgcggtctggcggatctggcggaggctccacaagcccccagggctgcgccatcagcgaggacgtgttcgtgtacttcagcagggaggagtgggtgctgctggacgaggaccagaggctgctgtacagggacgtgatgctggagaacttcgccctgctggccagcctgggcatcgccagcagcaggagccacctggtgacccagctggagcagggcgaggagccctggatgcccgcccaggtggacatgacccccgccaccgagaaggaggcccagaagaccagccccaagaaaaagagaaaagtctaagctgccttctgcggggcttgccttctggccatgcccttcttctctcccttgcacctgtacctcttggtctttgaataaagcctgagtaggaaggctagcaaaaaaaaaaaaaaaaaaaaaaaaaaaaaaaaaaaaaaaaaaaaaaaaaaaaaaaaaaaaaaaaaaaaaaaaaaaaaaaa

SEQ ID NO: 6515 - RNA, 5797 nt, synthetic construct
  source 1..5797: mol_type = other RNA
aggaaataagagagaaaagaagagtaagaagaaatataagagccaccatggcccctaagaagaagcgtaaagtgagccggatggaacgcctcgtctacgaggtgcggcagaagtgcagaaacatcgaggacatctgcatctcctgcggatctctgaacgtgaccctggagcacccactgttcatcggcggcatgtgccagaactgtaaaaactgttttctggagtgtgcctatcaatacgacgatgacggctaccagagctactgcaccatctgttgcggcggaagagaggtgctgatgtgtggaaataacaactgctgccggtgcttctgcgtggaatgcgtggacctgctggtgggccccggcgccgcccaggccgctattaaggaagatccttggaactgctacatgtgcggccacaagggcacatacggcctgctgagacggagagaggactggcctagcagactgcagatgttcttcgccaataaccacgaccaggagttcgacccccctaaggtgtaccctcccgtccccgccgagaagagaaagcccatccgggtcctgagcctgttcgatggcatcgccaccggtctgctggtgctgaaggacctgggcatccaggtggataggtacattgcctccgaggtgtgcgaggactccatcaccgtgggaatggtgcgtcatcagggcaagatcatgtacgtgggcgacgtgcggagcgtgacacagaagcatatccaggagtggggccctttcgacctggtgatcggcggcagcccttgcaatgacctgagcatcgtgaacccagcccggaagggcctgtacgagggaaccggcagactgttcttcgagttttacagactgctgcacgacgcccggcctaaggaaggcgacgaccggcccttcttttggctgttcgagaatgtggtggccatgggagtcagcgacaagcgggatattagccggttcctggagagcaaccccgtgatgatcgatgccaaggaagtgagcgccgcccaccgggccagatacttctggggcaatctgcctggcatgaacagacccctggccagcaccgtgaacgacaagctggagctgcaggagtgcctggagcacggccggatcgccaagttcagcaaggtgagaaccatcaccacccgaagcaacagcatcaaacaaggcaaggaccagcactttcctgtgttcatgaacgagaaggaggacatcctgtggtgtaccgagatggagagagtgttcgggttcccagtccactacacagatgtcagcaacatgtctagactggccagacagagactgctgggaagaagctggtccgtccctgtgatcagacacctgttcgcccctctgaaggagtacttcgcctgcgtgagcagcggcaacagcaacgccaacagccggggccccagcttctctagcggcctggtgccactgtccctgagagggagccacatgggccccatggagatctacaaaaccgtgagcgcctggaagcggcagcctgtgcgcgtgctgagcctgtttcggaatatcgataaagtcctgaaaagcctgggattcctggagagcggctctggctccggcggtggcaccctgaagtacgtggaggatgtgacaaacgtggtcagacgggatgtggagaagtggggccccttcgatctggtgtacggcagcacccaacccctgggcagctcttgtgaccggtgccctggctggtacatgtttcagttccaccggatcctgcagtacgccctgccgagacaggagtcccagcggccattcttttggattttcatggacaacttgctgctgaccgaggatgaccaggaaactaccactcggttcctgcagaccgaagccgtgaccctgcaggacgtgagaggccgggactaccagaacgccatgcgggtgtggtccaacatccctggactgaaaagcaagcacgcacctctgacccctaaagaagaggagtacctgcaggcccaggtgcggagcagaagcaagctggacgcccctaaggtggatctgctggtgaagaattgcctcctgcccctgagagagtacttcaagtatttcagccagaatagtctgcccctgggcggcccaagcagcggcgcccctcctcccagcggcggcagcccagccggctccccaacctctaccgaggagggcacctctgagtccgccacccccgagagcggccctggcacctccaccgagcccagcgagggcagcgcacccggcagccctgccggcagccccacctccacagaggagggaaccagcaccgagcccagcgaaggcagcgccccaggcaccagcaccgagcctagtgagggcggctctggcggcggcagcgcccaggagattaaacggatcaacaagatcagaagaagacttgtgaaagacagcaacaccaagaaggccggcaagacaggccccatgaaaaccctgctggttagagtgatgacacccgatctgagagagcggctggaaaacctgagaaagaagcctgaaaatatcccccagcccatcagcaatacatctagagccaacctgaataagctgctgaccgattacaccgaaatgaagaaggcgatcctgcatgtgtactgggaagagttccagaaggaccctgtgggcctgatgagccgggtggcccagcctgccagcaagaagatcgatcagaacaagctgaaacctgagatggacgagaagggcaacctgaccaccgccggctttgcctgctctcagtgtggccagcccctgttcgtgtacaagctggagcaggtgtctgagaagggcaaggcttacaccaactacttcggacggtgcaatgtggccgagcacgaaaagctgatcctgctggcccagctgaagcccgagaaggatagcgacgaagccgtgacatatagcctgggaaagtttgggcagagggccctggatttctacagcattcatgtgaccaaggagtccacccaccccgtgaagcccctggcccagatcgccggaaacagatacgcctccggacctgtgggaaaggccctgagcgacgcatgtatgggcacaatcgcctccttcctgtctaagtaccaggacatcatcatcgaacaccagaaggtggtgaagggcaaccagaagagactggagagcctgcgggagctggccggcaaggaaaacctggaataccctagcgtgaccctgccacctcagcctcacaccaaggagggcgttgatgcctacaacgaagtgatcgcccgggtgcgaatgtgggtgaacctgaacctgtggcagaagctgaagctaagcagagatgatgccaagcctctgctgagactgaagggattcccttcctttcctctggtcgagagacaggccaacgaagtggactggtgggacatggtgtgtaacgtgaagaagctgatcaacgagaaaaaggaggatggcaaggtgttttggcagaatctggctggctacaagagacaggaagccctgagaccatacctgagcagcgaggaagatcggaagaagggaaagaaattcgctcggtaccagctgggcgacctgctgctgcacctggaaaagaagcacggcgaggactggggaaaggtgtacgacgaggcctgggagcggattgacaagaaagtggaaggcctgagcaagcacatcaagctggaagaggaacggagaagcgaggacgcccagagcaaggccgccctgaccgactggctgcgggctaaggccagcttcgtgatcgagggcctgaaggaggccgacaaggacgagttctgcagatgcgagctgaagctgcagaagtggtacggggacctgcggggaaagcccttcgccatcgaagccgagaacagcatcctggacatcagcggcttcagcaagcagtacaactgtgccttcatctggcagaaggacggcgtgaagaagctgaacctgtacctgatcatcaactacttcaagggcggcaagctgcggttcaagaagatcaaacctgaagccttcgaagccaacagattctacaccgtgatcaacaaaaagagcggcgagatcgtgcccatggaggtgaacttcaacttcgacgaccccaacctgatcatcctgcctctggcctttggcaagagacagggcagagaattcatctggaacgacctgctgtccctggaaaccggcagcctgaagctggccaacggaagagtgatcgagaagacactgtacaacagaagaacccggcaggatgagcctgccctgttcgtggccctgaccttcgagcggcgggaggtcctggactcctccaatatcaaaccaatgaacctgatcggcgtggcaagaggcgaaaacatccccgccgtgatcgccctgaccgaccccgagggctgcccactgagccggtttaaggatagcctgggaaacccaacccacatcctgagaatcggcgagagctataaggagaagcagcggaccatccaggccaagaaggaggtggagcagcggagagccggcggctacagccggaagtacgccagcaaagccaagaatctggcagacgatatggtgagaaacaccgctagagatctgctgtactacgccgtgacccaggatgccatgctgatcttcgccaacctgagccggggcttcggccggcagggcaagcggaccttcatggccgagagacagtacacacggatggaggactggctgaccgccaagctggcctacgagggcctgagcaagacctacctgtccaagacactggcccagtacacctccaagacatgcagcaactgtgggtttaccatcaccagcgccgactacgacagggtgctggagaagctgaagaagacagcaacaggctggatgaccacaattaacggcaaggagctgaaggtggagggccagattacctactacaacagatacaagagacagaacgtagtcaaggacctgtccgtcgagctggatagactgagcgaagaatctgtgaacaacgacatctcctcctggacaaagggcagaagcggagaagctctgagcctcctgaagaaaagattctcccatagacccgtgcaggagaagttcgtgtgcctgaactgcggcttcgagacacacgcagccgagcaagccgccctgaacatcgccagatcctggctgttcctgcggagccaggagtacaagaaataccagacaaacaagacaaccggcaacaccgataagagagccttcgtcgagacctggcagtccttttaccggaagaagcttaaggaggtgtggaaacctgccgtgcggtctggcggatctggcggaggctccacaagcgtgcagggcagcgtgaccttcagggacgtggccgtgctgttcagccaggacgagtggctgcacctggacaccgcccagaggaccctgtacagggaggtgatgctggagaactacagcaacctggtgagcctgggcatcctgttcagcaagcccaaggtgatcagccagctggagcagggccaggacccctggaaggtggagcacggcgccccccagggcacctgccccggctgggagagcctgaccagccccaagaaaaagagaaaagtctaagctgccttctgcggggcttgccttctggccatgcccttcttctctcccttgcacctgtacctcttggtctttgaataaagcctgagtaggaaggctagcaaaaaaaaaaaaaaaaaaaaaaaaaaaaaaaaaaaaaaaaaaaaaaaaaaaaaaaaaaaaaaaaaaaaaaaaaaaaaaaa

SEQ ID NO: 6516 - RNA, 5797 nt, synthetic construct
  source 1..5797: mol_type = other RNA
aggaaataagagagaaaagaagagtaagaagaaatataagagccaccatggcccctaagaagaagcgtaaagtgagccggatggaacgcctcgtctacgaggtgcggcagaagtgcagaaacatcgaggacatctgcatctcctgcggatctctgaacgtgaccctggagcacccactgttcatcggcggcatgtgccagaactgtaaaaactgttttctggagtgtgcctatcaatacgacgatgacggctaccagagctactgcaccatctgttgcggcggaagagaggtgctgatgtgtggaaataacaactgctgccggtgcttctgcgtggaatgcgtggacctgctggtgggccccggcgccgcccaggccgctattaaggaagatccttggaactgctacatgtgcggccacaagggcacatacggcctgctgagacggagagaggactggcctagcagactgcagatgttcttcgccaataaccacgaccaggagttcgacccccctaaggtgtaccctcccgtccccgccgagaagagaaagcccatccgggtcctgagcctgttcgatggcatcgccaccggtctgctggtgctgaaggacctgggcatccaggtggataggtacattgcctccgaggtgtgcgaggactccatcaccgtgggaatggtgcgtcatcagggcaagatcatgtacgtgggcgacgtgcggagcgtgacacagaagcatatccaggagtggggccctttcgacctggtgatcggcggcagcccttgcaatgacctgagcatcgtgaacccagcccggaagggcctgtacgagggaaccggcagactgttcttcgagttttacagactgctgcacgacgcccggcctaaggaaggcgacgaccggcccttcttttggctgttcgagaatgtggtggccatgggagtcagcgacaagcgggatattagccggttcctggagagcaaccccgtgatgatcgatgccaaggaagtgagcgccgcccaccgggccagatacttctggggcaatctgcctggcatgaacagacccctggccagcaccgtgaacgacaagctggagctgcaggagtgcctggagcacggccggatcgccaagttcagcaaggtgagaaccatcaccacccgaagcaacagcatcaaacaaggcaaggaccagcactttcctgtgttcatgaacgagaaggaggacatcctgtggtgtaccgagatggagagagtgttcgggttcccagtccactacacagatgtcagcaacatgtctagactggccagacagagactgctgggaagaagctggtccgtccctgtgatcagacacctgttcgcccctctgaaggagtacttcgcctgcgtgagcagcggcaacagcaacgccaacagccggggccccagcttctctagcggcctggtgccactgtccctgagagggagccacatgggccccatggagatctacaaaaccgtgagcgcctggaagcggcagcctgtgcgcgtgctgagcctgtttcggaatatcgataaagtcctgaaaagcctgggattcctggagagcggctctggctccggcggtggcaccctgaagtacgtggaggatgtgacaaacgtggtcagacgggatgtggagaagtggggccccttcgatctggtgtacggcagcacccaacccctgggcagctcttgtgaccggtgccctggctggtacatgtttcagttccaccggatcctgcagtacgccctgccgagacaggagtcccagcggccattcttttggattttcatggacaacttgctgctgaccgaggatgaccaggaaactaccactcggttcctgcagaccgaagccgtgaccctgcaggacgtgagaggccgggactaccagaacgccatgcgggtgtggtccaacatccctggactgaaaagcaagcacgcacctctgacccctaaagaagaggagtacctgcaggcccaggtgcggagcagaagcaagctggacgcccctaaggtggatctgctggtgaagaattgcctcctgcccctgagagagtacttcaagtatttcagccagaatagtctgcccctgggcggcccaagcagcggcgcccctcctcccagcggcggcagcccagccggctccccaacctctaccgaggagggcacctctgagtccgccacccccgagagcggccctggcacctccaccgagcccagcgagggcagcgcacccggcagccctgccggcagccccacctccacagaggagggaaccagcaccgagcccagcgaaggcagcgccccaggcaccagcaccgagcctagtgagggcggctctggcggcggcagcgcccaggagattaaacggatcaacaagatcagaagaagacttgtgaaagacagcaacaccaagaaggccggcaagacaggccccatgaaaaccctgctggttagagtgatgacacccgatctgagagagcggctggaaaacctgagaaagaagcctgaaaatatcccccagcccatcagcaatacatctagagccaacctgaataagctgctgaccgattacaccgaaatgaagaaggcgatcctgcatgtgtactgggaagagttccagaaggaccctgtgggcctgatgagccgggtggcccagcctgccagcaagaagatcgatcagaacaagctgaaacctgagatggacgagaagggcaacctgaccaccgccggctttgcctgctctcagtgtggccagcccctgttcgtgtacaagctggagcaggtgtctgagaagggcaaggcttacaccaactacttcggacggtgcaatgtggccgagcacgaaaagctgatcctgctggcccagctgaagcccgagaaggatagcgacgaagccgtgacatatagcctgggaaagtttgggcagagggccctggatttctacagcattcatgtgaccaaggagtccacccaccccgtgaagcccctggcccagatcgccggaaacagatacgcctccggacctgtgggaaaggccctgagcgacgcatgtatgggcacaatcgcctccttcctgtctaagtaccaggacatcatcatcgaacaccagaaggtggtgaagggcaaccagaagagactggagagcctgcgggagctggccggcaaggaaaacctggaataccctagcgtgaccctgccacctcagcctcacaccaaggagggcgttgatgcctacaacgaagtgatcgcccgggtgcgaatgtgggtgaacctgaacctgtggcagaagctgaagctaagcagagatgatgccaagcctctgctgagactgaagggattcccttcctttcctctggtcgagagacaggccaacgaagtggactggtgggacatggtgtgtaacgtgaagaagctgatcaacgagaaaaaggaggatggcaaggtgttttggcagaatctggctggctacaagagacaggaagccctgagaccatacctgagcagcgaggaagatcggaagaagggaaagaaattcgctcggtaccagctgggcgacctgctgctgcacctggaaaagaagcacggcgaggactggggaaaggtgtacgacgaggcctgggagcggattgacaagaaagtggaaggcctgagcaagcacatcaagctggaagaggaacggagaagcgaggacgcccagagcaaggccgccctgaccgactggctgcgggctaaggccagcttcgtgatcgagggcctgaaggaggccgacaaggacgagttctgcagatgcgagctgaagctgcagaagtggtacggggacctgcggggaaagcccttcgccatcgaagccgagaacagcatcctggacatcagcggcttcagcaagcagtacaactgtgccttcatctggcagaaggacggcgtgaagaagctgaacctgtacctgatcatcaactacttcaagggcggcaagctgcggttcaagaagatcaaacctgaagccttcgaagccaacagattctacaccgtgatcaacaaaaagagcggcgagatcgtgcccatggaggtgaacttcaacttcgacgaccccaacctgatcatcctgcctctggcctttggcaagagacagggcagagaattcatctggaacgacctgctgtccctggaaaccggcagcctgaagctggccaacggaagagtgatcgagaagacactgtacaacagaagaacccggcaggatgagcctgccctgttcgtggccctgaccttcgagcggcgggaggtcctggactcctccaatatcaaaccaatgaacctgatcggcgtggcaagaggcgaaaacatccccgccgtgatcgccctgaccgaccccgagggctgcccactgagccggtttaaggatagcctgggaaacccaacccacatcctgagaatcggcgagagctataaggagaagcagcggaccatccaggccaagaaggaggtggagcagcggagagccggcggctacagccggaagtacgccagcaaagccaagaatctggcagacgatatggtgagaaacaccgctagagatctgctgtactacgccgtgacccaggatgccatgctgatcttcgccaacctgagccggggcttcggccggcagggcaagcggaccttcatggccgagagacagtacacacggatggaggactggctgaccgccaagctggcctacgagggcctgagcaagacctacctgtccaagacactggcccagtacacctccaagacatgcagcaactgtgggtttaccatcaccagcgccgactacgacagggtgctggagaagctgaagaagacagcaacaggctggatgaccacaattaacggcaaggagctgaaggtggagggccagattacctactacaacagatacaagagacagaacgtagtcaaggacctgtccgtcgagctggatagactgagcgaagaatctgtgaacaacgacatctcctcctggacaaagggcagaagcggagaagctctgagcctcctgaagaaaagattctcccatagacccgtgcaggagaagttcgtgtgcctgaactgcggcttcgagacacacgcagccgagcaagccgccctgaacatcgccagatcctggctgttcctgcggagccaggagtacaagaaataccagacaaacaagacaaccggcaacaccgataagagagccttcgtcgagacctggcagtccttttaccggaagaagcttaaggaggtgtggaaacctgccgtgcggtctggcggatctggcggaggctccacaagccaccaggacctggtgaccttcaaggacgtggccgtgtacttcacccagaccgagtgggccggcctgagccccgcccagaaggccctgtacaggagcgtgatgctggagaactacggcaacctgaccagcctgggctaccccgtgcccaagcccgccctgatcagcctgctggagggcggcaacctgccctggggcctggaggcccaggacaaccccagcgccgagaggaccaaggacatctgcaccagccccaagaaaaagagaaaagtctaagctgccttctgcggggcttgccttctggccatgcccttcttctctcccttgcacctgtacctcttggtctttgaataaagcctgagtaggaaggctagcaaaaaaaaaaaaaaaaaaaaaaaaaaaaaaaaaaaaaaaaaaaaaaaaaaaaaaaaaaaaaaaaaaaaaaaaaaaaaaaa

SEQ ID NO: 6517 - RNA, 5797 nt, synthetic construct
  source 1..5797: mol_type = other RNA
aggaaataagagagaaaagaagagtaagaagaaatataagagccaccatggcccctaagaagaagcgtaaagtgagccggatggaacgcctcgtctacgaggtgcggcagaagtgcagaaacatcgaggacatctgcatctcctgcggatctctgaacgtgaccctggagcacccactgttcatcggcggcatgtgccagaactgtaaaaactgttttctggagtgtgcctatcaatacgacgatgacggctaccagagctactgcaccatctgttgcggcggaagagaggtgctgatgtgtggaaataacaactgctgccggtgcttctgcgtggaatgcgtggacctgctggtgggccccggcgccgcccaggccgctattaaggaagatccttggaactgctacatgtgcggccacaagggcacatacggcctgctgagacggagagaggactggcctagcagactgcagatgttcttcgccaataaccacgaccaggagttcgacccccctaaggtgtaccctcccgtccccgccgagaagagaaagcccatccgggtcctgagcctgttcgatggcatcgccaccggtctgctggtgctgaaggacctgggcatccaggtggataggtacattgcctccgaggtgtgcgaggactccatcaccgtgggaatggtgcgtcatcagggcaagatcatgtacgtgggcgacgtgcggagcgtgacacagaagcatatccaggagtggggccctttcgacctggtgatcggcggcagcccttgcaatgacctgagcatcgtgaacccagcccggaagggcctgtacgagggaaccggcagactgttcttcgagttttacagactgctgcacgacgcccggcctaaggaaggcgacgaccggcccttcttttggctgttcgagaatgtggtggccatgggagtcagcgacaagcgggatattagccggttcctggagagcaaccccgtgatgatcgatgccaaggaagtgagcgccgcccaccgggccagatacttctggggcaatctgcctggcatgaacagacccctggccagcaccgtgaacgacaagctggagctgcaggagtgcctggagcacggccggatcgccaagttcagcaaggtgagaaccatcaccacccgaagcaacagcatcaaacaaggcaaggaccagcactttcctgtgttcatgaacgagaaggaggacatcctgtggtgtaccgagatggagagagtgttcgggttcccagtccactacacagatgtcagcaacatgtctagactggccagacagagactgctgggaagaagctggtccgtccctgtgatcagacacctgttcgcccctctgaaggagtacttcgcctgcgtgagcagcggcaacagcaacgccaacagccggggccccagcttctctagcggcctggtgccactgtccctgagagggagccacatgggccccatggagatctacaaaaccgtgagcgcctggaagcggcagcctgtgcgcgtgctgagcctgtttcggaatatcgataaagtcctgaaaagcctgggattcctggagagcggctctggctccggcggtggcaccctgaagtacgtggaggatgtgacaaacgtggtcagacgggatgtggagaagtggggccccttcgatctggtgtacggcagcacccaacccctgggcagctcttgtgaccggtgccctggctggtacatgtttcagttccaccggatcctgcagtacgccctgccgagacaggagtcccagcggccattcttttggattttcatggacaacttgctgctgaccgaggatgaccaggaaactaccactcggttcctgcagaccgaagccgtgaccctgcaggacgtgagaggccgggactaccagaacgccatgcgggtgtggtccaacatccctggactgaaaagcaagcacgcacctctgacccctaaagaagaggagtacctgcaggcccaggtgcggagcagaagcaagctggacgcccctaaggtggatctgctggtgaagaattgcctcctgcccctgagagagtacttcaagtatttcagccagaatagtctgcccctgggcggcccaagcagcggcgcccctcctcccagcggcggcagcccagccggctccccaacctctaccgaggagggcacctctgagtccgccacccccgagagcggccctggcacctccaccgagcccagcgagggcagcgcacccggcagccctgccggcagccccacctccacagaggagggaaccagcaccgagcccagcgaaggcagcgccccaggcaccagcaccgagcctagtgagggcggctctggcggcggcagcgcccaggagattaaacggatcaacaagatcagaagaagacttgtgaaagacagcaacaccaagaaggccggcaagacaggccccatgaaaaccctgctggttagagtgatgacacccgatctgagagagcggctggaaaacctgagaaagaagcctgaaaatatcccccagcccatcagcaatacatctagagccaacctgaataagctgctgaccgattacaccgaaatgaagaaggcgatcctgcatgtgtactgggaagagttccagaaggaccctgtgggcctgatgagccgggtggcccagcctgccagcaagaagatcgatcagaacaagctgaaacctgagatggacgagaagggcaacctgaccaccgccggctttgcctgctctcagtgtggccagcccctgttcgtgtacaagctggagcaggtgtctgagaagggcaaggcttacaccaactacttcggacggtgcaatgtggccgagcacgaaaagctgatcctgctggcccagctgaagcccgagaaggatagcgacgaagccgtgacatatagcctgggaaagtttgggcagagggccctggatttctacagcattcatgtgaccaaggagtccacccaccccgtgaagcccctggcccagatcgccggaaacagatacgcctccggacctgtgggaaaggccctgagcgacgcatgtatgggcacaatcgcctccttcctgtctaagtaccaggacatcatcatcgaacaccagaaggtggtgaagggcaaccagaagagactggagagcctgcgggagctggccggcaaggaaaacctggaataccctagcgtgaccctgccacctcagcctcacaccaaggagggcgttgatgcctacaacgaagtgatcgcccgggtgcgaatgtgggtgaacctgaacctgtggcagaagctgaagctaagcagagatgatgccaagcctctgctgagactgaagggattcccttcctttcctctggtcgagagacaggccaacgaagtggactggtgggacatggtgtgtaacgtgaagaagctgatcaacgagaaaaaggaggatggcaaggtgttttggcagaatctggctggctacaagagacaggaagccctgagaccatacctgagcagcgaggaagatcggaagaagggaaagaaattcgctcggtaccagctgggcgacctgctgctgcacctggaaaagaagcacggcgaggactggggaaaggtgtacgacgaggcctgggagcggattgacaagaaagtggaaggcctgagcaagcacatcaagctggaagaggaacggagaagcgaggacgcccagagcaaggccgccctgaccgactggctgcgggctaaggccagcttcgtgatcgagggcctgaaggaggccgacaaggacgagttctgcagatgcgagctgaagctgcagaagtggtacggggacctgcggggaaagcccttcgccatcgaagccgagaacagcatcctggacatcagcggcttcagcaagcagtacaactgtgccttcatctggcagaaggacggcgtgaagaagctgaacctgtacctgatcatcaactacttcaagggcggcaagctgcggttcaagaagatcaaacctgaagccttcgaagccaacagattctacaccgtgatcaacaaaaagagcggcgagatcgtgcccatggaggtgaacttcaacttcgacgaccccaacctgatcatcctgcctctggcctttggcaagagacagggcagagaattcatctggaacgacctgctgtccctggaaaccggcagcctgaagctggccaacggaagagtgatcgagaagacactgtacaacagaagaacccggcaggatgagcctgccctgttcgtggccctgaccttcgagcggcgggaggtcctggactcctccaatatcaaaccaatgaacctgatcggcgtggcaagaggcgaaaacatccccgccgtgatcgccctgaccgaccccgagggctgcccactgagccggtttaaggatagcctgggaaacccaacccacatcctgagaatcggcgagagctataaggagaagcagcggaccatccaggccaagaaggaggtggagcagcggagagccggcggctacagccggaagtacgccagcaaagccaagaatctggcagacgatatggtgagaaacaccgctagagatctgctgtactacgccgtgacccaggatgccatgctgatcttcgccaacctgagccggggcttcggccggcagggcaagcggaccttcatggccgagagacagtacacacggatggaggactggctgaccgccaagctggcctacgagggcctgagcaagacctacctgtccaagacactggcccagtacacctccaagacatgcagcaactgtgggtttaccatcaccagcgccgactacgacagggtgctggagaagctgaagaagacagcaacaggctggatgaccacaattaacggcaaggagctgaaggtggagggccagattacctactacaacagatacaagagacagaacgtagtcaaggacctgtccgtcgagctggatagactgagcgaagaatctgtgaacaacgacatctcctcctggacaaagggcagaagcggagaagctctgagcctcctgaagaaaagattctcccatagacccgtgcaggagaagttcgtgtgcctgaactgcggcttcgagacacacgcagccgagcaagccgccctgaacatcgccagatcctggctgttcctgcggagccaggagtacaagaaataccagacaaacaagacaaccggcaacaccgataagagagccttcgtcgagacctggcagtccttttaccggaagaagcttaaggaggtgtggaaacctgccgtgcggtctggcggatctggcggaggctccacaagcgtgaccttcgaggacgtggccctgtacttcagcagggacgagtggaggctgctggacgaggcccagaggaggctgtaccacgacgtgatgctgcagaacttcagcctgatcagcagcctgggctgctgctgcggcgccgaggacgccgagagccccttccagcccagcatgttcagggacgtgagccaggccaggaccctgaaggccgccagcctgagccagaagaaccacccctgcgagaagaccagccccaagaaaaagagaaaagtctaagctgccttctgcggggcttgccttctggccatgcccttcttctctcccttgcacctgtacctcttggtctttgaataaagcctgagtaggaaggctagcaaaaaaaaaaaaaaaaaaaaaaaaaaaaaaaaaaaaaaaaaaaaaaaaaaaaaaaaaaaaaaaaaaaaaaaaaaaaaaaa

SEQ ID NO: 6518 - RNA, 5797 nt, synthetic construct
  source 1..5797: mol_type = other RNA
aggaaataagagagaaaagaagagtaagaagaaatataagagccaccatggcccctaagaagaagcgtaaagtgagccggatggaacgcctcgtctacgaggtgcggcagaagtgcagaaacatcgaggacatctgcatctcctgcggatctctgaacgtgaccctggagcacccactgttcatcggcggcatgtgccagaactgtaaaaactgttttctggagtgtgcctatcaatacgacgatgacggctaccagagctactgcaccatctgttgcggcggaagagaggtgctgatgtgtggaaataacaactgctgccggtgcttctgcgtggaatgcgtggacctgctggtgggccccggcgccgcccaggccgctattaaggaagatccttggaactgctacatgtgcggccacaagggcacatacggcctgctgagacggagagaggactggcctagcagactgcagatgttcttcgccaataaccacgaccaggagttcgacccccctaaggtgtaccctcccgtccccgccgagaagagaaagcccatccgggtcctgagcctgttcgatggcatcgccaccggtctgctggtgctgaaggacctgggcatccaggtggataggtacattgcctccgaggtgtgcgaggactccatcaccgtgggaatggtgcgtcatcagggcaagatcatgtacgtgggcgacgtgcggagcgtgacacagaagcatatccaggagtggggccctttcgacctggtgatcggcggcagcccttgcaatgacctgagcatcgtgaacccagcccggaagggcctgtacgagggaaccggcagactgttcttcgagttttacagactgctgcacgacgcccggcctaaggaaggcgacgaccggcccttcttttggctgttcgagaatgtggtggccatgggagtcagcgacaagcgggatattagccggttcctggagagcaaccccgtgatgatcgatgccaaggaagtgagcgccgcccaccgggccagatacttctggggcaatctgcctggcatgaacagacccctggccagcaccgtgaacgacaagctggagctgcaggagtgcctggagcacggccggatcgccaagttcagcaaggtgagaaccatcaccacccgaagcaacagcatcaaacaaggcaaggaccagcactttcctgtgttcatgaacgagaaggaggacatcctgtggtgtaccgagatggagagagtgttcgggttcccagtccactacacagatgtcagcaacatgtctagactggccagacagagactgctgggaagaagctggtccgtccctgtgatcagacacctgttcgcccctctgaaggagtacttcgcctgcgtgagcagcggcaacagcaacgccaacagccggggccccagcttctctagcggcctggtgccactgtccctgagagggagccacatgggccccatggagatctacaaaaccgtgagcgcctggaagcggcagcctgtgcgcgtgctgagcctgtttcggaatatcgataaagtcctgaaaagcctgggattcctggagagcggctctggctccggcggtggcaccctgaagtacgtggaggatgtgacaaacgtggtcagacgggatgtggagaagtggggccccttcgatctggtgtacggcagcacccaacccctgggcagctcttgtgaccggtgccctggctggtacatgtttcagttccaccggatcctgcagtacgccctgccgagacaggagtcccagcggccattcttttggattttcatggacaacttgctgctgaccgaggatgaccaggaaactaccactcggttcctgcagaccgaagccgtgaccctgcaggacgtgagaggccgggactaccagaacgccatgcgggtgtggtccaacatccctggactgaaaagcaagcacgcacctctgacccctaaagaagaggagtacctgcaggcccaggtgcggagcagaagcaagctggacgcccctaaggtggatctgctggtgaagaattgcctcctgcccctgagagagtacttcaagtatttcagccagaatagtctgcccctgggcggcccaagcagcggcgcccctcctcccagcggcggcagcccagccggctccccaacctctaccgaggagggcacctctgagtccgccacccccgagagcggccctggcacctccaccgagcccagcgagggcagcgcacccggcagccctgccggcagccccacctccacagaggagggaaccagcaccgagcccagcgaaggcagcgccccaggcaccagcaccgagcctagtgagggcggctctggcggcggcagcgcccaggagattaaacggatcaacaagatcagaagaagacttgtgaaagacagcaacaccaagaaggccggcaagacaggccccatgaaaaccctgctggttagagtgatgacacccgatctgagagagcggctggaaaacctgagaaagaagcctgaaaatatcccccagcccatcagcaatacatctagagccaacctgaataagctgctgaccgattacaccgaaatgaagaaggcgatcctgcatgtgtactgggaagagttccagaaggaccctgtgggcctgatgagccgggtggcccagcctgccagcaagaagatcgatcagaacaagctgaaacctgagatggacgagaagggcaacctgaccaccgccggctttgcctgctctcagtgtggccagcccctgttcgtgtacaagctggagcaggtgtctgagaagggcaaggcttacaccaactacttcggacggtgcaatgtggccgagcacgaaaagctgatcctgctggcccagctgaagcccgagaaggatagcgacgaagccgtgacatatagcctgggaaagtttgggcagagggccctggatttctacagcattcatgtgaccaaggagtccacccaccccgtgaagcccctggcccagatcgccggaaacagatacgcctccggacctgtgggaaaggccctgagcgacgcatgtatgggcacaatcgcctccttcctgtctaagtaccaggacatcatcatcgaacaccagaaggtggtgaagggcaaccagaagagactggagagcctgcgggagctggccggcaaggaaaacctggaataccctagcgtgaccctgccacctcagcctcacaccaaggagggcgttgatgcctacaacgaagtgatcgcccgggtgcgaatgtgggtgaacctgaacctgtggcagaagctgaagctaagcagagatgatgccaagcctctgctgagactgaagggattcccttcctttcctctggtcgagagacaggccaacgaagtggactggtgggacatggtgtgtaacgtgaagaagctgatcaacgagaaaaaggaggatggcaaggtgttttggcagaatctggctggctacaagagacaggaagccctgagaccatacctgagcagcgaggaagatcggaagaagggaaagaaattcgctcggtaccagctgggcgacctgctgctgcacctggaaaagaagcacggcgaggactggggaaaggtgtacgacgaggcctgggagcggattgacaagaaagtggaaggcctgagcaagcacatcaagctggaagaggaacggagaagcgaggacgcccagagcaaggccgccctgaccgactggctgcgggctaaggccagcttcgtgatcgagggcctgaaggaggccgacaaggacgagttctgcagatgcgagctgaagctgcagaagtggtacggggacctgcggggaaagcccttcgccatcgaagccgagaacagcatcctggacatcagcggcttcagcaagcagtacaactgtgccttcatctggcagaaggacggcgtgaagaagctgaacctgtacctgatcatcaactacttcaagggcggcaagctgcggttcaagaagatcaaacctgaagccttcgaagccaacagattctacaccgtgatcaacaaaaagagcggcgagatcgtgcccatggaggtgaacttcaacttcgacgaccccaacctgatcatcctgcctctggcctttggcaagagacagggcagagaattcatctggaacgacctgctgtccctggaaaccggcagcctgaagctggccaacggaagagtgatcgagaagacactgtacaacagaagaacccggcaggatgagcctgccctgttcgtggccctgaccttcgagcggcgggaggtcctggactcctccaatatcaaaccaatgaacctgatcggcgtggcaagaggcgaaaacatccccgccgtgatcgccctgaccgaccccgagggctgcccactgagccggtttaaggatagcctgggaaacccaacccacatcctgagaatcggcgagagctataaggagaagcagcggaccatccaggccaagaaggaggtggagcagcggagagccggcggctacagccggaagtacgccagcaaagccaagaatctggcagacgatatggtgagaaacaccgctagagatctgctgtactacgccgtgacccaggatgccatgctgatcttcgccaacctgagccggggcttcggccggcagggcaagcggaccttcatggccgagagacagtacacacggatggaggactggctgaccgccaagctggcctacgagggcctgagcaagacctacctgtccaagacactggcccagtacacctccaagacatgcagcaactgtgggtttaccatcaccagcgccgactacgacagggtgctggagaagctgaagaagacagcaacaggctggatgaccacaattaacggcaaggagctgaaggtggagggccagattacctactacaacagatacaagagacagaacgtagtcaaggacctgtccgtcgagctggatagactgagcgaagaatctgtgaacaacgacatctcctcctggacaaagggcagaagcggagaagctctgagcctcctgaagaaaagattctcccatagacccgtgcaggagaagttcgtgtgcctgaactgcggcttcgagacacacgcagccgagcaagccgccctgaacatcgccagatcctggctgttcctgcggagccaggagtacaagaaataccagacaaacaagacaaccggcaacaccgataagagagccttcgtcgagacctggcagtccttttaccggaagaagcttaaggaggtgtggaaacctgccgtgcggtctggcggatctggcggaggctccacaagcatgcccgccaacgaggacaccccccagcccggcggccacggcagcgcctgcgaggtgagcgtgagcttcgaggacgtgaccgtggacttcagcagggaggagtggcagcagctggacagcacccagaggaggctgtaccaggacgtgatgctggagaactacagccacctgctgagcgtgggcttcgaggtgcccaagcccgaggtgatcttcaagctggagcagggcgagggcccctggaccaccagccccaagaaaaagagaaaagtctaagctgccttctgcggggcttgccttctggccatgcccttcttctctcccttgcacctgtacctcttggtctttgaataaagcctgagtaggaaggctagcaaaaaaaaaaaaaaaaaaaaaaaaaaaaaaaaaaaaaaaaaaaaaaaaaaaaaaaaaaaaaaaaaaaaaaaaaaaaaaaa

SEQ ID NO: 6519 - RNA, 5797 nt, synthetic construct
  source 1..5797: mol_type = other RNA
aggaaataagagagaaaagaagagtaagaagaaatataagagccaccatggcccctaagaagaagcgtaaagtgagccggatggaacgcctcgtctacgaggtgcggcagaagtgcagaaacatcgaggacatctgcatctcctgcggatctctgaacgtgaccctggagcacccactgttcatcggcggcatgtgccagaactgtaaaaactgttttctggagtgtgcctatcaatacgacgatgacggctaccagagctactgcaccatctgttgcggcggaagagaggtgctgatgtgtggaaataacaactgctgccggtgcttctgcgtggaatgcgtggacctgctggtgggccccggcgccgcccaggccgctattaaggaagatccttggaactgctacatgtgcggccacaagggcacatacggcctgctgagacggagagaggactggcctagcagactgcagatgttcttcgccaataaccacgaccaggagttcgacccccctaaggtgtaccctcccgtccccgccgagaagagaaagcccatccgggtcctgagcctgttcgatggcatcgccaccggtctgctggtgctgaaggacctgggcatccaggtggataggtacattgcctccgaggtgtgcgaggactccatcaccgtgggaatggtgcgtcatcagggcaagatcatgtacgtgggcgacgtgcggagcgtgacacagaagcatatccaggagtggggccctttcgacctggtgatcggcggcagcccttgcaatgacctgagcatcgtgaacccagcccggaagggcctgtacgagggaaccggcagactgttcttcgagttttacagactgctgcacgacgcccggcctaaggaaggcgacgaccggcccttcttttggctgttcgagaatgtggtggccatgggagtcagcgacaagcgggatattagccggttcctggagagcaaccccgtgatgatcgatgccaaggaagtgagcgccgcccaccgggccagatacttctggggcaatctgcctggcatgaacagacccctggccagcaccgtgaacgacaagctggagctgcaggagtgcctggagcacggccggatcgccaagttcagcaaggtgagaaccatcaccacccgaagcaacagcatcaaacaaggcaaggaccagcactttcctgtgttcatgaacgagaaggaggacatcctgtggtgtaccgagatggagagagtgttcgggttcccagtccactacacagatgtcagcaacatgtctagactggccagacagagactgctgggaagaagctggtccgtccctgtgatcagacacctgttcgcccctctgaaggagtacttcgcctgcgtgagcagcggcaacagcaacgccaacagccggggccccagcttctctagcggcctggtgccactgtccctgagagggagccacatgggccccatggagatctacaaaaccgtgagcgcctggaagcggcagcctgtgcgcgtgctgagcctgtttcggaatatcgataaagtcctgaaaagcctgggattcctggagagcggctctggctccggcggtggcaccctgaagtacgtggaggatgtgacaaacgtggtcagacgggatgtggagaagtggggccccttcgatctggtgtacggcagcacccaacccctgggcagctcttgtgaccggtgccctggctggtacatgtttcagttccaccggatcctgcagtacgccctgccgagacaggagtcccagcggccattcttttggattttcatggacaacttgctgctgaccgaggatgaccaggaaactaccactcggttcctgcagaccgaagccgtgaccctgcaggacgtgagaggccgggactaccagaacgccatgcgggtgtggtccaacatccctggactgaaaagcaagcacgcacctctgacccctaaagaagaggagtacctgcaggcccaggtgcggagcagaagcaagctggacgcccctaaggtggatctgctggtgaagaattgcctcctgcccctgagagagtacttcaagtatttcagccagaatagtctgcccctgggcggcccaagcagcggcgcccctcctcccagcggcggcagcccagccggctccccaacctctaccgaggagggcacctctgagtccgccacccccgagagcggccctggcacctccaccgagcccagcgagggcagcgcacccggcagccctgccggcagccccacctccacagaggagggaaccagcaccgagcccagcgaaggcagcgccccaggcaccagcaccgagcctagtgagggcggctctggcggcggcagcgcccaggagattaaacggatcaacaagatcagaagaagacttgtgaaagacagcaacaccaagaaggccggcaagacaggccccatgaaaaccctgctggttagagtgatgacacccgatctgagagagcggctggaaaacctgagaaagaagcctgaaaatatcccccagcccatcagcaatacatctagagccaacctgaataagctgctgaccgattacaccgaaatgaagaaggcgatcctgcatgtgtactgggaagagttccagaaggaccctgtgggcctgatgagccgggtggcccagcctgccagcaagaagatcgatcagaacaagctgaaacctgagatggacgagaagggcaacctgaccaccgccggctttgcctgctctcagtgtggccagcccctgttcgtgtacaagctggagcaggtgtctgagaagggcaaggcttacaccaactacttcggacggtgcaatgtggccgagcacgaaaagctgatcctgctggcccagctgaagcccgagaaggatagcgacgaagccgtgacatatagcctgggaaagtttgggcagagggccctggatttctacagcattcatgtgaccaaggagtccacccaccccgtgaagcccctggcccagatcgccggaaacagatacgcctccggacctgtgggaaaggccctgagcgacgcatgtatgggcacaatcgcctccttcctgtctaagtaccaggacatcatcatcgaacaccagaaggtggtgaagggcaaccagaagagactggagagcctgcgggagctggccggcaaggaaaacctggaataccctagcgtgaccctgccacctcagcctcacaccaaggagggcgttgatgcctacaacgaagtgatcgcccgggtgcgaatgtgggtgaacctgaacctgtggcagaagctgaagctaagcagagatgatgccaagcctctgctgagactgaagggattcccttcctttcctctggtcgagagacaggccaacgaagtggactggtgggacatggtgtgtaacgtgaagaagctgatcaacgagaaaaaggaggatggcaaggtgttttggcagaatctggctggctacaagagacaggaagccctgagaccatacctgagcagcgaggaagatcggaagaagggaaagaaattcgctcggtaccagctgggcgacctgctgctgcacctggaaaagaagcacggcgaggactggggaaaggtgtacgacgaggcctgggagcggattgacaagaaagtggaaggcctgagcaagcacatcaagctggaagaggaacggagaagcgaggacgcccagagcaaggccgccctgaccgactggctgcgggctaaggccagcttcgtgatcgagggcctgaaggaggccgacaaggacgagttctgcagatgcgagctgaagctgcagaagtggtacggggacctgcggggaaagcccttcgccatcgaagccgagaacagcatcctggacatcagcggcttcagcaagcagtacaactgtgccttcatctggcagaaggacggcgtgaagaagctgaacctgtacctgatcatcaactacttcaagggcggcaagctgcggttcaagaagatcaaacctgaagccttcgaagccaacagattctacaccgtgatcaacaaaaagagcggcgagatcgtgcccatggaggtgaacttcaacttcgacgaccccaacctgatcatcctgcctctggcctttggcaagagacagggcagagaattcatctggaacgacctgctgtccctggaaaccggcagcctgaagctggccaacggaagagtgatcgagaagacactgtacaacagaagaacccggcaggatgagcctgccctgttcgtggccctgaccttcgagcggcgggaggtcctggactcctccaatatcaaaccaatgaacctgatcggcgtggcaagaggcgaaaacatccccgccgtgatcgccctgaccgaccccgagggctgcccactgagccggtttaaggatagcctgggaaacccaacccacatcctgagaatcggcgagagctataaggagaagcagcggaccatccaggccaagaaggaggtggagcagcggagagccggcggctacagccggaagtacgccagcaaagccaagaatctggcagacgatatggtgagaaacaccgctagagatctgctgtactacgccgtgacccaggatgccatgctgatcttcgccaacctgagccggggcttcggccggcagggcaagcggaccttcatggccgagagacagtacacacggatggaggactggctgaccgccaagctggcctacgagggcctgagcaagacctacctgtccaagacactggcccagtacacctccaagacatgcagcaactgtgggtttaccatcaccagcgccgactacgacagggtgctggagaagctgaagaagacagcaacaggctggatgaccacaattaacggcaaggagctgaaggtggagggccagattacctactacaacagatacaagagacagaacgtagtcaaggacctgtccgtcgagctggatagactgagcgaagaatctgtgaacaacgacatctcctcctggacaaagggcagaagcggagaagctctgagcctcctgaagaaaagattctcccatagacccgtgcaggagaagttcgtgtgcctgaactgcggcttcgagacacacgcagccgagcaagccgccctgaacatcgccagatcctggctgttcctgcggagccaggagtacaagaaataccagacaaacaagacaaccggcaacaccgataagagagccttcgtcgagacctggcagtccttttaccggaagaagcttaaggaggtgtggaaacctgccgtgcggtctggcggatctggcggaggctccacaagccaggaccccagcgccgagcagctgagcgaggaggtgcccgtggtgttcgaggagctgcccgtggtgttcgaggacgtggccgtgtacttcaccagggaggagtggggcatgctggacaagaggcagaaggagctgtacagggacgtgatgaggatgaactacgagctgctggccagcctgggccccgccgccgccaagcccgacctgatcagcaagctggagaggagggccgccccctggatcaccagccccaagaaaaagagaaaagtctaagctgccttctgcggggcttgccttctggccatgcccttcttctctcccttgcacctgtacctcttggtctttgaataaagcctgagtaggaaggctagcaaaaaaaaaaaaaaaaaaaaaaaaaaaaaaaaaaaaaaaaaaaaaaaaaaaaaaaaaaaaaaaaaaaaaaaaaaaaaaaa

SEQ ID NO: 6520 - RNA, 5797 nt, synthetic construct
  source 1..5797: mol_type = other RNA
aggaaataagagagaaaagaagagtaagaagaaatataagagccaccatggcccctaagaagaagcgtaaagtgagccggatggaacgcctcgtctacgaggtgcggcagaagtgcagaaacatcgaggacatctgcatctcctgcggatctctgaacgtgaccctggagcacccactgttcatcggcggcatgtgccagaactgtaaaaactgttttctggagtgtgcctatcaatacgacgatgacggctaccagagctactgcaccatctgttgcggcggaagagaggtgctgatgtgtggaaataacaactgctgccggtgcttctgcgtggaatgcgtggacctgctggtgggccccggcgccgcccaggccgctattaaggaagatccttggaactgctacatgtgcggccacaagggcacatacggcctgctgagacggagagaggactggcctagcagactgcagatgttcttcgccaataaccacgaccaggagttcgacccccctaaggtgtaccctcccgtccccgccgagaagagaaagcccatccgggtcctgagcctgttcgatggcatcgccaccggtctgctggtgctgaaggacctgggcatccaggtggataggtacattgcctccgaggtgtgcgaggactccatcaccgtgggaatggtgcgtcatcagggcaagatcatgtacgtgggcgacgtgcggagcgtgacacagaagcatatccaggagtggggccctttcgacctggtgatcggcggcagcccttgcaatgacctgagcatcgtgaacccagcccggaagggcctgtacgagggaaccggcagactgttcttcgagttttacagactgctgcacgacgcccggcctaaggaaggcgacgaccggcccttcttttggctgttcgagaatgtggtggccatgggagtcagcgacaagcgggatattagccggttcctggagagcaaccccgtgatgatcgatgccaaggaagtgagcgccgcccaccgggccagatacttctggggcaatctgcctggcatgaacagacccctggccagcaccgtgaacgacaagctggagctgcaggagtgcctggagcacggccggatcgccaagttcagcaaggtgagaaccatcaccacccgaagcaacagcatcaaacaaggcaaggaccagcactttcctgtgttcatgaacgagaaggaggacatcctgtggtgtaccgagatggagagagtgttcgggttcccagtccactacacagatgtcagcaacatgtctagactggccagacagagactgctgggaagaagctggtccgtccctgtgatcagacacctgttcgcccctctgaaggagtacttcgcctgcgtgagcagcggcaacagcaacgccaacagccggggccccagcttctctagcggcctggtgccactgtccctgagagggagccacatgggccccatggagatctacaaaaccgtgagcgcctggaagcggcagcctgtgcgcgtgctgagcctgtttcggaatatcgataaagtcctgaaaagcctgggattcctggagagcggctctggctccggcggtggcaccctgaagtacgtggaggatgtgacaaacgtggtcagacgggatgtggagaagtggggccccttcgatctggtgtacggcagcacccaacccctgggcagctcttgtgaccggtgccctggctggtacatgtttcagttccaccggatcctgcagtacgccctgccgagacaggagtcccagcggccattcttttggattttcatggacaacttgctgctgaccgaggatgaccaggaaactaccactcggttcctgcagaccgaagccgtgaccctgcaggacgtgagaggccgggactaccagaacgccatgcgggtgtggtccaacatccctggactgaaaagcaagcacgcacctctgacccctaaagaagaggagtacctgcaggcccaggtgcggagcagaagcaagctggacgcccctaaggtggatctgctggtgaagaattgcctcctgcccctgagagagtacttcaagtatttcagccagaatagtctgcccctgggcggcccaagcagcggcgcccctcctcccagcggcggcagcccagccggctccccaacctctaccgaggagggcacctctgagtccgccacccccgagagcggccctggcacctccaccgagcccagcgagggcagcgcacccggcagccctgccggcagccccacctccacagaggagggaaccagcaccgagcccagcgaaggcagcgccccaggcaccagcaccgagcctagtgagggcggctctggcggcggcagcgcccaggagattaaacggatcaacaagatcagaagaagacttgtgaaagacagcaacaccaagaaggccggcaagacaggccccatgaaaaccctgctggttagagtgatgacacccgatctgagagagcggctggaaaacctgagaaagaagcctgaaaatatcccccagcccatcagcaatacatctagagccaacctgaataagctgctgaccgattacaccgaaatgaagaaggcgatcctgcatgtgtactgggaagagttccagaaggaccctgtgggcctgatgagccgggtggcccagcctgccagcaagaagatcgatcagaacaagctgaaacctgagatggacgagaagggcaacctgaccaccgccggctttgcctgctctcagtgtggccagcccctgttcgtgtacaagctggagcaggtgtctgagaagggcaaggcttacaccaactacttcggacggtgcaatgtggccgagcacgaaaagctgatcctgctggcccagctgaagcccgagaaggatagcgacgaagccgtgacatatagcctgggaaagtttgggcagagggccctggatttctacagcattcatgtgaccaaggagtccacccaccccgtgaagcccctggcccagatcgccggaaacagatacgcctccggacctgtgggaaaggccctgagcgacgcatgtatgggcacaatcgcctccttcctgtctaagtaccaggacatcatcatcgaacaccagaaggtggtgaagggcaaccagaagagactggagagcctgcgggagctggccggcaaggaaaacctggaataccctagcgtgaccctgccacctcagcctcacaccaaggagggcgttgatgcctacaacgaagtgatcgcccgggtgcgaatgtgggtgaacctgaacctgtggcagaagctgaagctaagcagagatgatgccaagcctctgctgagactgaagggattcccttcctttcctctggtcgagagacaggccaacgaagtggactggtgggacatggtgtgtaacgtgaagaagctgatcaacgagaaaaaggaggatggcaaggtgttttggcagaatctggctggctacaagagacaggaagccctgagaccatacctgagcagcgaggaagatcggaagaagggaaagaaattcgctcggtaccagctgggcgacctgctgctgcacctggaaaagaagcacggcgaggactggggaaaggtgtacgacgaggcctgggagcggattgacaagaaagtggaaggcctgagcaagcacatcaagctggaagaggaacggagaagcgaggacgcccagagcaaggccgccctgaccgactggctgcgggctaaggccagcttcgtgatcgagggcctgaaggaggccgacaaggacgagttctgcagatgcgagctgaagctgcagaagtggtacggggacctgcggggaaagcccttcgccatcgaagccgagaacagcatcctggacatcagcggcttcagcaagcagtacaactgtgccttcatctggcagaaggacggcgtgaagaagctgaacctgtacctgatcatcaactacttcaagggcggcaagctgcggttcaagaagatcaaacctgaagccttcgaagccaacagattctacaccgtgatcaacaaaaagagcggcgagatcgtgcccatggaggtgaacttcaacttcgacgaccccaacctgatcatcctgcctctggcctttggcaagagacagggcagagaattcatctggaacgacctgctgtccctggaaaccggcagcctgaagctggccaacggaagagtgatcgagaagacactgtacaacagaagaacccggcaggatgagcctgccctgttcgtggccctgaccttcgagcggcgggaggtcctggactcctccaatatcaaaccaatgaacctgatcggcgtggcaagaggcgaaaacatccccgccgtgatcgccctgaccgaccccgagggctgcccactgagccggtttaaggatagcctgggaaacccaacccacatcctgagaatcggcgagagctataaggagaagcagcggaccatccaggccaagaaggaggtggagcagcggagagccggcggctacagccggaagtacgccagcaaagccaagaatctggcagacgatatggtgagaaacaccgctagagatctgctgtactacgccgtgacccaggatgccatgctgatcttcgccaacctgagccggggcttcggccggcagggcaagcggaccttcatggccgagagacagtacacacggatggaggactggctgaccgccaagctggcctacgagggcctgagcaagacctacctgtccaagacactggcccagtacacctccaagacatgcagcaactgtgggtttaccatcaccagcgccgactacgacagggtgctggagaagctgaagaagacagcaacaggctggatgaccacaattaacggcaaggagctgaaggtggagggccagattacctactacaacagatacaagagacagaacgtagtcaaggacctgtccgtcgagctggatagactgagcgaagaatctgtgaacaacgacatctcctcctggacaaagggcagaagcggagaagctctgagcctcctgaagaaaagattctcccatagacccgtgcaggagaagttcgtgtgcctgaactgcggcttcgagacacacgcagccgagcaagccgccctgaacatcgccagatcctggctgttcctgcggagccaggagtacaagaaataccagacaaacaagacaaccggcaacaccgataagagagccttcgtcgagacctggcagtccttttaccggaagaagcttaaggaggtgtggaaacctgccgtgcggtctggcggatctggcggaggctccacaagcctgctgaccttcgaggacgtggccctgagcttcaccgaggaggagtggcagctgctggaccccacccagaagatcctgtacaacgacgtgatgcaggagaactacgagaccgtgatcagcctgggcctgaagctgaagaacgacaccggcaacgaccagcccatcagcctgagcaccctggagatccagggcagcggctgcaaggtgctgaggaaggccagggtgaaggtggcccagaagaccaccagccccaagaaaaagagaaaagtctaagctgccttctgcggggcttgccttctggccatgcccttcttctctcccttgcacctgtacctcttggtctttgaataaagcctgagtaggaaggctagcaaaaaaaaaaaaaaaaaaaaaaaaaaaaaaaaaaaaaaaaaaaaaaaaaaaaaaaaaaaaaaaaaaaaaaaaaaaaaaaa

SEQ ID NO: 6521 - RNA, 5797 nt, synthetic construct
  source 1..5797: mol_type = other RNA
aggaaataagagagaaaagaagagtaagaagaaatataagagccaccatggcccctaagaagaagcgtaaagtgagccggatggaacgcctcgtctacgaggtgcggcagaagtgcagaaacatcgaggacatctgcatctcctgcggatctctgaacgtgaccctggagcacccactgttcatcggcggcatgtgccagaactgtaaaaactgttttctggagtgtgcctatcaatacgacgatgacggctaccagagctactgcaccatctgttgcggcggaagagaggtgctgatgtgtggaaataacaactgctgccggtgcttctgcgtggaatgcgtggacctgctggtgggccccggcgccgcccaggccgctattaaggaagatccttggaactgctacatgtgcggccacaagggcacatacggcctgctgagacggagagaggactggcctagcagactgcagatgttcttcgccaataaccacgaccaggagttcgacccccctaaggtgtaccctcccgtccccgccgagaagagaaagcccatccgggtcctgagcctgttcgatggcatcgccaccggtctgctggtgctgaaggacctgggcatccaggtggataggtacattgcctccgaggtgtgcgaggactccatcaccgtgggaatggtgcgtcatcagggcaagatcatgtacgtgggcgacgtgcggagcgtgacacagaagcatatccaggagtggggccctttcgacctggtgatcggcggcagcccttgcaatgacctgagcatcgtgaacccagcccggaagggcctgtacgagggaaccggcagactgttcttcgagttttacagactgctgcacgacgcccggcctaaggaaggcgacgaccggcccttcttttggctgttcgagaatgtggtggccatgggagtcagcgacaagcgggatattagccggttcctggagagcaaccccgtgatgatcgatgccaaggaagtgagcgccgcccaccgggccagatacttctggggcaatctgcctggcatgaacagacccctggccagcaccgtgaacgacaagctggagctgcaggagtgcctggagcacggccggatcgccaagttcagcaaggtgagaaccatcaccacccgaagcaacagcatcaaacaaggcaaggaccagcactttcctgtgttcatgaacgagaaggaggacatcctgtggtgtaccgagatggagagagtgttcgggttcccagtccactacacagatgtcagcaacatgtctagactggccagacagagactgctgggaagaagctggtccgtccctgtgatcagacacctgttcgcccctctgaaggagtacttcgcctgcgtgagcagcggcaacagcaacgccaacagccggggccccagcttctctagcggcctggtgccactgtccctgagagggagccacatgggccccatggagatctacaaaaccgtgagcgcctggaagcggcagcctgtgcgcgtgctgagcctgtttcggaatatcgataaagtcctgaaaagcctgggattcctggagagcggctctggctccggcggtggcaccctgaagtacgtggaggatgtgacaaacgtggtcagacgggatgtggagaagtggggccccttcgatctggtgtacggcagcacccaacccctgggcagctcttgtgaccggtgccctggctggtacatgtttcagttccaccggatcctgcagtacgccctgccgagacaggagtcccagcggccattcttttggattttcatggacaacttgctgctgaccgaggatgaccaggaaactaccactcggttcctgcagaccgaagccgtgaccctgcaggacgtgagaggccgggactaccagaacgccatgcgggtgtggtccaacatccctggactgaaaagcaagcacgcacctctgacccctaaagaagaggagtacctgcaggcccaggtgcggagcagaagcaagctggacgcccctaaggtggatctgctggtgaagaattgcctcctgcccctgagagagtacttcaagtatttcagccagaatagtctgcccctgggcggcccaagcagcggcgcccctcctcccagcggcggcagcccagccggctccccaacctctaccgaggagggcacctctgagtccgccacccccgagagcggccctggcacctccaccgagcccagcgagggcagcgcacccggcagccctgccggcagccccacctccacagaggagggaaccagcaccgagcccagcgaaggcagcgccccaggcaccagcaccgagcctagtgagggcggctctggcggcggcagcgcccaggagattaaacggatcaacaagatcagaagaagacttgtgaaagacagcaacaccaagaaggccggcaagacaggccccatgaaaaccctgctggttagagtgatgacacccgatctgagagagcggctggaaaacctgagaaagaagcctgaaaatatcccccagcccatcagcaatacatctagagccaacctgaataagctgctgaccgattacaccgaaatgaagaaggcgatcctgcatgtgtactgggaagagttccagaaggaccctgtgggcctgatgagccgggtggcccagcctgccagcaagaagatcgatcagaacaagctgaaacctgagatggacgagaagggcaacctgaccaccgccggctttgcctgctctcagtgtggccagcccctgttcgtgtacaagctggagcaggtgtctgagaagggcaaggcttacaccaactacttcggacggtgcaatgtggccgagcacgaaaagctgatcctgctggcccagctgaagcccgagaaggatagcgacgaagccgtgacatatagcctgggaaagtttgggcagagggccctggatttctacagcattcatgtgaccaaggagtccacccaccccgtgaagcccctggcccagatcgccggaaacagatacgcctccggacctgtgggaaaggccctgagcgacgcatgtatgggcacaatcgcctccttcctgtctaagtaccaggacatcatcatcgaacaccagaaggtggtgaagggcaaccagaagagactggagagcctgcgggagctggccggcaaggaaaacctggaataccctagcgtgaccctgccacctcagcctcacaccaaggagggcgttgatgcctacaacgaagtgatcgcccgggtgcgaatgtgggtgaacctgaacctgtggcagaagctgaagctaagcagagatgatgccaagcctctgctgagactgaagggattcccttcctttcctctggtcgagagacaggccaacgaagtggactggtgggacatggtgtgtaacgtgaagaagctgatcaacgagaaaaaggaggatggcaaggtgttttggcagaatctggctggctacaagagacaggaagccctgagaccatacctgagcagcgaggaagatcggaagaagggaaagaaattcgctcggtaccagctgggcgacctgctgctgcacctggaaaagaagcacggcgaggactggggaaaggtgtacgacgaggcctgggagcggattgacaagaaagtggaaggcctgagcaagcacatcaagctggaagaggaacggagaagcgaggacgcccagagcaaggccgccctgaccgactggctgcgggctaaggccagcttcgtgatcgagggcctgaaggaggccgacaaggacgagttctgcagatgcgagctgaagctgcagaagtggtacggggacctgcggggaaagcccttcgccatcgaagccgagaacagcatcctggacatcagcggcttcagcaagcagtacaactgtgccttcatctggcagaaggacggcgtgaagaagctgaacctgtacctgatcatcaactacttcaagggcggcaagctgcggttcaagaagatcaaacctgaagccttcgaagccaacagattctacaccgtgatcaacaaaaagagcggcgagatcgtgcccatggaggtgaacttcaacttcgacgaccccaacctgatcatcctgcctctggcctttggcaagagacagggcagagaattcatctggaacgacctgctgtccctggaaaccggcagcctgaagctggccaacggaagagtgatcgagaagacactgtacaacagaagaacccggcaggatgagcctgccctgttcgtggccctgaccttcgagcggcgggaggtcctggactcctccaatatcaaaccaatgaacctgatcggcgtggcaagaggcgaaaacatccccgccgtgatcgccctgaccgaccccgagggctgcccactgagccggtttaaggatagcctgggaaacccaacccacatcctgagaatcggcgagagctataaggagaagcagcggaccatccaggccaagaaggaggtggagcagcggagagccggcggctacagccggaagtacgccagcaaagccaagaatctggcagacgatatggtgagaaacaccgctagagatctgctgtactacgccgtgacccaggatgccatgctgatcttcgccaacctgagccggggcttcggccggcagggcaagcggaccttcatggccgagagacagtacacacggatggaggactggctgaccgccaagctggcctacgagggcctgagcaagacctacctgtccaagacactggcccagtacacctccaagacatgcagcaactgtgggtttaccatcaccagcgccgactacgacagggtgctggagaagctgaagaagacagcaacaggctggatgaccacaattaacggcaaggagctgaaggtggagggccagattacctactacaacagatacaagagacagaacgtagtcaaggacctgtccgtcgagctggatagactgagcgaagaatctgtgaacaacgacatctcctcctggacaaagggcagaagcggagaagctctgagcctcctgaagaaaagattctcccatagacccgtgcaggagaagttcgtgtgcctgaactgcggcttcgagacacacgcagccgagcaagccgccctgaacatcgccagatcctggctgttcctgcggagccaggagtacaagaaataccagacaaacaagacaaccggcaacaccgataagagagccttcgtcgagacctggcagtccttttaccggaagaagcttaaggaggtgtggaaacctgccgtgcggtctggcggatctggcggaggctccacaagcagggccgaggaggccgtgaccttcaaggacgtggccgtggtgttcaccgaggaggagctgcagctgctggacctggcccagaggaagctgtacagggacgtgatgctggagaacttcaggaacctgctgagcgtgggccaccagcccttccacggcgacaccttccacttcctgagggaggagaagttctgggtgatggagaccaccagccagagggagggcaacagcggcggcaagatccagaccagccccaagaaaaagagaaaagtctaagctgccttctgcggggcttgccttctggccatgcccttcttctctcccttgcacctgtacctcttggtctttgaataaagcctgagtaggaaggctagcaaaaaaaaaaaaaaaaaaaaaaaaaaaaaaaaaaaaaaaaaaaaaaaaaaaaaaaaaaaaaaaaaaaaaaaaaaaaaaaa

SEQ ID NO: 6522 - RNA, 5797 nt, synthetic construct
  source 1..5797: mol_type = other RNA
aggaaataagagagaaaagaagagtaagaagaaatataagagccaccatggcccctaagaagaagcgtaaagtgagccggatggaacgcctcgtctacgaggtgcggcagaagtgcagaaacatcgaggacatctgcatctcctgcggatctctgaacgtgaccctggagcacccactgttcatcggcggcatgtgccagaactgtaaaaactgttttctggagtgtgcctatcaatacgacgatgacggctaccagagctactgcaccatctgttgcggcggaagagaggtgctgatgtgtggaaataacaactgctgccggtgcttctgcgtggaatgcgtggacctgctggtgggccccggcgccgcccaggccgctattaaggaagatccttggaactgctacatgtgcggccacaagggcacatacggcctgctgagacggagagaggactggcctagcagactgcagatgttcttcgccaataaccacgaccaggagttcgacccccctaaggtgtaccctcccgtccccgccgagaagagaaagcccatccgggtcctgagcctgttcgatggcatcgccaccggtctgctggtgctgaaggacctgggcatccaggtggataggtacattgcctccgaggtgtgcgaggactccatcaccgtgggaatggtgcgtcatcagggcaagatcatgtacgtgggcgacgtgcggagcgtgacacagaagcatatccaggagtggggccctttcgacctggtgatcggcggcagcccttgcaatgacctgagcatcgtgaacccagcccggaagggcctgtacgagggaaccggcagactgttcttcgagttttacagactgctgcacgacgcccggcctaaggaaggcgacgaccggcccttcttttggctgttcgagaatgtggtggccatgggagtcagcgacaagcgggatattagccggttcctggagagcaaccccgtgatgatcgatgccaaggaagtgagcgccgcccaccgggccagatacttctggggcaatctgcctggcatgaacagacccctggccagcaccgtgaacgacaagctggagctgcaggagtgcctggagcacggccggatcgccaagttcagcaaggtgagaaccatcaccacccgaagcaacagcatcaaacaaggcaaggaccagcactttcctgtgttcatgaacgagaaggaggacatcctgtggtgtaccgagatggagagagtgttcgggttcccagtccactacacagatgtcagcaacatgtctagactggccagacagagactgctgggaagaagctggtccgtccctgtgatcagacacctgttcgcccctctgaaggagtacttcgcctgcgtgagcagcggcaacagcaacgccaacagccggggccccagcttctctagcggcctggtgccactgtccctgagagggagccacatgggccccatggagatctacaaaaccgtgagcgcctggaagcggcagcctgtgcgcgtgctgagcctgtttcggaatatcgataaagtcctgaaaagcctgggattcctggagagcggctctggctccggcggtggcaccctgaagtacgtggaggatgtgacaaacgtggtcagacgggatgtggagaagtggggccccttcgatctggtgtacggcagcacccaacccctgggcagctcttgtgaccggtgccctggctggtacatgtttcagttccaccggatcctgcagtacgccctgccgagacaggagtcccagcggccattcttttggattttcatggacaacttgctgctgaccgaggatgaccaggaaactaccactcggttcctgcagaccgaagccgtgaccctgcaggacgtgagaggccgggactaccagaacgccatgcgggtgtggtccaacatccctggactgaaaagcaagcacgcacctctgacccctaaagaagaggagtacctgcaggcccaggtgcggagcagaagcaagctggacgcccctaaggtggatctgctggtgaagaattgcctcctgcccctgagagagtacttcaagtatttcagccagaatagtctgcccctgggcggcccaagcagcggcgcccctcctcccagcggcggcagcccagccggctccccaacctctaccgaggagggcacctctgagtccgccacccccgagagcggccctggcacctccaccgagcccagcgagggcagcgcacccggcagccctgccggcagccccacctccacagaggagggaaccagcaccgagcccagcgaaggcagcgccccaggcaccagcaccgagcctagtgagggcggctctggcggcggcagcgcccaggagattaaacggatcaacaagatcagaagaagacttgtgaaagacagcaacaccaagaaggccggcaagacaggccccatgaaaaccctgctggttagagtgatgacacccgatctgagagagcggctggaaaacctgagaaagaagcctgaaaatatcccccagcccatcagcaatacatctagagccaacctgaataagctgctgaccgattacaccgaaatgaagaaggcgatcctgcatgtgtactgggaagagttccagaaggaccctgtgggcctgatgagccgggtggcccagcctgccagcaagaagatcgatcagaacaagctgaaacctgagatggacgagaagggcaacctgaccaccgccggctttgcctgctctcagtgtggccagcccctgttcgtgtacaagctggagcaggtgtctgagaagggcaaggcttacaccaactacttcggacggtgcaatgtggccgagcacgaaaagctgatcctgctggcccagctgaagcccgagaaggatagcgacgaagccgtgacatatagcctgggaaagtttgggcagagggccctggatttctacagcattcatgtgaccaaggagtccacccaccccgtgaagcccctggcccagatcgccggaaacagatacgcctccggacctgtgggaaaggccctgagcgacgcatgtatgggcacaatcgcctccttcctgtctaagtaccaggacatcatcatcgaacaccagaaggtggtgaagggcaaccagaagagactggagagcctgcgggagctggccggcaaggaaaacctggaataccctagcgtgaccctgccacctcagcctcacaccaaggagggcgttgatgcctacaacgaagtgatcgcccgggtgcgaatgtgggtgaacctgaacctgtggcagaagctgaagctaagcagagatgatgccaagcctctgctgagactgaagggattcccttcctttcctctggtcgagagacaggccaacgaagtggactggtgggacatggtgtgtaacgtgaagaagctgatcaacgagaaaaaggaggatggcaaggtgttttggcagaatctggctggctacaagagacaggaagccctgagaccatacctgagcagcgaggaagatcggaagaagggaaagaaattcgctcggtaccagctgggcgacctgctgctgcacctggaaaagaagcacggcgaggactggggaaaggtgtacgacgaggcctgggagcggattgacaagaaagtggaaggcctgagcaagcacatcaagctggaagaggaacggagaagcgaggacgcccagagcaaggccgccctgaccgactggctgcgggctaaggccagcttcgtgatcgagggcctgaaggaggccgacaaggacgagttctgcagatgcgagctgaagctgcagaagtggtacggggacctgcggggaaagcccttcgccatcgaagccgagaacagcatcctggacatcagcggcttcagcaagcagtacaactgtgccttcatctggcagaaggacggcgtgaagaagctgaacctgtacctgatcatcaactacttcaagggcggcaagctgcggttcaagaagatcaaacctgaagccttcgaagccaacagattctacaccgtgatcaacaaaaagagcggcgagatcgtgcccatggaggtgaacttcaacttcgacgaccccaacctgatcatcctgcctctggcctttggcaagagacagggcagagaattcatctggaacgacctgctgtccctggaaaccggcagcctgaagctggccaacggaagagtgatcgagaagacactgtacaacagaagaacccggcaggatgagcctgccctgttcgtggccctgaccttcgagcggcgggaggtcctggactcctccaatatcaaaccaatgaacctgatcggcgtggcaagaggcgaaaacatccccgccgtgatcgccctgaccgaccccgagggctgcccactgagccggtttaaggatagcctgggaaacccaacccacatcctgagaatcggcgagagctataaggagaagcagcggaccatccaggccaagaaggaggtggagcagcggagagccggcggctacagccggaagtacgccagcaaagccaagaatctggcagacgatatggtgagaaacaccgctagagatctgctgtactacgccgtgacccaggatgccatgctgatcttcgccaacctgagccggggcttcggccggcagggcaagcggaccttcatggccgagagacagtacacacggatggaggactggctgaccgccaagctggcctacgagggcctgagcaagacctacctgtccaagacactggcccagtacacctccaagacatgcagcaactgtgggtttaccatcaccagcgccgactacgacagggtgctggagaagctgaagaagacagcaacaggctggatgaccacaattaacggcaaggagctgaaggtggagggccagattacctactacaacagatacaagagacagaacgtagtcaaggacctgtccgtcgagctggatagactgagcgaagaatctgtgaacaacgacatctcctcctggacaaagggcagaagcggagaagctctgagcctcctgaagaaaagattctcccatagacccgtgcaggagaagttcgtgtgcctgaactgcggcttcgagacacacgcagccgagcaagccgccctgaacatcgccagatcctggctgttcctgcggagccaggagtacaagaaataccagacaaacaagacaaccggcaacaccgataagagagccttcgtcgagacctggcagtccttttaccggaagaagcttaaggaggtgtggaaacctgccgtgcggtctggcggatctggcggaggctccacaagcatgttcccccccgccaggggcaaggagctgctgagcttcgaggacgtggccatgtacttcaccagggaggagtggggccacctgagctggggccagaaggacctgtacagggacgtgatgctggagaactacaggaacatggtgctgctgggcttccagttccccaagcccgaggtgatctgccagctggagaactgggacgagcagtggatcctggacctgcccagggccggcaacaggaagaccagccccaagaaaaagagaaaagtctaagctgccttctgcggggcttgccttctggccatgcccttcttctctcccttgcacctgtacctcttggtctttgaataaagcctgagtaggaaggctagcaaaaaaaaaaaaaaaaaaaaaaaaaaaaaaaaaaaaaaaaaaaaaaaaaaaaaaaaaaaaaaaaaaaaaaaaaaaaaaaa

SEQ ID NO: 6523 - RNA, 5797 nt, synthetic construct
  source 1..5797: mol_type = other RNA
aggaaataagagagaaaagaagagtaagaagaaatataagagccaccatggcccctaagaagaagcgtaaagtgagccggatggaacgcctcgtctacgaggtgcggcagaagtgcagaaacatcgaggacatctgcatctcctgcggatctctgaacgtgaccctggagcacccactgttcatcggcggcatgtgccagaactgtaaaaactgttttctggagtgtgcctatcaatacgacgatgacggctaccagagctactgcaccatctgttgcggcggaagagaggtgctgatgtgtggaaataacaactgctgccggtgcttctgcgtggaatgcgtggacctgctggtgggccccggcgccgcccaggccgctattaaggaagatccttggaactgctacatgtgcggccacaagggcacatacggcctgctgagacggagagaggactggcctagcagactgcagatgttcttcgccaataaccacgaccaggagttcgacccccctaaggtgtaccctcccgtccccgccgagaagagaaagcccatccgggtcctgagcctgttcgatggcatcgccaccggtctgctggtgctgaaggacctgggcatccaggtggataggtacattgcctccgaggtgtgcgaggactccatcaccgtgggaatggtgcgtcatcagggcaagatcatgtacgtgggcgacgtgcggagcgtgacacagaagcatatccaggagtggggccctttcgacctggtgatcggcggcagcccttgcaatgacctgagcatcgtgaacccagcccggaagggcctgtacgagggaaccggcagactgttcttcgagttttacagactgctgcacgacgcccggcctaaggaaggcgacgaccggcccttcttttggctgttcgagaatgtggtggccatgggagtcagcgacaagcgggatattagccggttcctggagagcaaccccgtgatgatcgatgccaaggaagtgagcgccgcccaccgggccagatacttctggggcaatctgcctggcatgaacagacccctggccagcaccgtgaacgacaagctggagctgcaggagtgcctggagcacggccggatcgccaagttcagcaaggtgagaaccatcaccacccgaagcaacagcatcaaacaaggcaaggaccagcactttcctgtgttcatgaacgagaaggaggacatcctgtggtgtaccgagatggagagagtgttcgggttcccagtccactacacagatgtcagcaacatgtctagactggccagacagagactgctgggaagaagctggtccgtccctgtgatcagacacctgttcgcccctctgaaggagtacttcgcctgcgtgagcagcggcaacagcaacgccaacagccggggccccagcttctctagcggcctggtgccactgtccctgagagggagccacatgggccccatggagatctacaaaaccgtgagcgcctggaagcggcagcctgtgcgcgtgctgagcctgtttcggaatatcgataaagtcctgaaaagcctgggattcctggagagcggctctggctccggcggtggcaccctgaagtacgtggaggatgtgacaaacgtggtcagacgggatgtggagaagtggggccccttcgatctggtgtacggcagcacccaacccctgggcagctcttgtgaccggtgccctggctggtacatgtttcagttccaccggatcctgcagtacgccctgccgagacaggagtcccagcggccattcttttggattttcatggacaacttgctgctgaccgaggatgaccaggaaactaccactcggttcctgcagaccgaagccgtgaccctgcaggacgtgagaggccgggactaccagaacgccatgcgggtgtggtccaacatccctggactgaaaagcaagcacgcacctctgacccctaaagaagaggagtacctgcaggcccaggtgcggagcagaagcaagctggacgcccctaaggtggatctgctggtgaagaattgcctcctgcccctgagagagtacttcaagtatttcagccagaatagtctgcccctgggcggcccaagcagcggcgcccctcctcccagcggcggcagcccagccggctccccaacctctaccgaggagggcacctctgagtccgccacccccgagagcggccctggcacctccaccgagcccagcgagggcagcgcacccggcagccctgccggcagccccacctccacagaggagggaaccagcaccgagcccagcgaaggcagcgccccaggcaccagcaccgagcctagtgagggcggctctggcggcggcagcgcccaggagattaaacggatcaacaagatcagaagaagacttgtgaaagacagcaacaccaagaaggccggcaagacaggccccatgaaaaccctgctggttagagtgatgacacccgatctgagagagcggctggaaaacctgagaaagaagcctgaaaatatcccccagcccatcagcaatacatctagagccaacctgaataagctgctgaccgattacaccgaaatgaagaaggcgatcctgcatgtgtactgggaagagttccagaaggaccctgtgggcctgatgagccgggtggcccagcctgccagcaagaagatcgatcagaacaagctgaaacctgagatggacgagaagggcaacctgaccaccgccggctttgcctgctctcagtgtggccagcccctgttcgtgtacaagctggagcaggtgtctgagaagggcaaggcttacaccaactacttcggacggtgcaatgtggccgagcacgaaaagctgatcctgctggcccagctgaagcccgagaaggatagcgacgaagccgtgacatatagcctgggaaagtttgggcagagggccctggatttctacagcattcatgtgaccaaggagtccacccaccccgtgaagcccctggcccagatcgccggaaacagatacgcctccggacctgtgggaaaggccctgagcgacgcatgtatgggcacaatcgcctccttcctgtctaagtaccaggacatcatcatcgaacaccagaaggtggtgaagggcaaccagaagagactggagagcctgcgggagctggccggcaaggaaaacctggaataccctagcgtgaccctgccacctcagcctcacaccaaggagggcgttgatgcctacaacgaagtgatcgcccgggtgcgaatgtgggtgaacctgaacctgtggcagaagctgaagctaagcagagatgatgccaagcctctgctgagactgaagggattcccttcctttcctctggtcgagagacaggccaacgaagtggactggtgggacatggtgtgtaacgtgaagaagctgatcaacgagaaaaaggaggatggcaaggtgttttggcagaatctggctggctacaagagacaggaagccctgagaccatacctgagcagcgaggaagatcggaagaagggaaagaaattcgctcggtaccagctgggcgacctgctgctgcacctggaaaagaagcacggcgaggactggggaaaggtgtacgacgaggcctgggagcggattgacaagaaagtggaaggcctgagcaagcacatcaagctggaagaggaacggagaagcgaggacgcccagagcaaggccgccctgaccgactggctgcgggctaaggccagcttcgtgatcgagggcctgaaggaggccgacaaggacgagttctgcagatgcgagctgaagctgcagaagtggtacggggacctgcggggaaagcccttcgccatcgaagccgagaacagcatcctggacatcagcggcttcagcaagcagtacaactgtgccttcatctggcagaaggacggcgtgaagaagctgaacctgtacctgatcatcaactacttcaagggcggcaagctgcggttcaagaagatcaaacctgaagccttcgaagccaacagattctacaccgtgatcaacaaaaagagcggcgagatcgtgcccatggaggtgaacttcaacttcgacgaccccaacctgatcatcctgcctctggcctttggcaagagacagggcagagaattcatctggaacgacctgctgtccctggaaaccggcagcctgaagctggccaacggaagagtgatcgagaagacactgtacaacagaagaacccggcaggatgagcctgccctgttcgtggccctgaccttcgagcggcgggaggtcctggactcctccaatatcaaaccaatgaacctgatcggcgtggcaagaggcgaaaacatccccgccgtgatcgccctgaccgaccccgagggctgcccactgagccggtttaaggatagcctgggaaacccaacccacatcctgagaatcggcgagagctataaggagaagcagcggaccatccaggccaagaaggaggtggagcagcggagagccggcggctacagccggaagtacgccagcaaagccaagaatctggcagacgatatggtgagaaacaccgctagagatctgctgtactacgccgtgacccaggatgccatgctgatcttcgccaacctgagccggggcttcggccggcagggcaagcggaccttcatggccgagagacagtacacacggatggaggactggctgaccgccaagctggcctacgagggcctgagcaagacctacctgtccaagacactggcccagtacacctccaagacatgcagcaactgtgggtttaccatcaccagcgccgactacgacagggtgctggagaagctgaagaagacagcaacaggctggatgaccacaattaacggcaaggagctgaaggtggagggccagattacctactacaacagatacaagagacagaacgtagtcaaggacctgtccgtcgagctggatagactgagcgaagaatctgtgaacaacgacatctcctcctggacaaagggcagaagcggagaagctctgagcctcctgaagaaaagattctcccatagacccgtgcaggagaagttcgtgtgcctgaactgcggcttcgagacacacgcagccgagcaagccgccctgaacatcgccagatcctggctgttcctgcggagccaggagtacaagaaataccagacaaacaagacaaccggcaacaccgataagagagccttcgtcgagacctggcagtccttttaccggaagaagcttaaggaggtgtggaaacctgccgtgcggtctggcggatctggcggaggctccacaagcatgaacgtggaggtggtgaaggtgatgccccaggacctggtgaccttcaaggacgtggccatcgacttcagccaggaggagtggcagtggatgaaccccgcccagaagcacctgtacaggagcatgatgctggagaactaccagagcctggtgagcctgggcctgtgcatcagcaagccctgcgtgatcagcctgctggagcagggcagggagccctgggagatgaccagcgagatgaccaggaccagccccaagaaaaagagaaaagtctaagctgccttctgcggggcttgccttctggccatgcccttcttctctcccttgcacctgtacctcttggtctttgaataaagcctgagtaggaaggctagcaaaaaaaaaaaaaaaaaaaaaaaaaaaaaaaaaaaaaaaaaaaaaaaaaaaaaaaaaaaaaaaaaaaaaaaaaaaaaaaa

SEQ ID NO: 6524 - RNA, 5797 nt, synthetic construct
  source 1..5797: mol_type = other RNA
aggaaataagagagaaaagaagagtaagaagaaatataagagccaccatggcccctaagaagaagcgtaaagtgagccggatggaacgcctcgtctacgaggtgcggcagaagtgcagaaacatcgaggacatctgcatctcctgcggatctctgaacgtgaccctggagcacccactgttcatcggcggcatgtgccagaactgtaaaaactgttttctggagtgtgcctatcaatacgacgatgacggctaccagagctactgcaccatctgttgcggcggaagagaggtgctgatgtgtggaaataacaactgctgccggtgcttctgcgtggaatgcgtggacctgctggtgggccccggcgccgcccaggccgctattaaggaagatccttggaactgctacatgtgcggccacaagggcacatacggcctgctgagacggagagaggactggcctagcagactgcagatgttcttcgccaataaccacgaccaggagttcgacccccctaaggtgtaccctcccgtccccgccgagaagagaaagcccatccgggtcctgagcctgttcgatggcatcgccaccggtctgctggtgctgaaggacctgggcatccaggtggataggtacattgcctccgaggtgtgcgaggactccatcaccgtgggaatggtgcgtcatcagggcaagatcatgtacgtgggcgacgtgcggagcgtgacacagaagcatatccaggagtggggccctttcgacctggtgatcggcggcagcccttgcaatgacctgagcatcgtgaacccagcccggaagggcctgtacgagggaaccggcagactgttcttcgagttttacagactgctgcacgacgcccggcctaaggaaggcgacgaccggcccttcttttggctgttcgagaatgtggtggccatgggagtcagcgacaagcgggatattagccggttcctggagagcaaccccgtgatgatcgatgccaaggaagtgagcgccgcccaccgggccagatacttctggggcaatctgcctggcatgaacagacccctggccagcaccgtgaacgacaagctggagctgcaggagtgcctggagcacggccggatcgccaagttcagcaaggtgagaaccatcaccacccgaagcaacagcatcaaacaaggcaaggaccagcactttcctgtgttcatgaacgagaaggaggacatcctgtggtgtaccgagatggagagagtgttcgggttcccagtccactacacagatgtcagcaacatgtctagactggccagacagagactgctgggaagaagctggtccgtccctgtgatcagacacctgttcgcccctctgaaggagtacttcgcctgcgtgagcagcggcaacagcaacgccaacagccggggccccagcttctctagcggcctggtgccactgtccctgagagggagccacatgggccccatggagatctacaaaaccgtgagcgcctggaagcggcagcctgtgcgcgtgctgagcctgtttcggaatatcgataaagtcctgaaaagcctgggattcctggagagcggctctggctccggcggtggcaccctgaagtacgtggaggatgtgacaaacgtggtcagacgggatgtggagaagtggggccccttcgatctggtgtacggcagcacccaacccctgggcagctcttgtgaccggtgccctggctggtacatgtttcagttccaccggatcctgcagtacgccctgccgagacaggagtcccagcggccattcttttggattttcatggacaacttgctgctgaccgaggatgaccaggaaactaccactcggttcctgcagaccgaagccgtgaccctgcaggacgtgagaggccgggactaccagaacgccatgcgggtgtggtccaacatccctggactgaaaagcaagcacgcacctctgacccctaaagaagaggagtacctgcaggcccaggtgcggagcagaagcaagctggacgcccctaaggtggatctgctggtgaagaattgcctcctgcccctgagagagtacttcaagtatttcagccagaatagtctgcccctgggcggcccaagcagcggcgcccctcctcccagcggcggcagcccagccggctccccaacctctaccgaggagggcacctctgagtccgccacccccgagagcggccctggcacctccaccgagcccagcgagggcagcgcacccggcagccctgccggcagccccacctccacagaggagggaaccagcaccgagcccagcgaaggcagcgccccaggcaccagcaccgagcctagtgagggcggctctggcggcggcagcgcccaggagattaaacggatcaacaagatcagaagaagacttgtgaaagacagcaacaccaagaaggccggcaagacaggccccatgaaaaccctgctggttagagtgatgacacccgatctgagagagcggctggaaaacctgagaaagaagcctgaaaatatcccccagcccatcagcaatacatctagagccaacctgaataagctgctgaccgattacaccgaaatgaagaaggcgatcctgcatgtgtactgggaagagttccagaaggaccctgtgggcctgatgagccgggtggcccagcctgccagcaagaagatcgatcagaacaagctgaaacctgagatggacgagaagggcaacctgaccaccgccggctttgcctgctctcagtgtggccagcccctgttcgtgtacaagctggagcaggtgtctgagaagggcaaggcttacaccaactacttcggacggtgcaatgtggccgagcacgaaaagctgatcctgctggcccagctgaagcccgagaaggatagcgacgaagccgtgacatatagcctgggaaagtttgggcagagggccctggatttctacagcattcatgtgaccaaggagtccacccaccccgtgaagcccctggcccagatcgccggaaacagatacgcctccggacctgtgggaaaggccctgagcgacgcatgtatgggcacaatcgcctccttcctgtctaagtaccaggacatcatcatcgaacaccagaaggtggtgaagggcaaccagaagagactggagagcctgcgggagctggccggcaaggaaaacctggaataccctagcgtgaccctgccacctcagcctcacaccaaggagggcgttgatgcctacaacgaagtgatcgcccgggtgcgaatgtgggtgaacctgaacctgtggcagaagctgaagctaagcagagatgatgccaagcctctgctgagactgaagggattcccttcctttcctctggtcgagagacaggccaacgaagtggactggtgggacatggtgtgtaacgtgaagaagctgatcaacgagaaaaaggaggatggcaaggtgttttggcagaatctggctggctacaagagacaggaagccctgagaccatacctgagcagcgaggaagatcggaagaagggaaagaaattcgctcggtaccagctgggcgacctgctgctgcacctggaaaagaagcacggcgaggactggggaaaggtgtacgacgaggcctgggagcggattgacaagaaagtggaaggcctgagcaagcacatcaagctggaagaggaacggagaagcgaggacgcccagagcaaggccgccctgaccgactggctgcgggctaaggccagcttcgtgatcgagggcctgaaggaggccgacaaggacgagttctgcagatgcgagctgaagctgcagaagtggtacggggacctgcggggaaagcccttcgccatcgaagccgagaacagcatcctggacatcagcggcttcagcaagcagtacaactgtgccttcatctggcagaaggacggcgtgaagaagctgaacctgtacctgatcatcaactacttcaagggcggcaagctgcggttcaagaagatcaaacctgaagccttcgaagccaacagattctacaccgtgatcaacaaaaagagcggcgagatcgtgcccatggaggtgaacttcaacttcgacgaccccaacctgatcatcctgcctctggcctttggcaagagacagggcagagaattcatctggaacgacctgctgtccctggaaaccggcagcctgaagctggccaacggaagagtgatcgagaagacactgtacaacagaagaacccggcaggatgagcctgccctgttcgtggccctgaccttcgagcggcgggaggtcctggactcctccaatatcaaaccaatgaacctgatcggcgtggcaagaggcgaaaacatccccgccgtgatcgccctgaccgaccccgagggctgcccactgagccggtttaaggatagcctgggaaacccaacccacatcctgagaatcggcgagagctataaggagaagcagcggaccatccaggccaagaaggaggtggagcagcggagagccggcggctacagccggaagtacgccagcaaagccaagaatctggcagacgatatggtgagaaacaccgctagagatctgctgtactacgccgtgacccaggatgccatgctgatcttcgccaacctgagccggggcttcggccggcagggcaagcggaccttcatggccgagagacagtacacacggatggaggactggctgaccgccaagctggcctacgagggcctgagcaagacctacctgtccaagacactggcccagtacacctccaagacatgcagcaactgtgggtttaccatcaccagcgccgactacgacagggtgctggagaagctgaagaagacagcaacaggctggatgaccacaattaacggcaaggagctgaaggtggagggccagattacctactacaacagatacaagagacagaacgtagtcaaggacctgtccgtcgagctggatagactgagcgaagaatctgtgaacaacgacatctcctcctggacaaagggcagaagcggagaagctctgagcctcctgaagaaaagattctcccatagacccgtgcaggagaagttcgtgtgcctgaactgcggcttcgagacacacgcagccgagcaagccgccctgaacatcgccagatcctggctgttcctgcggagccaggagtacaagaaataccagacaaacaagacaaccggcaacaccgataagagagccttcgtcgagacctggcagtccttttaccggaagaagcttaaggaggtgtggaaacctgccgtgcggtctggcggatctggcggaggctccacaagcaagcccgccgccgtgaggttcgccgacgtggccgtgtacttcagccccgaggagtggggctgcctgaggcccgcccagaggaccctgtacagggacgtgatgagggagacctacggccacctgggcgccctgggcttccccggccccaagcccgccctgatcagctggatggagcaggagagcgaggtgtggagccccgccgcccaggaccccgaggagggcgagagcctgggcggcgccaggaccagccccaagaaaaagagaaaagtctaagctgccttctgcggggcttgccttctggccatgcccttcttctctcccttgcacctgtacctcttggtctttgaataaagcctgagtaggaaggctagcaaaaaaaaaaaaaaaaaaaaaaaaaaaaaaaaaaaaaaaaaaaaaaaaaaaaaaaaaaaaaaaaaaaaaaaaaaaaaaaa

SEQ ID NO: 6525 - RNA, 5797 nt, synthetic construct
  source 1..5797: mol_type = other RNA
aggaaataagagagaaaagaagagtaagaagaaatataagagccaccatggcccctaagaagaagcgtaaagtgagccggatggaacgcctcgtctacgaggtgcggcagaagtgcagaaacatcgaggacatctgcatctcctgcggatctctgaacgtgaccctggagcacccactgttcatcggcggcatgtgccagaactgtaaaaactgttttctggagtgtgcctatcaatacgacgatgacggctaccagagctactgcaccatctgttgcggcggaagagaggtgctgatgtgtggaaataacaactgctgccggtgcttctgcgtggaatgcgtggacctgctggtgggccccggcgccgcccaggccgctattaaggaagatccttggaactgctacatgtgcggccacaagggcacatacggcctgctgagacggagagaggactggcctagcagactgcagatgttcttcgccaataaccacgaccaggagttcgacccccctaaggtgtaccctcccgtccccgccgagaagagaaagcccatccgggtcctgagcctgttcgatggcatcgccaccggtctgctggtgctgaaggacctgggcatccaggtggataggtacattgcctccgaggtgtgcgaggactccatcaccgtgggaatggtgcgtcatcagggcaagatcatgtacgtgggcgacgtgcggagcgtgacacagaagcatatccaggagtggggccctttcgacctggtgatcggcggcagcccttgcaatgacctgagcatcgtgaacccagcccggaagggcctgtacgagggaaccggcagactgttcttcgagttttacagactgctgcacgacgcccggcctaaggaaggcgacgaccggcccttcttttggctgttcgagaatgtggtggccatgggagtcagcgacaagcgggatattagccggttcctggagagcaaccccgtgatgatcgatgccaaggaagtgagcgccgcccaccgggccagatacttctggggcaatctgcctggcatgaacagacccctggccagcaccgtgaacgacaagctggagctgcaggagtgcctggagcacggccggatcgccaagttcagcaaggtgagaaccatcaccacccgaagcaacagcatcaaacaaggcaaggaccagcactttcctgtgttcatgaacgagaaggaggacatcctgtggtgtaccgagatggagagagtgttcgggttcccagtccactacacagatgtcagcaacatgtctagactggccagacagagactgctgggaagaagctggtccgtccctgtgatcagacacctgttcgcccctctgaaggagtacttcgcctgcgtgagcagcggcaacagcaacgccaacagccggggccccagcttctctagcggcctggtgccactgtccctgagagggagccacatgggccccatggagatctacaaaaccgtgagcgcctggaagcggcagcctgtgcgcgtgctgagcctgtttcggaatatcgataaagtcctgaaaagcctgggattcctggagagcggctctggctccggcggtggcaccctgaagtacgtggaggatgtgacaaacgtggtcagacgggatgtggagaagtggggccccttcgatctggtgtacggcagcacccaacccctgggcagctcttgtgaccggtgccctggctggtacatgtttcagttccaccggatcctgcagtacgccctgccgagacaggagtcccagcggccattcttttggattttcatggacaacttgctgctgaccgaggatgaccaggaaactaccactcggttcctgcagaccgaagccgtgaccctgcaggacgtgagaggccgggactaccagaacgccatgcgggtgtggtccaacatccctggactgaaaagcaagcacgcacctctgacccctaaagaagaggagtacctgcaggcccaggtgcggagcagaagcaagctggacgcccctaaggtggatctgctggtgaagaattgcctcctgcccctgagagagtacttcaagtatttcagccagaatagtctgcccctgggcggcccaagcagcggcgcccctcctcccagcggcggcagcccagccggctccccaacctctaccgaggagggcacctctgagtccgccacccccgagagcggccctggcacctccaccgagcccagcgagggcagcgcacccggcagccctgccggcagccccacctccacagaggagggaaccagcaccgagcccagcgaaggcagcgccccaggcaccagcaccgagcctagtgagggcggctctggcggcggcagcgcccaggagattaaacggatcaacaagatcagaagaagacttgtgaaagacagcaacaccaagaaggccggcaagacaggccccatgaaaaccctgctggttagagtgatgacacccgatctgagagagcggctggaaaacctgagaaagaagcctgaaaatatcccccagcccatcagcaatacatctagagccaacctgaataagctgctgaccgattacaccgaaatgaagaaggcgatcctgcatgtgtactgggaagagttccagaaggaccctgtgggcctgatgagccgggtggcccagcctgccagcaagaagatcgatcagaacaagctgaaacctgagatggacgagaagggcaacctgaccaccgccggctttgcctgctctcagtgtggccagcccctgttcgtgtacaagctggagcaggtgtctgagaagggcaaggcttacaccaactacttcggacggtgcaatgtggccgagcacgaaaagctgatcctgctggcccagctgaagcccgagaaggatagcgacgaagccgtgacatatagcctgggaaagtttgggcagagggccctggatttctacagcattcatgtgaccaaggagtccacccaccccgtgaagcccctggcccagatcgccggaaacagatacgcctccggacctgtgggaaaggccctgagcgacgcatgtatgggcacaatcgcctccttcctgtctaagtaccaggacatcatcatcgaacaccagaaggtggtgaagggcaaccagaagagactggagagcctgcgggagctggccggcaaggaaaacctggaataccctagcgtgaccctgccacctcagcctcacaccaaggagggcgttgatgcctacaacgaagtgatcgcccgggtgcgaatgtgggtgaacctgaacctgtggcagaagctgaagctaagcagagatgatgccaagcctctgctgagactgaagggattcccttcctttcctctggtcgagagacaggccaacgaagtggactggtgggacatggtgtgtaacgtgaagaagctgatcaacgagaaaaaggaggatggcaaggtgttttggcagaatctggctggctacaagagacaggaagccctgagaccatacctgagcagcgaggaagatcggaagaagggaaagaaattcgctcggtaccagctgggcgacctgctgctgcacctggaaaagaagcacggcgaggactggggaaaggtgtacgacgaggcctgggagcggattgacaagaaagtggaaggcctgagcaagcacatcaagctggaagaggaacggagaagcgaggacgcccagagcaaggccgccctgaccgactggctgcgggctaaggccagcttcgtgatcgagggcctgaaggaggccgacaaggacgagttctgcagatgcgagctgaagctgcagaagtggtacggggacctgcggggaaagcccttcgccatcgaagccgagaacagcatcctggacatcagcggcttcagcaagcagtacaactgtgccttcatctggcagaaggacggcgtgaagaagctgaacctgtacctgatcatcaactacttcaagggcggcaagctgcggttcaagaagatcaaacctgaagccttcgaagccaacagattctacaccgtgatcaacaaaaagagcggcgagatcgtgcccatggaggtgaacttcaacttcgacgaccccaacctgatcatcctgcctctggcctttggcaagagacagggcagagaattcatctggaacgacctgctgtccctggaaaccggcagcctgaagctggccaacggaagagtgatcgagaagacactgtacaacagaagaacccggcaggatgagcctgccctgttcgtggccctgaccttcgagcggcgggaggtcctggactcctccaatatcaaaccaatgaacctgatcggcgtggcaagaggcgaaaacatccccgccgtgatcgccctgaccgaccccgagggctgcccactgagccggtttaaggatagcctgggaaacccaacccacatcctgagaatcggcgagagctataaggagaagcagcggaccatccaggccaagaaggaggtggagcagcggagagccggcggctacagccggaagtacgccagcaaagccaagaatctggcagacgatatggtgagaaacaccgctagagatctgctgtactacgccgtgacccaggatgccatgctgatcttcgccaacctgagccggggcttcggccggcagggcaagcggaccttcatggccgagagacagtacacacggatggaggactggctgaccgccaagctggcctacgagggcctgagcaagacctacctgtccaagacactggcccagtacacctccaagacatgcagcaactgtgggtttaccatcaccagcgccgactacgacagggtgctggagaagctgaagaagacagcaacaggctggatgaccacaattaacggcaaggagctgaaggtggagggccagattacctactacaacagatacaagagacagaacgtagtcaaggacctgtccgtcgagctggatagactgagcgaagaatctgtgaacaacgacatctcctcctggacaaagggcagaagcggagaagctctgagcctcctgaagaaaagattctcccatagacccgtgcaggagaagttcgtgtgcctgaactgcggcttcgagacacacgcagccgagcaagccgccctgaacatcgccagatcctggctgttcctgcggagccaggagtacaagaaataccagacaaacaagacaaccggcaacaccgataagagagccttcgtcgagacctggcagtccttttaccggaagaagcttaaggaggtgtggaaacctgccgtgcggtctggcggatctggcggaggctccacaagcatgggcctggtgagcttcaaggacgtggccgtggacttcacccaggaggagtggcagcagctggaccccagccagaggaccctgtacagggacgtgatgctggagaactacagccacctggtgagcatgggctaccccgtgagcaagcccgacgtgatcagcaagctggagcagggcgaggagccctggatcatcaagggcgacatcagcaactggatctaccccgacgagtaccaggccgacaccagccccaagaaaaagagaaaagtctaagctgccttctgcggggcttgccttctggccatgcccttcttctctcccttgcacctgtacctcttggtctttgaataaagcctgagtaggaaggctagcaaaaaaaaaaaaaaaaaaaaaaaaaaaaaaaaaaaaaaaaaaaaaaaaaaaaaaaaaaaaaaaaaaaaaaaaaaaaaaaa

SEQ ID NO: 6526 - RNA, 5797 nt, synthetic construct
  source 1..5797: mol_type = other RNA
aggaaataagagagaaaagaagagtaagaagaaatataagagccaccatggcccctaagaagaagcgtaaagtgagccggatggaacgcctcgtctacgaggtgcggcagaagtgcagaaacatcgaggacatctgcatctcctgcggatctctgaacgtgaccctggagcacccactgttcatcggcggcatgtgccagaactgtaaaaactgttttctggagtgtgcctatcaatacgacgatgacggctaccagagctactgcaccatctgttgcggcggaagagaggtgctgatgtgtggaaataacaactgctgccggtgcttctgcgtggaatgcgtggacctgctggtgggccccggcgccgcccaggccgctattaaggaagatccttggaactgctacatgtgcggccacaagggcacatacggcctgctgagacggagagaggactggcctagcagactgcagatgttcttcgccaataaccacgaccaggagttcgacccccctaaggtgtaccctcccgtccccgccgagaagagaaagcccatccgggtcctgagcctgttcgatggcatcgccaccggtctgctggtgctgaaggacctgggcatccaggtggataggtacattgcctccgaggtgtgcgaggactccatcaccgtgggaatggtgcgtcatcagggcaagatcatgtacgtgggcgacgtgcggagcgtgacacagaagcatatccaggagtggggccctttcgacctggtgatcggcggcagcccttgcaatgacctgagcatcgtgaacccagcccggaagggcctgtacgagggaaccggcagactgttcttcgagttttacagactgctgcacgacgcccggcctaaggaaggcgacgaccggcccttcttttggctgttcgagaatgtggtggccatgggagtcagcgacaagcgggatattagccggttcctggagagcaaccccgtgatgatcgatgccaaggaagtgagcgccgcccaccgggccagatacttctggggcaatctgcctggcatgaacagacccctggccagcaccgtgaacgacaagctggagctgcaggagtgcctggagcacggccggatcgccaagttcagcaaggtgagaaccatcaccacccgaagcaacagcatcaaacaaggcaaggaccagcactttcctgtgttcatgaacgagaaggaggacatcctgtggtgtaccgagatggagagagtgttcgggttcccagtccactacacagatgtcagcaacatgtctagactggccagacagagactgctgggaagaagctggtccgtccctgtgatcagacacctgttcgcccctctgaaggagtacttcgcctgcgtgagcagcggcaacagcaacgccaacagccggggccccagcttctctagcggcctggtgccactgtccctgagagggagccacatgggccccatggagatctacaaaaccgtgagcgcctggaagcggcagcctgtgcgcgtgctgagcctgtttcggaatatcgataaagtcctgaaaagcctgggattcctggagagcggctctggctccggcggtggcaccctgaagtacgtggaggatgtgacaaacgtggtcagacgggatgtggagaagtggggccccttcgatctggtgtacggcagcacccaacccctgggcagctcttgtgaccggtgccctggctggtacatgtttcagttccaccggatcctgcagtacgccctgccgagacaggagtcccagcggccattcttttggattttcatggacaacttgctgctgaccgaggatgaccaggaaactaccactcggttcctgcagaccgaagccgtgaccctgcaggacgtgagaggccgggactaccagaacgccatgcgggtgtggtccaacatccctggactgaaaagcaagcacgcacctctgacccctaaagaagaggagtacctgcaggcccaggtgcggagcagaagcaagctggacgcccctaaggtggatctgctggtgaagaattgcctcctgcccctgagagagtacttcaagtatttcagccagaatagtctgcccctgggcggcccaagcagcggcgcccctcctcccagcggcggcagcccagccggctccccaacctctaccgaggagggcacctctgagtccgccacccccgagagcggccctggcacctccaccgagcccagcgagggcagcgcacccggcagccctgccggcagccccacctccacagaggagggaaccagcaccgagcccagcgaaggcagcgccccaggcaccagcaccgagcctagtgagggcggctctggcggcggcagcgcccaggagattaaacggatcaacaagatcagaagaagacttgtgaaagacagcaacaccaagaaggccggcaagacaggccccatgaaaaccctgctggttagagtgatgacacccgatctgagagagcggctggaaaacctgagaaagaagcctgaaaatatcccccagcccatcagcaatacatctagagccaacctgaataagctgctgaccgattacaccgaaatgaagaaggcgatcctgcatgtgtactgggaagagttccagaaggaccctgtgggcctgatgagccgggtggcccagcctgccagcaagaagatcgatcagaacaagctgaaacctgagatggacgagaagggcaacctgaccaccgccggctttgcctgctctcagtgtggccagcccctgttcgtgtacaagctggagcaggtgtctgagaagggcaaggcttacaccaactacttcggacggtgcaatgtggccgagcacgaaaagctgatcctgctggcccagctgaagcccgagaaggatagcgacgaagccgtgacatatagcctgggaaagtttgggcagagggccctggatttctacagcattcatgtgaccaaggagtccacccaccccgtgaagcccctggcccagatcgccggaaacagatacgcctccggacctgtgggaaaggccctgagcgacgcatgtatgggcacaatcgcctccttcctgtctaagtaccaggacatcatcatcgaacaccagaaggtggtgaagggcaaccagaagagactggagagcctgcgggagctggccggcaaggaaaacctggaataccctagcgtgaccctgccacctcagcctcacaccaaggagggcgttgatgcctacaacgaagtgatcgcccgggtgcgaatgtgggtgaacctgaacctgtggcagaagctgaagctaagcagagatgatgccaagcctctgctgagactgaagggattcccttcctttcctctggtcgagagacaggccaacgaagtggactggtgggacatggtgtgtaacgtgaagaagctgatcaacgagaaaaaggaggatggcaaggtgttttggcagaatctggctggctacaagagacaggaagccctgagaccatacctgagcagcgaggaagatcggaagaagggaaagaaattcgctcggtaccagctgggcgacctgctgctgcacctggaaaagaagcacggcgaggactggggaaaggtgtacgacgaggcctgggagcggattgacaagaaagtggaaggcctgagcaagcacatcaagctggaagaggaacggagaagcgaggacgcccagagcaaggccgccctgaccgactggctgcgggctaaggccagcttcgtgatcgagggcctgaaggaggccgacaaggacgagttctgcagatgcgagctgaagctgcagaagtggtacggggacctgcggggaaagcccttcgccatcgaagccgagaacagcatcctggacatcagcggcttcagcaagcagtacaactgtgccttcatctggcagaaggacggcgtgaagaagctgaacctgtacctgatcatcaactacttcaagggcggcaagctgcggttcaagaagatcaaacctgaagccttcgaagccaacagattctacaccgtgatcaacaaaaagagcggcgagatcgtgcccatggaggtgaacttcaacttcgacgaccccaacctgatcatcctgcctctggcctttggcaagagacagggcagagaattcatctggaacgacctgctgtccctggaaaccggcagcctgaagctggccaacggaagagtgatcgagaagacactgtacaacagaagaacccggcaggatgagcctgccctgttcgtggccctgaccttcgagcggcgggaggtcctggactcctccaatatcaaaccaatgaacctgatcggcgtggcaagaggcgaaaacatccccgccgtgatcgccctgaccgaccccgagggctgcccactgagccggtttaaggatagcctgggaaacccaacccacatcctgagaatcggcgagagctataaggagaagcagcggaccatccaggccaagaaggaggtggagcagcggagagccggcggctacagccggaagtacgccagcaaagccaagaatctggcagacgatatggtgagaaacaccgctagagatctgctgtactacgccgtgacccaggatgccatgctgatcttcgccaacctgagccggggcttcggccggcagggcaagcggaccttcatggccgagagacagtacacacggatggaggactggctgaccgccaagctggcctacgagggcctgagcaagacctacctgtccaagacactggcccagtacacctccaagacatgcagcaactgtgggtttaccatcaccagcgccgactacgacagggtgctggagaagctgaagaagacagcaacaggctggatgaccacaattaacggcaaggagctgaaggtggagggccagattacctactacaacagatacaagagacagaacgtagtcaaggacctgtccgtcgagctggatagactgagcgaagaatctgtgaacaacgacatctcctcctggacaaagggcagaagcggagaagctctgagcctcctgaagaaaagattctcccatagacccgtgcaggagaagttcgtgtgcctgaactgcggcttcgagacacacgcagccgagcaagccgccctgaacatcgccagatcctggctgttcctgcggagccaggagtacaagaaataccagacaaacaagacaaccggcaacaccgataagagagccttcgtcgagacctggcagtccttttaccggaagaagcttaaggaggtgtggaaacctgccgtgcggtctggcggatctggcggaggctccacaagcctgcaggagcccgtgagcttcgccgaggtggccgtgtgcttcagcagggaggagtgggccctgctggaccccgcccagagggtgctgtacagggacgtgatgctggagacctaccagtgcgtggccagcctggccagcctgctgacccccaagcccgtgctgatcagcctgctggagggcggcgaggagccctggatccccgacgtgaggagccccgaggccacccccggcgacctgagccccaccagccccaagaaaaagagaaaagtctaagctgccttctgcggggcttgccttctggccatgcccttcttctctcccttgcacctgtacctcttggtctttgaataaagcctgagtaggaaggctagcaaaaaaaaaaaaaaaaaaaaaaaaaaaaaaaaaaaaaaaaaaaaaaaaaaaaaaaaaaaaaaaaaaaaaaaaaaaaaaaa

SEQ ID NO: 6527 - RNA, 5794 nt, synthetic construct
  source 1..5794: mol_type = other RNA
aggaaataagagagaaaagaagagtaagaagaaatataagagccaccatggcccctaagaagaagcgtaaagtgagccggatggaacgcctcgtctacgaggtgcggcagaagtgcagaaacatcgaggacatctgcatctcctgcggatctctgaacgtgaccctggagcacccactgttcatcggcggcatgtgccagaactgtaaaaactgttttctggagtgtgcctatcaatacgacgatgacggctaccagagctactgcaccatctgttgcggcggaagagaggtgctgatgtgtggaaataacaactgctgccggtgcttctgcgtggaatgcgtggacctgctggtgggccccggcgccgcccaggccgctattaaggaagatccttggaactgctacatgtgcggccacaagggcacatacggcctgctgagacggagagaggactggcctagcagactgcagatgttcttcgccaataaccacgaccaggagttcgacccccctaaggtgtaccctcccgtccccgccgagaagagaaagcccatccgggtcctgagcctgttcgatggcatcgccaccggtctgctggtgctgaaggacctgggcatccaggtggataggtacattgcctccgaggtgtgcgaggactccatcaccgtgggaatggtgcgtcatcagggcaagatcatgtacgtgggcgacgtgcggagcgtgacacagaagcatatccaggagtggggccctttcgacctggtgatcggcggcagcccttgcaatgacctgagcatcgtgaacccagcccggaagggcctgtacgagggaaccggcagactgttcttcgagttttacagactgctgcacgacgcccggcctaaggaaggcgacgaccggcccttcttttggctgttcgagaatgtggtggccatgggagtcagcgacaagcgggatattagccggttcctggagagcaaccccgtgatgatcgatgccaaggaagtgagcgccgcccaccgggccagatacttctggggcaatctgcctggcatgaacagacccctggccagcaccgtgaacgacaagctggagctgcaggagtgcctggagcacggccggatcgccaagttcagcaaggtgagaaccatcaccacccgaagcaacagcatcaaacaaggcaaggaccagcactttcctgtgttcatgaacgagaaggaggacatcctgtggtgtaccgagatggagagagtgttcgggttcccagtccactacacagatgtcagcaacatgtctagactggccagacagagactgctgggaagaagctggtccgtccctgtgatcagacacctgttcgcccctctgaaggagtacttcgcctgcgtgagcagcggcaacagcaacgccaacagccggggccccagcttctctagcggcctggtgccactgtccctgagagggagccacatgggccccatggagatctacaaaaccgtgagcgcctggaagcggcagcctgtgcgcgtgctgagcctgtttcggaatatcgataaagtcctgaaaagcctgggattcctggagagcggctctggctccggcggtggcaccctgaagtacgtggaggatgtgacaaacgtggtcagacgggatgtggagaagtggggccccttcgatctggtgtacggcagcacccaacccctgggcagctcttgtgaccggtgccctggctggtacatgtttcagttccaccggatcctgcagtacgccctgccgagacaggagtcccagcggccattcttttggattttcatggacaacttgctgctgaccgaggatgaccaggaaactaccactcggttcctgcagaccgaagccgtgaccctgcaggacgtgagaggccgggactaccagaacgccatgcgggtgtggtccaacatccctggactgaaaagcaagcacgcacctctgacccctaaagaagaggagtacctgcaggcccaggtgcggagcagaagcaagctggacgcccctaaggtggatctgctggtgaagaattgcctcctgcccctgagagagtacttcaagtatttcagccagaatagtctgcccctgggcggcccaagcagcggcgcccctcctcccagcggcggcagcccagccggctccccaacctctaccgaggagggcacctctgagtccgccacccccgagagcggccctggcacctccaccgagcccagcgagggcagcgcacccggcagccctgccggcagccccacctccacagaggagggaaccagcaccgagcccagcgaaggcagcgccccaggcaccagcaccgagcctagtgagggcggctctggcggcggcagcgcccaggagattaaacggatcaacaagatcagaagaagacttgtgaaagacagcaacaccaagaaggccggcaagacaggccccatgaaaaccctgctggttagagtgatgacacccgatctgagagagcggctggaaaacctgagaaagaagcctgaaaatatcccccagcccatcagcaatacatctagagccaacctgaataagctgctgaccgattacaccgaaatgaagaaggcgatcctgcatgtgtactgggaagagttccagaaggaccctgtgggcctgatgagccgggtggcccagcctgccagcaagaagatcgatcagaacaagctgaaacctgagatggacgagaagggcaacctgaccaccgccggctttgcctgctctcagtgtggccagcccctgttcgtgtacaagctggagcaggtgtctgagaagggcaaggcttacaccaactacttcggacggtgcaatgtggccgagcacgaaaagctgatcctgctggcccagctgaagcccgagaaggatagcgacgaagccgtgacatatagcctgggaaagtttgggcagagggccctggatttctacagcattcatgtgaccaaggagtccacccaccccgtgaagcccctggcccagatcgccggaaacagatacgcctccggacctgtgggaaaggccctgagcgacgcatgtatgggcacaatcgcctccttcctgtctaagtaccaggacatcatcatcgaacaccagaaggtggtgaagggcaaccagaagagactggagagcctgcgggagctggccggcaaggaaaacctggaataccctagcgtgaccctgccacctcagcctcacaccaaggagggcgttgatgcctacaacgaagtgatcgcccgggtgcgaatgtgggtgaacctgaacctgtggcagaagctgaagctaagcagagatgatgccaagcctctgctgagactgaagggattcccttcctttcctctggtcgagagacaggccaacgaagtggactggtgggacatggtgtgtaacgtgaagaagctgatcaacgagaaaaaggaggatggcaaggtgttttggcagaatctggctggctacaagagacaggaagccctgagaccatacctgagcagcgaggaagatcggaagaagggaaagaaattcgctcggtaccagctgggcgacctgctgctgcacctggaaaagaagcacggcgaggactggggaaaggtgtacgacgaggcctgggagcggattgacaagaaagtggaaggcctgagcaagcacatcaagctggaagaggaacggagaagcgaggacgcccagagcaaggccgccctgaccgactggctgcgggctaaggccagcttcgtgatcgagggcctgaaggaggccgacaaggacgagttctgcagatgcgagctgaagctgcagaagtggtacggggacctgcggggaaagcccttcgccatcgaagccgagaacagcatcctggacatcagcggcttcagcaagcagtacaactgtgccttcatctggcagaaggacggcgtgaagaagctgaacctgtacctgatcatcaactacttcaagggcggcaagctgcggttcaagaagatcaaacctgaagccttcgaagccaacagattctacaccgtgatcaacaaaaagagcggcgagatcgtgcccatggaggtgaacttcaacttcgacgaccccaacctgatcatcctgcctctggcctttggcaagagacagggcagagaattcatctggaacgacctgctgtccctggaaaccggcagcctgaagctggccaacggaagagtgatcgagaagacactgtacaacagaagaacccggcaggatgagcctgccctgttcgtggccctgaccttcgagcggcgggaggtcctggactcctccaatatcaaaccaatgaacctgatcggcgtggcaagaggcgaaaacatccccgccgtgatcgccctgaccgaccccgagggctgcccactgagccggtttaaggatagcctgggaaacccaacccacatcctgagaatcggcgagagctataaggagaagcagcggaccatccaggccaagaaggaggtggagcagcggagagccggcggctacagccggaagtacgccagcaaagccaagaatctggcagacgatatggtgagaaacaccgctagagatctgctgtactacgccgtgacccaggatgccatgctgatcttcgccaacctgagccggggcttcggccggcagggcaagcggaccttcatggccgagagacagtacacacggatggaggactggctgaccgccaagctggcctacgagggcctgagcaagacctacctgtccaagacactggcccagtacacctccaagacatgcagcaactgtgggtttaccatcaccagcgccgactacgacagggtgctggagaagctgaagaagacagcaacaggctggatgaccacaattaacggcaaggagctgaaggtggagggccagattacctactacaacagatacaagagacagaacgtagtcaaggacctgtccgtcgagctggatagactgagcgaagaatctgtgaacaacgacatctcctcctggacaaagggcagaagcggagaagctctgagcctcctgaagaaaagattctcccatagacccgtgcaggagaagttcgtgtgcctgaactgcggcttcgagacacacgcagccgagcaagccgccctgaacatcgccagatcctggctgttcctgcggagccaggagtacaagaaataccagacaaacaagacaaccggcaacaccgataagagagccttcgtcgagacctggcagtccttttaccggaagaagcttaaggaggtgtggaaacctgccgtgcggtctggcggatctggcggaggctccacaagcgccctgagaagcgtgatgttcagcgacgtgagcatcgacttcagccccgaggagtgggagtacctggacctggagcagaaggacctgtacagagacgtgatgctggagaactacagcaacctggtgagcctgggctgcttcatcagcaagcccgacgtgatcagcagcctggagcagggcaaggagccctggaaggtggtgagaaagggcagaagacagtaccccgacctggagaccaagaccagccccaagaaaaagagaaaagtctaagctgccttctgcggggcttgccttctggccatgcccttcttctctcccttgcacctgtacctcttggtctttgaataaagcctgagtaggaaggctagcaaaaaaaaaaaaaaaaaaaaaaaaaaaaaaaaaaaaaaaaaaaaaaaaaaaaaaaaaaaaaaaaaaaaaaaaaaaaaaaa

SEQ ID NO: 6528 - RNA, 5797 nt, synthetic construct
  source 1..5797: mol_type = other RNA
aggaaataagagagaaaagaagagtaagaagaaatataagagccaccatggcccctaagaagaagcgtaaagtgagccggatggaacgcctcgtctacgaggtgcggcagaagtgcagaaacatcgaggacatctgcatctcctgcggatctctgaacgtgaccctggagcacccactgttcatcggcggcatgtgccagaactgtaaaaactgttttctggagtgtgcctatcaatacgacgatgacggctaccagagctactgcaccatctgttgcggcggaagagaggtgctgatgtgtggaaataacaactgctgccggtgcttctgcgtggaatgcgtggacctgctggtgggccccggcgccgcccaggccgctattaaggaagatccttggaactgctacatgtgcggccacaagggcacatacggcctgctgagacggagagaggactggcctagcagactgcagatgttcttcgccaataaccacgaccaggagttcgacccccctaaggtgtaccctcccgtccccgccgagaagagaaagcccatccgggtcctgagcctgttcgatggcatcgccaccggtctgctggtgctgaaggacctgggcatccaggtggataggtacattgcctccgaggtgtgcgaggactccatcaccgtgggaatggtgcgtcatcagggcaagatcatgtacgtgggcgacgtgcggagcgtgacacagaagcatatccaggagtggggccctttcgacctggtgatcggcggcagcccttgcaatgacctgagcatcgtgaacccagcccggaagggcctgtacgagggaaccggcagactgttcttcgagttttacagactgctgcacgacgcccggcctaaggaaggcgacgaccggcccttcttttggctgttcgagaatgtggtggccatgggagtcagcgacaagcgggatattagccggttcctggagagcaaccccgtgatgatcgatgccaaggaagtgagcgccgcccaccgggccagatacttctggggcaatctgcctggcatgaacagacccctggccagcaccgtgaacgacaagctggagctgcaggagtgcctggagcacggccggatcgccaagttcagcaaggtgagaaccatcaccacccgaagcaacagcatcaaacaaggcaaggaccagcactttcctgtgttcatgaacgagaaggaggacatcctgtggtgtaccgagatggagagagtgttcgggttcccagtccactacacagatgtcagcaacatgtctagactggccagacagagactgctgggaagaagctggtccgtccctgtgatcagacacctgttcgcccctctgaaggagtacttcgcctgcgtgagcagcggcaacagcaacgccaacagccggggccccagcttctctagcggcctggtgccactgtccctgagagggagccacatgggccccatggagatctacaaaaccgtgagcgcctggaagcggcagcctgtgcgcgtgctgagcctgtttcggaatatcgataaagtcctgaaaagcctgggattcctggagagcggctctggctccggcggtggcaccctgaagtacgtggaggatgtgacaaacgtggtcagacgggatgtggagaagtggggccccttcgatctggtgtacggcagcacccaacccctgggcagctcttgtgaccggtgccctggctggtacatgtttcagttccaccggatcctgcagtacgccctgccgagacaggagtcccagcggccattcttttggattttcatggacaacttgctgctgaccgaggatgaccaggaaactaccactcggttcctgcagaccgaagccgtgaccctgcaggacgtgagaggccgggactaccagaacgccatgcgggtgtggtccaacatccctggactgaaaagcaagcacgcacctctgacccctaaagaagaggagtacctgcaggcccaggtgcggagcagaagcaagctggacgcccctaaggtggatctgctggtgaagaattgcctcctgcccctgagagagtacttcaagtatttcagccagaatagtctgcccctgggcggcccaagcagcggcgcccctcctcccagcggcggcagcccagccggctccccaacctctaccgaggagggcacctctgagtccgccacccccgagagcggccctggcacctccaccgagcccagcgagggcagcgcacccggcagccctgccggcagccccacctccacagaggagggaaccagcaccgagcccagcgaaggcagcgccccaggcaccagcaccgagcctagtgagggcggctctggcggcggcagcgcccaggagattaaacggatcaacaagatcagaagaagacttgtgaaagacagcaacaccaagaaggccggcaagacaggccccatgaaaaccctgctggttagagtgatgacacccgatctgagagagcggctggaaaacctgagaaagaagcctgaaaatatcccccagcccatcagcaatacatctagagccaacctgaataagctgctgaccgattacaccgaaatgaagaaggcgatcctgcatgtgtactgggaagagttccagaaggaccctgtgggcctgatgagccgggtggcccagcctgccagcaagaagatcgatcagaacaagctgaaacctgagatggacgagaagggcaacctgaccaccgccggctttgcctgctctcagtgtggccagcccctgttcgtgtacaagctggagcaggtgtctgagaagggcaaggcttacaccaactacttcggacggtgcaatgtggccgagcacgaaaagctgatcctgctggcccagctgaagcccgagaaggatagcgacgaagccgtgacatatagcctgggaaagtttgggcagagggccctggatttctacagcattcatgtgaccaaggagtccacccaccccgtgaagcccctggcccagatcgccggaaacagatacgcctccggacctgtgggaaaggccctgagcgacgcatgtatgggcacaatcgcctccttcctgtctaagtaccaggacatcatcatcgaacaccagaaggtggtgaagggcaaccagaagagactggagagcctgcgggagctggccggcaaggaaaacctggaataccctagcgtgaccctgccacctcagcctcacaccaaggagggcgttgatgcctacaacgaagtgatcgcccgggtgcgaatgtgggtgaacctgaacctgtggcagaagctgaagctaagcagagatgatgccaagcctctgctgagactgaagggattcccttcctttcctctggtcgagagacaggccaacgaagtggactggtgggacatggtgtgtaacgtgaagaagctgatcaacgagaaaaaggaggatggcaaggtgttttggcagaatctggctggctacaagagacaggaagccctgagaccatacctgagcagcgaggaagatcggaagaagggaaagaaattcgctcggtaccagctgggcgacctgctgctgcacctggaaaagaagcacggcgaggactggggaaaggtgtacgacgaggcctgggagcggattgacaagaaagtggaaggcctgagcaagcacatcaagctggaagaggaacggagaagcgaggacgcccagagcaaggccgccctgaccgactggctgcgggctaaggccagcttcgtgatcgagggcctgaaggaggccgacaaggacgagttctgcagatgcgagctgaagctgcagaagtggtacggggacctgcggggaaagcccttcgccatcgaagccgagaacagcatcctggacatcagcggcttcagcaagcagtacaactgtgccttcatctggcagaaggacggcgtgaagaagctgaacctgtacctgatcatcaactacttcaagggcggcaagctgcggttcaagaagatcaaacctgaagccttcgaagccaacagattctacaccgtgatcaacaaaaagagcggcgagatcgtgcccatggaggtgaacttcaacttcgacgaccccaacctgatcatcctgcctctggcctttggcaagagacagggcagagaattcatctggaacgacctgctgtccctggaaaccggcagcctgaagctggccaacggaagagtgatcgagaagacactgtacaacagaagaacccggcaggatgagcctgccctgttcgtggccctgaccttcgagcggcgggaggtcctggactcctccaatatcaaaccaatgaacctgatcggcgtggcaagaggcgaaaacatccccgccgtgatcgccctgaccgaccccgagggctgcccactgagccggtttaaggatagcctgggaaacccaacccacatcctgagaatcggcgagagctataaggagaagcagcggaccatccaggccaagaaggaggtggagcagcggagagccggcggctacagccggaagtacgccagcaaagccaagaatctggcagacgatatggtgagaaacaccgctagagatctgctgtactacgccgtgacccaggatgccatgctgatcttcgccaacctgagccggggcttcggccggcagggcaagcggaccttcatggccgagagacagtacacacggatggaggactggctgaccgccaagctggcctacgagggcctgagcaagacctacctgtccaagacactggcccagtacacctccaagacatgcagcaactgtgggtttaccatcaccagcgccgactacgacagggtgctggagaagctgaagaagacagcaacaggctggatgaccacaattaacggcaaggagctgaaggtggagggccagattacctactacaacagatacaagagacagaacgtagtcaaggacctgtccgtcgagctggatagactgagcgaagaatctgtgaacaacgacatctcctcctggacaaagggcagaagcggagaagctctgagcctcctgaagaaaagattctcccatagacccgtgcaggagaagttcgtgtgcctgaactgcggcttcgagacacacgcagccgagcaagccgccctgaacatcgccagatcctggctgttcctgcggagccaggagtacaagaaataccagacaaacaagacaaccggcaacaccgataagagagccttcgtcgagacctggcagtccttttaccggaagaagcttaaggaggtgtggaaacctgccgtgcggtctggcggatctggcggaggctccacaagccagctgaccttcgaggacgtggccctgagcttcagcaaggaggagtggcagatcatggaccccaaccagaagaccctgtacatcgacgtgatgcaggagatctacgagaccgtgaccagcctgggcctgaagctgaagaacgacaccggcaacgaccagcccgtgagcctgagcaccagcgagatccagcccagcggctgcaaggtgctgaggaaggccaggatgaaggtggcccagaccaccaccagccccaagaaaaagagaaaagtctaagctgccttctgcggggcttgccttctggccatgcccttcttctctcccttgcacctgtacctcttggtctttgaataaagcctgagtaggaaggctagcaaaaaaaaaaaaaaaaaaaaaaaaaaaaaaaaaaaaaaaaaaaaaaaaaaaaaaaaaaaaaaaaaaaaaaaaaaaaaaaa

SEQ ID NO: 6529 - RNA, 5797 nt, synthetic construct
  source 1..5797: mol_type = other RNA
aggaaataagagagaaaagaagagtaagaagaaatataagagccaccatggcccctaagaagaagcgtaaagtgagccggatggaacgcctcgtctacgaggtgcggcagaagtgcagaaacatcgaggacatctgcatctcctgcggatctctgaacgtgaccctggagcacccactgttcatcggcggcatgtgccagaactgtaaaaactgttttctggagtgtgcctatcaatacgacgatgacggctaccagagctactgcaccatctgttgcggcggaagagaggtgctgatgtgtggaaataacaactgctgccggtgcttctgcgtggaatgcgtggacctgctggtgggccccggcgccgcccaggccgctattaaggaagatccttggaactgctacatgtgcggccacaagggcacatacggcctgctgagacggagagaggactggcctagcagactgcagatgttcttcgccaataaccacgaccaggagttcgacccccctaaggtgtaccctcccgtccccgccgagaagagaaagcccatccgggtcctgagcctgttcgatggcatcgccaccggtctgctggtgctgaaggacctgggcatccaggtggataggtacattgcctccgaggtgtgcgaggactccatcaccgtgggaatggtgcgtcatcagggcaagatcatgtacgtgggcgacgtgcggagcgtgacacagaagcatatccaggagtggggccctttcgacctggtgatcggcggcagcccttgcaatgacctgagcatcgtgaacccagcccggaagggcctgtacgagggaaccggcagactgttcttcgagttttacagactgctgcacgacgcccggcctaaggaaggcgacgaccggcccttcttttggctgttcgagaatgtggtggccatgggagtcagcgacaagcgggatattagccggttcctggagagcaaccccgtgatgatcgatgccaaggaagtgagcgccgcccaccgggccagatacttctggggcaatctgcctggcatgaacagacccctggccagcaccgtgaacgacaagctggagctgcaggagtgcctggagcacggccggatcgccaagttcagcaaggtgagaaccatcaccacccgaagcaacagcatcaaacaaggcaaggaccagcactttcctgtgttcatgaacgagaaggaggacatcctgtggtgtaccgagatggagagagtgttcgggttcccagtccactacacagatgtcagcaacatgtctagactggccagacagagactgctgggaagaagctggtccgtccctgtgatcagacacctgttcgcccctctgaaggagtacttcgcctgcgtgagcagcggcaacagcaacgccaacagccggggccccagcttctctagcggcctggtgccactgtccctgagagggagccacatgggccccatggagatctacaaaaccgtgagcgcctggaagcggcagcctgtgcgcgtgctgagcctgtttcggaatatcgataaagtcctgaaaagcctgggattcctggagagcggctctggctccggcggtggcaccctgaagtacgtggaggatgtgacaaacgtggtcagacgggatgtggagaagtggggccccttcgatctggtgtacggcagcacccaacccctgggcagctcttgtgaccggtgccctggctggtacatgtttcagttccaccggatcctgcagtacgccctgccgagacaggagtcccagcggccattcttttggattttcatggacaacttgctgctgaccgaggatgaccaggaaactaccactcggttcctgcagaccgaagccgtgaccctgcaggacgtgagaggccgggactaccagaacgccatgcgggtgtggtccaacatccctggactgaaaagcaagcacgcacctctgacccctaaagaagaggagtacctgcaggcccaggtgcggagcagaagcaagctggacgcccctaaggtggatctgctggtgaagaattgcctcctgcccctgagagagtacttcaagtatttcagccagaatagtctgcccctgggcggcccaagcagcggcgcccctcctcccagcggcggcagcccagccggctccccaacctctaccgaggagggcacctctgagtccgccacccccgagagcggccctggcacctccaccgagcccagcgagggcagcgcacccggcagccctgccggcagccccacctccacagaggagggaaccagcaccgagcccagcgaaggcagcgccccaggcaccagcaccgagcctagtgagggcggctctggcggcggcagcgcccaggagattaaacggatcaacaagatcagaagaagacttgtgaaagacagcaacaccaagaaggccggcaagacaggccccatgaaaaccctgctggttagagtgatgacacccgatctgagagagcggctggaaaacctgagaaagaagcctgaaaatatcccccagcccatcagcaatacatctagagccaacctgaataagctgctgaccgattacaccgaaatgaagaaggcgatcctgcatgtgtactgggaagagttccagaaggaccctgtgggcctgatgagccgggtggcccagcctgccagcaagaagatcgatcagaacaagctgaaacctgagatggacgagaagggcaacctgaccaccgccggctttgcctgctctcagtgtggccagcccctgttcgtgtacaagctggagcaggtgtctgagaagggcaaggcttacaccaactacttcggacggtgcaatgtggccgagcacgaaaagctgatcctgctggcccagctgaagcccgagaaggatagcgacgaagccgtgacatatagcctgggaaagtttgggcagagggccctggatttctacagcattcatgtgaccaaggagtccacccaccccgtgaagcccctggcccagatcgccggaaacagatacgcctccggacctgtgggaaaggccctgagcgacgcatgtatgggcacaatcgcctccttcctgtctaagtaccaggacatcatcatcgaacaccagaaggtggtgaagggcaaccagaagagactggagagcctgcgggagctggccggcaaggaaaacctggaataccctagcgtgaccctgccacctcagcctcacaccaaggagggcgttgatgcctacaacgaagtgatcgcccgggtgcgaatgtgggtgaacctgaacctgtggcagaagctgaagctaagcagagatgatgccaagcctctgctgagactgaagggattcccttcctttcctctggtcgagagacaggccaacgaagtggactggtgggacatggtgtgtaacgtgaagaagctgatcaacgagaaaaaggaggatggcaaggtgttttggcagaatctggctggctacaagagacaggaagccctgagaccatacctgagcagcgaggaagatcggaagaagggaaagaaattcgctcggtaccagctgggcgacctgctgctgcacctggaaaagaagcacggcgaggactggggaaaggtgtacgacgaggcctgggagcggattgacaagaaagtggaaggcctgagcaagcacatcaagctggaagaggaacggagaagcgaggacgcccagagcaaggccgccctgaccgactggctgcgggctaaggccagcttcgtgatcgagggcctgaaggaggccgacaaggacgagttctgcagatgcgagctgaagctgcagaagtggtacggggacctgcggggaaagcccttcgccatcgaagccgagaacagcatcctggacatcagcggcttcagcaagcagtacaactgtgccttcatctggcagaaggacggcgtgaagaagctgaacctgtacctgatcatcaactacttcaagggcggcaagctgcggttcaagaagatcaaacctgaagccttcgaagccaacagattctacaccgtgatcaacaaaaagagcggcgagatcgtgcccatggaggtgaacttcaacttcgacgaccccaacctgatcatcctgcctctggcctttggcaagagacagggcagagaattcatctggaacgacctgctgtccctggaaaccggcagcctgaagctggccaacggaagagtgatcgagaagacactgtacaacagaagaacccggcaggatgagcctgccctgttcgtggccctgaccttcgagcggcgggaggtcctggactcctccaatatcaaaccaatgaacctgatcggcgtggcaagaggcgaaaacatccccgccgtgatcgccctgaccgaccccgagggctgcccactgagccggtttaaggatagcctgggaaacccaacccacatcctgagaatcggcgagagctataaggagaagcagcggaccatccaggccaagaaggaggtggagcagcggagagccggcggctacagccggaagtacgccagcaaagccaagaatctggcagacgatatggtgagaaacaccgctagagatctgctgtactacgccgtgacccaggatgccatgctgatcttcgccaacctgagccggggcttcggccggcagggcaagcggaccttcatggccgagagacagtacacacggatggaggactggctgaccgccaagctggcctacgagggcctgagcaagacctacctgtccaagacactggcccagtacacctccaagacatgcagcaactgtgggtttaccatcaccagcgccgactacgacagggtgctggagaagctgaagaagacagcaacaggctggatgaccacaattaacggcaaggagctgaaggtggagggccagattacctactacaacagatacaagagacagaacgtagtcaaggacctgtccgtcgagctggatagactgagcgaagaatctgtgaacaacgacatctcctcctggacaaagggcagaagcggagaagctctgagcctcctgaagaaaagattctcccatagacccgtgcaggagaagttcgtgtgcctgaactgcggcttcgagacacacgcagccgagcaagccgccctgaacatcgccagatcctggctgttcctgcggagccaggagtacaagaaataccagacaaacaagacaaccggcaacaccgataagagagccttcgtcgagacctggcagtccttttaccggaagaagcttaaggaggtgtggaaacctgccgtgcggtctggcggatctggcggaggctccacaagccagctgcaggagaccatgaccttcaaggacgtggaggtgaccttcagccaggacgagtggggctggctggacagcgcccagaggaacctgtacagggacgtgatgctggagaactacaggaacatggccagcctggtgggccccttcaccaagcccgccctgatcagctggctggaggccagggagccctggggcctgaacatgcaggccgcccagcccaagggcaaccccgtggccgcccccaccagccccaagaaaaagagaaaagtctaagctgccttctgcggggcttgccttctggccatgcccttcttctctcccttgcacctgtacctcttggtctttgaataaagcctgagtaggaaggctagcaaaaaaaaaaaaaaaaaaaaaaaaaaaaaaaaaaaaaaaaaaaaaaaaaaaaaaaaaaaaaaaaaaaaaaaaaaaaaaaa

SEQ ID NO: 6530 - RNA, 5797 nt, synthetic construct
  source 1..5797: mol_type = other RNA
aggaaataagagagaaaagaagagtaagaagaaatataagagccaccatggcccctaagaagaagcgtaaagtgagccggatggaacgcctcgtctacgaggtgcggcagaagtgcagaaacatcgaggacatctgcatctcctgcggatctctgaacgtgaccctggagcacccactgttcatcggcggcatgtgccagaactgtaaaaactgttttctggagtgtgcctatcaatacgacgatgacggctaccagagctactgcaccatctgttgcggcggaagagaggtgctgatgtgtggaaataacaactgctgccggtgcttctgcgtggaatgcgtggacctgctggtgggccccggcgccgcccaggccgctattaaggaagatccttggaactgctacatgtgcggccacaagggcacatacggcctgctgagacggagagaggactggcctagcagactgcagatgttcttcgccaataaccacgaccaggagttcgacccccctaaggtgtaccctcccgtccccgccgagaagagaaagcccatccgggtcctgagcctgttcgatggcatcgccaccggtctgctggtgctgaaggacctgggcatccaggtggataggtacattgcctccgaggtgtgcgaggactccatcaccgtgggaatggtgcgtcatcagggcaagatcatgtacgtgggcgacgtgcggagcgtgacacagaagcatatccaggagtggggccctttcgacctggtgatcggcggcagcccttgcaatgacctgagcatcgtgaacccagcccggaagggcctgtacgagggaaccggcagactgttcttcgagttttacagactgctgcacgacgcccggcctaaggaaggcgacgaccggcccttcttttggctgttcgagaatgtggtggccatgggagtcagcgacaagcgggatattagccggttcctggagagcaaccccgtgatgatcgatgccaaggaagtgagcgccgcccaccgggccagatacttctggggcaatctgcctggcatgaacagacccctggccagcaccgtgaacgacaagctggagctgcaggagtgcctggagcacggccggatcgccaagttcagcaaggtgagaaccatcaccacccgaagcaacagcatcaaacaaggcaaggaccagcactttcctgtgttcatgaacgagaaggaggacatcctgtggtgtaccgagatggagagagtgttcgggttcccagtccactacacagatgtcagcaacatgtctagactggccagacagagactgctgggaagaagctggtccgtccctgtgatcagacacctgttcgcccctctgaaggagtacttcgcctgcgtgagcagcggcaacagcaacgccaacagccggggccccagcttctctagcggcctggtgccactgtccctgagagggagccacatgggccccatggagatctacaaaaccgtgagcgcctggaagcggcagcctgtgcgcgtgctgagcctgtttcggaatatcgataaagtcctgaaaagcctgggattcctggagagcggctctggctccggcggtggcaccctgaagtacgtggaggatgtgacaaacgtggtcagacgggatgtggagaagtggggccccttcgatctggtgtacggcagcacccaacccctgggcagctcttgtgaccggtgccctggctggtacatgtttcagttccaccggatcctgcagtacgccctgccgagacaggagtcccagcggccattcttttggattttcatggacaacttgctgctgaccgaggatgaccaggaaactaccactcggttcctgcagaccgaagccgtgaccctgcaggacgtgagaggccgggactaccagaacgccatgcgggtgtggtccaacatccctggactgaaaagcaagcacgcacctctgacccctaaagaagaggagtacctgcaggcccaggtgcggagcagaagcaagctggacgcccctaaggtggatctgctggtgaagaattgcctcctgcccctgagagagtacttcaagtatttcagccagaatagtctgcccctgggcggcccaagcagcggcgcccctcctcccagcggcggcagcccagccggctccccaacctctaccgaggagggcacctctgagtccgccacccccgagagcggccctggcacctccaccgagcccagcgagggcagcgcacccggcagccctgccggcagccccacctccacagaggagggaaccagcaccgagcccagcgaaggcagcgccccaggcaccagcaccgagcctagtgagggcggctctggcggcggcagcgcccaggagattaaacggatcaacaagatcagaagaagacttgtgaaagacagcaacaccaagaaggccggcaagacaggccccatgaaaaccctgctggttagagtgatgacacccgatctgagagagcggctggaaaacctgagaaagaagcctgaaaatatcccccagcccatcagcaatacatctagagccaacctgaataagctgctgaccgattacaccgaaatgaagaaggcgatcctgcatgtgtactgggaagagttccagaaggaccctgtgggcctgatgagccgggtggcccagcctgccagcaagaagatcgatcagaacaagctgaaacctgagatggacgagaagggcaacctgaccaccgccggctttgcctgctctcagtgtggccagcccctgttcgtgtacaagctggagcaggtgtctgagaagggcaaggcttacaccaactacttcggacggtgcaatgtggccgagcacgaaaagctgatcctgctggcccagctgaagcccgagaaggatagcgacgaagccgtgacatatagcctgggaaagtttgggcagagggccctggatttctacagcattcatgtgaccaaggagtccacccaccccgtgaagcccctggcccagatcgccggaaacagatacgcctccggacctgtgggaaaggccctgagcgacgcatgtatgggcacaatcgcctccttcctgtctaagtaccaggacatcatcatcgaacaccagaaggtggtgaagggcaaccagaagagactggagagcctgcgggagctggccggcaaggaaaacctggaataccctagcgtgaccctgccacctcagcctcacaccaaggagggcgttgatgcctacaacgaagtgatcgcccgggtgcgaatgtgggtgaacctgaacctgtggcagaagctgaagctaagcagagatgatgccaagcctctgctgagactgaagggattcccttcctttcctctggtcgagagacaggccaacgaagtggactggtgggacatggtgtgtaacgtgaagaagctgatcaacgagaaaaaggaggatggcaaggtgttttggcagaatctggctggctacaagagacaggaagccctgagaccatacctgagcagcgaggaagatcggaagaagggaaagaaattcgctcggtaccagctgggcgacctgctgctgcacctggaaaagaagcacggcgaggactggggaaaggtgtacgacgaggcctgggagcggattgacaagaaagtggaaggcctgagcaagcacatcaagctggaagaggaacggagaagcgaggacgcccagagcaaggccgccctgaccgactggctgcgggctaaggccagcttcgtgatcgagggcctgaaggaggccgacaaggacgagttctgcagatgcgagctgaagctgcagaagtggtacggggacctgcggggaaagcccttcgccatcgaagccgagaacagcatcctggacatcagcggcttcagcaagcagtacaactgtgccttcatctggcagaaggacggcgtgaagaagctgaacctgtacctgatcatcaactacttcaagggcggcaagctgcggttcaagaagatcaaacctgaagccttcgaagccaacagattctacaccgtgatcaacaaaaagagcggcgagatcgtgcccatggaggtgaacttcaacttcgacgaccccaacctgatcatcctgcctctggcctttggcaagagacagggcagagaattcatctggaacgacctgctgtccctggaaaccggcagcctgaagctggccaacggaagagtgatcgagaagacactgtacaacagaagaacccggcaggatgagcctgccctgttcgtggccctgaccttcgagcggcgggaggtcctggactcctccaatatcaaaccaatgaacctgatcggcgtggcaagaggcgaaaacatccccgccgtgatcgccctgaccgaccccgagggctgcccactgagccggtttaaggatagcctgggaaacccaacccacatcctgagaatcggcgagagctataaggagaagcagcggaccatccaggccaagaaggaggtggagcagcggagagccggcggctacagccggaagtacgccagcaaagccaagaatctggcagacgatatggtgagaaacaccgctagagatctgctgtactacgccgtgacccaggatgccatgctgatcttcgccaacctgagccggggcttcggccggcagggcaagcggaccttcatggccgagagacagtacacacggatggaggactggctgaccgccaagctggcctacgagggcctgagcaagacctacctgtccaagacactggcccagtacacctccaagacatgcagcaactgtgggtttaccatcaccagcgccgactacgacagggtgctggagaagctgaagaagacagcaacaggctggatgaccacaattaacggcaaggagctgaaggtggagggccagattacctactacaacagatacaagagacagaacgtagtcaaggacctgtccgtcgagctggatagactgagcgaagaatctgtgaacaacgacatctcctcctggacaaagggcagaagcggagaagctctgagcctcctgaagaaaagattctcccatagacccgtgcaggagaagttcgtgtgcctgaactgcggcttcgagacacacgcagccgagcaagccgccctgaacatcgccagatcctggctgttcctgcggagccaggagtacaagaaataccagacaaacaagacaaccggcaacaccgataagagagccttcgtcgagacctggcagtccttttaccggaagaagcttaaggaggtgtggaaacctgccgtgcggtctggcggatctggcggaggctccacaagcttccagggcagcgtgagcttcaaggacgtgaccgtgggcttcaccctggaggagtggcagcacctggacagcacccagaggagcctgtacagggacgtgatgctggagaactacagcaacctggtgagcctgggctactgcgtgaccaagcccgaggtgatcttcaggctggagcagggcgaggagccctggatcctggaggaggagttccccagccagagcttccccgagagctgggagaccaccagccccaagaaaaagagaaaagtctaagctgccttctgcggggcttgccttctggccatgcccttcttctctcccttgcacctgtacctcttggtctttgaataaagcctgagtaggaaggctagcaaaaaaaaaaaaaaaaaaaaaaaaaaaaaaaaaaaaaaaaaaaaaaaaaaaaaaaaaaaaaaaaaaaaaaaaaaaaaaaa

SEQ ID NO: 6531 - RNA, 5797 nt, synthetic construct
  source 1..5797: mol_type = other RNA
aggaaataagagagaaaagaagagtaagaagaaatataagagccaccatggcccctaagaagaagcgtaaagtgagccggatggaacgcctcgtctacgaggtgcggcagaagtgcagaaacatcgaggacatctgcatctcctgcggatctctgaacgtgaccctggagcacccactgttcatcggcggcatgtgccagaactgtaaaaactgttttctggagtgtgcctatcaatacgacgatgacggctaccagagctactgcaccatctgttgcggcggaagagaggtgctgatgtgtggaaataacaactgctgccggtgcttctgcgtggaatgcgtggacctgctggtgggccccggcgccgcccaggccgctattaaggaagatccttggaactgctacatgtgcggccacaagggcacatacggcctgctgagacggagagaggactggcctagcagactgcagatgttcttcgccaataaccacgaccaggagttcgacccccctaaggtgtaccctcccgtccccgccgagaagagaaagcccatccgggtcctgagcctgttcgatggcatcgccaccggtctgctggtgctgaaggacctgggcatccaggtggataggtacattgcctccgaggtgtgcgaggactccatcaccgtgggaatggtgcgtcatcagggcaagatcatgtacgtgggcgacgtgcggagcgtgacacagaagcatatccaggagtggggccctttcgacctggtgatcggcggcagcccttgcaatgacctgagcatcgtgaacccagcccggaagggcctgtacgagggaaccggcagactgttcttcgagttttacagactgctgcacgacgcccggcctaaggaaggcgacgaccggcccttcttttggctgttcgagaatgtggtggccatgggagtcagcgacaagcgggatattagccggttcctggagagcaaccccgtgatgatcgatgccaaggaagtgagcgccgcccaccgggccagatacttctggggcaatctgcctggcatgaacagacccctggccagcaccgtgaacgacaagctggagctgcaggagtgcctggagcacggccggatcgccaagttcagcaaggtgagaaccatcaccacccgaagcaacagcatcaaacaaggcaaggaccagcactttcctgtgttcatgaacgagaaggaggacatcctgtggtgtaccgagatggagagagtgttcgggttcccagtccactacacagatgtcagcaacatgtctagactggccagacagagactgctgggaagaagctggtccgtccctgtgatcagacacctgttcgcccctctgaaggagtacttcgcctgcgtgagcagcggcaacagcaacgccaacagccggggccccagcttctctagcggcctggtgccactgtccctgagagggagccacatgggccccatggagatctacaaaaccgtgagcgcctggaagcggcagcctgtgcgcgtgctgagcctgtttcggaatatcgataaagtcctgaaaagcctgggattcctggagagcggctctggctccggcggtggcaccctgaagtacgtggaggatgtgacaaacgtggtcagacgggatgtggagaagtggggccccttcgatctggtgtacggcagcacccaacccctgggcagctcttgtgaccggtgccctggctggtacatgtttcagttccaccggatcctgcagtacgccctgccgagacaggagtcccagcggccattcttttggattttcatggacaacttgctgctgaccgaggatgaccaggaaactaccactcggttcctgcagaccgaagccgtgaccctgcaggacgtgagaggccgggactaccagaacgccatgcgggtgtggtccaacatccctggactgaaaagcaagcacgcacctctgacccctaaagaagaggagtacctgcaggcccaggtgcggagcagaagcaagctggacgcccctaaggtggatctgctggtgaagaattgcctcctgcccctgagagagtacttcaagtatttcagccagaatagtctgcccctgggcggcccaagcagcggcgcccctcctcccagcggcggcagcccagccggctccccaacctctaccgaggagggcacctctgagtccgccacccccgagagcggccctggcacctccaccgagcccagcgagggcagcgcacccggcagccctgccggcagccccacctccacagaggagggaaccagcaccgagcccagcgaaggcagcgccccaggcaccagcaccgagcctagtgagggcggctctggcggcggcagcgcccaggagattaaacggatcaacaagatcagaagaagacttgtgaaagacagcaacaccaagaaggccggcaagacaggccccatgaaaaccctgctggttagagtgatgacacccgatctgagagagcggctggaaaacctgagaaagaagcctgaaaatatcccccagcccatcagcaatacatctagagccaacctgaataagctgctgaccgattacaccgaaatgaagaaggcgatcctgcatgtgtactgggaagagttccagaaggaccctgtgggcctgatgagccgggtggcccagcctgccagcaagaagatcgatcagaacaagctgaaacctgagatggacgagaagggcaacctgaccaccgccggctttgcctgctctcagtgtggccagcccctgttcgtgtacaagctggagcaggtgtctgagaagggcaaggcttacaccaactacttcggacggtgcaatgtggccgagcacgaaaagctgatcctgctggcccagctgaagcccgagaaggatagcgacgaagccgtgacatatagcctgggaaagtttgggcagagggccctggatttctacagcattcatgtgaccaaggagtccacccaccccgtgaagcccctggcccagatcgccggaaacagatacgcctccggacctgtgggaaaggccctgagcgacgcatgtatgggcacaatcgcctccttcctgtctaagtaccaggacatcatcatcgaacaccagaaggtggtgaagggcaaccagaagagactggagagcctgcgggagctggccggcaaggaaaacctggaataccctagcgtgaccctgccacctcagcctcacaccaaggagggcgttgatgcctacaacgaagtgatcgcccgggtgcgaatgtgggtgaacctgaacctgtggcagaagctgaagctaagcagagatgatgccaagcctctgctgagactgaagggattcccttcctttcctctggtcgagagacaggccaacgaagtggactggtgggacatggtgtgtaacgtgaagaagctgatcaacgagaaaaaggaggatggcaaggtgttttggcagaatctggctggctacaagagacaggaagccctgagaccatacctgagcagcgaggaagatcggaagaagggaaagaaattcgctcggtaccagctgggcgacctgctgctgcacctggaaaagaagcacggcgaggactggggaaaggtgtacgacgaggcctgggagcggattgacaagaaagtggaaggcctgagcaagcacatcaagctggaagaggaacggagaagcgaggacgcccagagcaaggccgccctgaccgactggctgcgggctaaggccagcttcgtgatcgagggcctgaaggaggccgacaaggacgagttctgcagatgcgagctgaagctgcagaagtggtacggggacctgcggggaaagcccttcgccatcgaagccgagaacagcatcctggacatcagcggcttcagcaagcagtacaactgtgccttcatctggcagaaggacggcgtgaagaagctgaacctgtacctgatcatcaactacttcaagggcggcaagctgcggttcaagaagatcaaacctgaagccttcgaagccaacagattctacaccgtgatcaacaaaaagagcggcgagatcgtgcccatggaggtgaacttcaacttcgacgaccccaacctgatcatcctgcctctggcctttggcaagagacagggcagagaattcatctggaacgacctgctgtccctggaaaccggcagcctgaagctggccaacggaagagtgatcgagaagacactgtacaacagaagaacccggcaggatgagcctgccctgttcgtggccctgaccttcgagcggcgggaggtcctggactcctccaatatcaaaccaatgaacctgatcggcgtggcaagaggcgaaaacatccccgccgtgatcgccctgaccgaccccgagggctgcccactgagccggtttaaggatagcctgggaaacccaacccacatcctgagaatcggcgagagctataaggagaagcagcggaccatccaggccaagaaggaggtggagcagcggagagccggcggctacagccggaagtacgccagcaaagccaagaatctggcagacgatatggtgagaaacaccgctagagatctgctgtactacgccgtgacccaggatgccatgctgatcttcgccaacctgagccggggcttcggccggcagggcaagcggaccttcatggccgagagacagtacacacggatggaggactggctgaccgccaagctggcctacgagggcctgagcaagacctacctgtccaagacactggcccagtacacctccaagacatgcagcaactgtgggtttaccatcaccagcgccgactacgacagggtgctggagaagctgaagaagacagcaacaggctggatgaccacaattaacggcaaggagctgaaggtggagggccagattacctactacaacagatacaagagacagaacgtagtcaaggacctgtccgtcgagctggatagactgagcgaagaatctgtgaacaacgacatctcctcctggacaaagggcagaagcggagaagctctgagcctcctgaagaaaagattctcccatagacccgtgcaggagaagttcgtgtgcctgaactgcggcttcgagacacacgcagccgagcaagccgccctgaacatcgccagatcctggctgttcctgcggagccaggagtacaagaaataccagacaaacaagacaaccggcaacaccgataagagagccttcgtcgagacctggcagtccttttaccggaagaagcttaaggaggtgtggaaacctgccgtgcggtctggcggatctggcggaggctccacaagcatggcccacgacctggtgatgttcagggacgtggccgtggacttcagccaggaggagtgggagtgcctgaacagctaccagaggaacctgtacaaggacgtgatcctggagaactacagcaacctggtgagcctgggctgcagcatcagcaagcccgacgtgatcaccctgctggagcagggcaaggagccctggctggtggtgagggacgagaagaggaggtggagcctggcccccaccttcaccagccccaagaaaaagagaaaagtctaagctgccttctgcggggcttgccttctggccatgcccttcttctctcccttgcacctgtacctcttggtctttgaataaagcctgagtaggaaggctagcaaaaaaaaaaaaaaaaaaaaaaaaaaaaaaaaaaaaaaaaaaaaaaaaaaaaaaaaaaaaaaaaaaaaaaaaaaaaaaaa

SEQ ID NO: 6532 - RNA, 5797 nt, synthetic construct
  source 1..5797: mol_type = other RNA
aggaaataagagagaaaagaagagtaagaagaaatataagagccaccatggcccctaagaagaagcgtaaagtgagccggatggaacgcctcgtctacgaggtgcggcagaagtgcagaaacatcgaggacatctgcatctcctgcggatctctgaacgtgaccctggagcacccactgttcatcggcggcatgtgccagaactgtaaaaactgttttctggagtgtgcctatcaatacgacgatgacggctaccagagctactgcaccatctgttgcggcggaagagaggtgctgatgtgtggaaataacaactgctgccggtgcttctgcgtggaatgcgtggacctgctggtgggccccggcgccgcccaggccgctattaaggaagatccttggaactgctacatgtgcggccacaagggcacatacggcctgctgagacggagagaggactggcctagcagactgcagatgttcttcgccaataaccacgaccaggagttcgacccccctaaggtgtaccctcccgtccccgccgagaagagaaagcccatccgggtcctgagcctgttcgatggcatcgccaccggtctgctggtgctgaaggacctgggcatccaggtggataggtacattgcctccgaggtgtgcgaggactccatcaccgtgggaatggtgcgtcatcagggcaagatcatgtacgtgggcgacgtgcggagcgtgacacagaagcatatccaggagtggggccctttcgacctggtgatcggcggcagcccttgcaatgacctgagcatcgtgaacccagcccggaagggcctgtacgagggaaccggcagactgttcttcgagttttacagactgctgcacgacgcccggcctaaggaaggcgacgaccggcccttcttttggctgttcgagaatgtggtggccatgggagtcagcgacaagcgggatattagccggttcctggagagcaaccccgtgatgatcgatgccaaggaagtgagcgccgcccaccgggccagatacttctggggcaatctgcctggcatgaacagacccctggccagcaccgtgaacgacaagctggagctgcaggagtgcctggagcacggccggatcgccaagttcagcaaggtgagaaccatcaccacccgaagcaacagcatcaaacaaggcaaggaccagcactttcctgtgttcatgaacgagaaggaggacatcctgtggtgtaccgagatggagagagtgttcgggttcccagtccactacacagatgtcagcaacatgtctagactggccagacagagactgctgggaagaagctggtccgtccctgtgatcagacacctgttcgcccctctgaaggagtacttcgcctgcgtgagcagcggcaacagcaacgccaacagccggggccccagcttctctagcggcctggtgccactgtccctgagagggagccacatgggccccatggagatctacaaaaccgtgagcgcctggaagcggcagcctgtgcgcgtgctgagcctgtttcggaatatcgataaagtcctgaaaagcctgggattcctggagagcggctctggctccggcggtggcaccctgaagtacgtggaggatgtgacaaacgtggtcagacgggatgtggagaagtggggccccttcgatctggtgtacggcagcacccaacccctgggcagctcttgtgaccggtgccctggctggtacatgtttcagttccaccggatcctgcagtacgccctgccgagacaggagtcccagcggccattcttttggattttcatggacaacttgctgctgaccgaggatgaccaggaaactaccactcggttcctgcagaccgaagccgtgaccctgcaggacgtgagaggccgggactaccagaacgccatgcgggtgtggtccaacatccctggactgaaaagcaagcacgcacctctgacccctaaagaagaggagtacctgcaggcccaggtgcggagcagaagcaagctggacgcccctaaggtggatctgctggtgaagaattgcctcctgcccctgagagagtacttcaagtatttcagccagaatagtctgcccctgggcggcccaagcagcggcgcccctcctcccagcggcggcagcccagccggctccccaacctctaccgaggagggcacctctgagtccgccacccccgagagcggccctggcacctccaccgagcccagcgagggcagcgcacccggcagccctgccggcagccccacctccacagaggagggaaccagcaccgagcccagcgaaggcagcgccccaggcaccagcaccgagcctagtgagggcggctctggcggcggcagcgcccaggagattaaacggatcaacaagatcagaagaagacttgtgaaagacagcaacaccaagaaggccggcaagacaggccccatgaaaaccctgctggttagagtgatgacacccgatctgagagagcggctggaaaacctgagaaagaagcctgaaaatatcccccagcccatcagcaatacatctagagccaacctgaataagctgctgaccgattacaccgaaatgaagaaggcgatcctgcatgtgtactgggaagagttccagaaggaccctgtgggcctgatgagccgggtggcccagcctgccagcaagaagatcgatcagaacaagctgaaacctgagatggacgagaagggcaacctgaccaccgccggctttgcctgctctcagtgtggccagcccctgttcgtgtacaagctggagcaggtgtctgagaagggcaaggcttacaccaactacttcggacggtgcaatgtggccgagcacgaaaagctgatcctgctggcccagctgaagcccgagaaggatagcgacgaagccgtgacatatagcctgggaaagtttgggcagagggccctggatttctacagcattcatgtgaccaaggagtccacccaccccgtgaagcccctggcccagatcgccggaaacagatacgcctccggacctgtgggaaaggccctgagcgacgcatgtatgggcacaatcgcctccttcctgtctaagtaccaggacatcatcatcgaacaccagaaggtggtgaagggcaaccagaagagactggagagcctgcgggagctggccggcaaggaaaacctggaataccctagcgtgaccctgccacctcagcctcacaccaaggagggcgttgatgcctacaacgaagtgatcgcccgggtgcgaatgtgggtgaacctgaacctgtggcagaagctgaagctaagcagagatgatgccaagcctctgctgagactgaagggattcccttcctttcctctggtcgagagacaggccaacgaagtggactggtgggacatggtgtgtaacgtgaagaagctgatcaacgagaaaaaggaggatggcaaggtgttttggcagaatctggctggctacaagagacaggaagccctgagaccatacctgagcagcgaggaagatcggaagaagggaaagaaattcgctcggtaccagctgggcgacctgctgctgcacctggaaaagaagcacggcgaggactggggaaaggtgtacgacgaggcctgggagcggattgacaagaaagtggaaggcctgagcaagcacatcaagctggaagaggaacggagaagcgaggacgcccagagcaaggccgccctgaccgactggctgcgggctaaggccagcttcgtgatcgagggcctgaaggaggccgacaaggacgagttctgcagatgcgagctgaagctgcagaagtggtacggggacctgcggggaaagcccttcgccatcgaagccgagaacagcatcctggacatcagcggcttcagcaagcagtacaactgtgccttcatctggcagaaggacggcgtgaagaagctgaacctgtacctgatcatcaactacttcaagggcggcaagctgcggttcaagaagatcaaacctgaagccttcgaagccaacagattctacaccgtgatcaacaaaaagagcggcgagatcgtgcccatggaggtgaacttcaacttcgacgaccccaacctgatcatcctgcctctggcctttggcaagagacagggcagagaattcatctggaacgacctgctgtccctggaaaccggcagcctgaagctggccaacggaagagtgatcgagaagacactgtacaacagaagaacccggcaggatgagcctgccctgttcgtggccctgaccttcgagcggcgggaggtcctggactcctccaatatcaaaccaatgaacctgatcggcgtggcaagaggcgaaaacatccccgccgtgatcgccctgaccgaccccgagggctgcccactgagccggtttaaggatagcctgggaaacccaacccacatcctgagaatcggcgagagctataaggagaagcagcggaccatccaggccaagaaggaggtggagcagcggagagccggcggctacagccggaagtacgccagcaaagccaagaatctggcagacgatatggtgagaaacaccgctagagatctgctgtactacgccgtgacccaggatgccatgctgatcttcgccaacctgagccggggcttcggccggcagggcaagcggaccttcatggccgagagacagtacacacggatggaggactggctgaccgccaagctggcctacgagggcctgagcaagacctacctgtccaagacactggcccagtacacctccaagacatgcagcaactgtgggtttaccatcaccagcgccgactacgacagggtgctggagaagctgaagaagacagcaacaggctggatgaccacaattaacggcaaggagctgaaggtggagggccagattacctactacaacagatacaagagacagaacgtagtcaaggacctgtccgtcgagctggatagactgagcgaagaatctgtgaacaacgacatctcctcctggacaaagggcagaagcggagaagctctgagcctcctgaagaaaagattctcccatagacccgtgcaggagaagttcgtgtgcctgaactgcggcttcgagacacacgcagccgagcaagccgccctgaacatcgccagatcctggctgttcctgcggagccaggagtacaagaaataccagacaaacaagacaaccggcaacaccgataagagagccttcgtcgagacctggcagtccttttaccggaagaagcttaaggaggtgtggaaacctgccgtgcggtctggcggatctggcggaggctccacaagcgcccaggagctggtgaccttcaaggacatcgccatcgacttcacccaggaggagtgggccctgctggacaccagccagaggcagctgtacagggacgtgatgctggagaacatcagccacctggtgagcgtgggctaccacctgtgcaagagcgacgtgatcagccagctggagcagggcgtggagctgtggagggacggcagggagttcctgcagggcctgaaccccgacaggaagagcggcaccagccccaagaaaaagagaaaagtctaagctgccttctgcggggcttgccttctggccatgcccttcttctctcccttgcacctgtacctcttggtctttgaataaagcctgagtaggaaggctagcaaaaaaaaaaaaaaaaaaaaaaaaaaaaaaaaaaaaaaaaaaaaaaaaaaaaaaaaaaaaaaaaaaaaaaaaaaaaaaaa

SEQ ID NO: 6533 - RNA, 5797 nt, synthetic construct
  source 1..5797: mol_type = other RNA
aggaaataagagagaaaagaagagtaagaagaaatataagagccaccatggcccctaagaagaagcgtaaagtgagccggatggaacgcctcgtctacgaggtgcggcagaagtgcagaaacatcgaggacatctgcatctcctgcggatctctgaacgtgaccctggagcacccactgttcatcggcggcatgtgccagaactgtaaaaactgttttctggagtgtgcctatcaatacgacgatgacggctaccagagctactgcaccatctgttgcggcggaagagaggtgctgatgtgtggaaataacaactgctgccggtgcttctgcgtggaatgcgtggacctgctggtgggccccggcgccgcccaggccgctattaaggaagatccttggaactgctacatgtgcggccacaagggcacatacggcctgctgagacggagagaggactggcctagcagactgcagatgttcttcgccaataaccacgaccaggagttcgacccccctaaggtgtaccctcccgtccccgccgagaagagaaagcccatccgggtcctgagcctgttcgatggcatcgccaccggtctgctggtgctgaaggacctgggcatccaggtggataggtacattgcctccgaggtgtgcgaggactccatcaccgtgggaatggtgcgtcatcagggcaagatcatgtacgtgggcgacgtgcggagcgtgacacagaagcatatccaggagtggggccctttcgacctggtgatcggcggcagcccttgcaatgacctgagcatcgtgaacccagcccggaagggcctgtacgagggaaccggcagactgttcttcgagttttacagactgctgcacgacgcccggcctaaggaaggcgacgaccggcccttcttttggctgttcgagaatgtggtggccatgggagtcagcgacaagcgggatattagccggttcctggagagcaaccccgtgatgatcgatgccaaggaagtgagcgccgcccaccgggccagatacttctggggcaatctgcctggcatgaacagacccctggccagcaccgtgaacgacaagctggagctgcaggagtgcctggagcacggccggatcgccaagttcagcaaggtgagaaccatcaccacccgaagcaacagcatcaaacaaggcaaggaccagcactttcctgtgttcatgaacgagaaggaggacatcctgtggtgtaccgagatggagagagtgttcgggttcccagtccactacacagatgtcagcaacatgtctagactggccagacagagactgctgggaagaagctggtccgtccctgtgatcagacacctgttcgcccctctgaaggagtacttcgcctgcgtgagcagcggcaacagcaacgccaacagccggggccccagcttctctagcggcctggtgccactgtccctgagagggagccacatgggccccatggagatctacaaaaccgtgagcgcctggaagcggcagcctgtgcgcgtgctgagcctgtttcggaatatcgataaagtcctgaaaagcctgggattcctggagagcggctctggctccggcggtggcaccctgaagtacgtggaggatgtgacaaacgtggtcagacgggatgtggagaagtggggccccttcgatctggtgtacggcagcacccaacccctgggcagctcttgtgaccggtgccctggctggtacatgtttcagttccaccggatcctgcagtacgccctgccgagacaggagtcccagcggccattcttttggattttcatggacaacttgctgctgaccgaggatgaccaggaaactaccactcggttcctgcagaccgaagccgtgaccctgcaggacgtgagaggccgggactaccagaacgccatgcgggtgtggtccaacatccctggactgaaaagcaagcacgcacctctgacccctaaagaagaggagtacctgcaggcccaggtgcggagcagaagcaagctggacgcccctaaggtggatctgctggtgaagaattgcctcctgcccctgagagagtacttcaagtatttcagccagaatagtctgcccctgggcggcccaagcagcggcgcccctcctcccagcggcggcagcccagccggctccccaacctctaccgaggagggcacctctgagtccgccacccccgagagcggccctggcacctccaccgagcccagcgagggcagcgcacccggcagccctgccggcagccccacctccacagaggagggaaccagcaccgagcccagcgaaggcagcgccccaggcaccagcaccgagcctagtgagggcggctctggcggcggcagcgcccaggagattaaacggatcaacaagatcagaagaagacttgtgaaagacagcaacaccaagaaggccggcaagacaggccccatgaaaaccctgctggttagagtgatgacacccgatctgagagagcggctggaaaacctgagaaagaagcctgaaaatatcccccagcccatcagcaatacatctagagccaacctgaataagctgctgaccgattacaccgaaatgaagaaggcgatcctgcatgtgtactgggaagagttccagaaggaccctgtgggcctgatgagccgggtggcccagcctgccagcaagaagatcgatcagaacaagctgaaacctgagatggacgagaagggcaacctgaccaccgccggctttgcctgctctcagtgtggccagcccctgttcgtgtacaagctggagcaggtgtctgagaagggcaaggcttacaccaactacttcggacggtgcaatgtggccgagcacgaaaagctgatcctgctggcccagctgaagcccgagaaggatagcgacgaagccgtgacatatagcctgggaaagtttgggcagagggccctggatttctacagcattcatgtgaccaaggagtccacccaccccgtgaagcccctggcccagatcgccggaaacagatacgcctccggacctgtgggaaaggccctgagcgacgcatgtatgggcacaatcgcctccttcctgtctaagtaccaggacatcatcatcgaacaccagaaggtggtgaagggcaaccagaagagactggagagcctgcgggagctggccggcaaggaaaacctggaataccctagcgtgaccctgccacctcagcctcacaccaaggagggcgttgatgcctacaacgaagtgatcgcccgggtgcgaatgtgggtgaacctgaacctgtggcagaagctgaagctaagcagagatgatgccaagcctctgctgagactgaagggattcccttcctttcctctggtcgagagacaggccaacgaagtggactggtgggacatggtgtgtaacgtgaagaagctgatcaacgagaaaaaggaggatggcaaggtgttttggcagaatctggctggctacaagagacaggaagccctgagaccatacctgagcagcgaggaagatcggaagaagggaaagaaattcgctcggtaccagctgggcgacctgctgctgcacctggaaaagaagcacggcgaggactggggaaaggtgtacgacgaggcctgggagcggattgacaagaaagtggaaggcctgagcaagcacatcaagctggaagaggaacggagaagcgaggacgcccagagcaaggccgccctgaccgactggctgcgggctaaggccagcttcgtgatcgagggcctgaaggaggccgacaaggacgagttctgcagatgcgagctgaagctgcagaagtggtacggggacctgcggggaaagcccttcgccatcgaagccgagaacagcatcctggacatcagcggcttcagcaagcagtacaactgtgccttcatctggcagaaggacggcgtgaagaagctgaacctgtacctgatcatcaactacttcaagggcggcaagctgcggttcaagaagatcaaacctgaagccttcgaagccaacagattctacaccgtgatcaacaaaaagagcggcgagatcgtgcccatggaggtgaacttcaacttcgacgaccccaacctgatcatcctgcctctggcctttggcaagagacagggcagagaattcatctggaacgacctgctgtccctggaaaccggcagcctgaagctggccaacggaagagtgatcgagaagacactgtacaacagaagaacccggcaggatgagcctgccctgttcgtggccctgaccttcgagcggcgggaggtcctggactcctccaatatcaaaccaatgaacctgatcggcgtggcaagaggcgaaaacatccccgccgtgatcgccctgaccgaccccgagggctgcccactgagccggtttaaggatagcctgggaaacccaacccacatcctgagaatcggcgagagctataaggagaagcagcggaccatccaggccaagaaggaggtggagcagcggagagccggcggctacagccggaagtacgccagcaaagccaagaatctggcagacgatatggtgagaaacaccgctagagatctgctgtactacgccgtgacccaggatgccatgctgatcttcgccaacctgagccggggcttcggccggcagggcaagcggaccttcatggccgagagacagtacacacggatggaggactggctgaccgccaagctggcctacgagggcctgagcaagacctacctgtccaagacactggcccagtacacctccaagacatgcagcaactgtgggtttaccatcaccagcgccgactacgacagggtgctggagaagctgaagaagacagcaacaggctggatgaccacaattaacggcaaggagctgaaggtggagggccagattacctactacaacagatacaagagacagaacgtagtcaaggacctgtccgtcgagctggatagactgagcgaagaatctgtgaacaacgacatctcctcctggacaaagggcagaagcggagaagctctgagcctcctgaagaaaagattctcccatagacccgtgcaggagaagttcgtgtgcctgaactgcggcttcgagacacacgcagccgagcaagccgccctgaacatcgccagatcctggctgttcctgcggagccaggagtacaagaaataccagacaaacaagacaaccggcaacaccgataagagagccttcgtcgagacctggcagtccttttaccggaagaagcttaaggaggtgtggaaacctgccgtgcggtctggcggatctggcggaggctccacaagcaggcccgagagcgtgaccttcgaggacgtggccgtgtacttcagcgagaacgagtggatcggcctgggccccgcccagagggccctgtacagggacgtgatgctggagaactacggcgccgtggccagcctggccttccccttccccaagcccgccctgatcagccagctggagaggggcgaggccccctggtgcagcgtgccctggggcgccctggacggcgaggaccccaggagcatcagcaccagccccaagaaaaagagaaaagtctaagctgccttctgcggggcttgccttctggccatgcccttcttctctcccttgcacctgtacctcttggtctttgaataaagcctgagtaggaaggctagcaaaaaaaaaaaaaaaaaaaaaaaaaaaaaaaaaaaaaaaaaaaaaaaaaaaaaaaaaaaaaaaaaaaaaaaaaaaaaaaa

SEQ ID NO: 6534 - RNA, 5797 nt, synthetic construct
  source 1..5797: mol_type = other RNA
aggaaataagagagaaaagaagagtaagaagaaatataagagccaccatggcccctaagaagaagcgtaaagtgagccggatggaacgcctcgtctacgaggtgcggcagaagtgcagaaacatcgaggacatctgcatctcctgcggatctctgaacgtgaccctggagcacccactgttcatcggcggcatgtgccagaactgtaaaaactgttttctggagtgtgcctatcaatacgacgatgacggctaccagagctactgcaccatctgttgcggcggaagagaggtgctgatgtgtggaaataacaactgctgccggtgcttctgcgtggaatgcgtggacctgctggtgggccccggcgccgcccaggccgctattaaggaagatccttggaactgctacatgtgcggccacaagggcacatacggcctgctgagacggagagaggactggcctagcagactgcagatgttcttcgccaataaccacgaccaggagttcgacccccctaaggtgtaccctcccgtccccgccgagaagagaaagcccatccgggtcctgagcctgttcgatggcatcgccaccggtctgctggtgctgaaggacctgggcatccaggtggataggtacattgcctccgaggtgtgcgaggactccatcaccgtgggaatggtgcgtcatcagggcaagatcatgtacgtgggcgacgtgcggagcgtgacacagaagcatatccaggagtggggccctttcgacctggtgatcggcggcagcccttgcaatgacctgagcatcgtgaacccagcccggaagggcctgtacgagggaaccggcagactgttcttcgagttttacagactgctgcacgacgcccggcctaaggaaggcgacgaccggcccttcttttggctgttcgagaatgtggtggccatgggagtcagcgacaagcgggatattagccggttcctggagagcaaccccgtgatgatcgatgccaaggaagtgagcgccgcccaccgggccagatacttctggggcaatctgcctggcatgaacagacccctggccagcaccgtgaacgacaagctggagctgcaggagtgcctggagcacggccggatcgccaagttcagcaaggtgagaaccatcaccacccgaagcaacagcatcaaacaaggcaaggaccagcactttcctgtgttcatgaacgagaaggaggacatcctgtggtgtaccgagatggagagagtgttcgggttcccagtccactacacagatgtcagcaacatgtctagactggccagacagagactgctgggaagaagctggtccgtccctgtgatcagacacctgttcgcccctctgaaggagtacttcgcctgcgtgagcagcggcaacagcaacgccaacagccggggccccagcttctctagcggcctggtgccactgtccctgagagggagccacatgggccccatggagatctacaaaaccgtgagcgcctggaagcggcagcctgtgcgcgtgctgagcctgtttcggaatatcgataaagtcctgaaaagcctgggattcctggagagcggctctggctccggcggtggcaccctgaagtacgtggaggatgtgacaaacgtggtcagacgggatgtggagaagtggggccccttcgatctggtgtacggcagcacccaacccctgggcagctcttgtgaccggtgccctggctggtacatgtttcagttccaccggatcctgcagtacgccctgccgagacaggagtcccagcggccattcttttggattttcatggacaacttgctgctgaccgaggatgaccaggaaactaccactcggttcctgcagaccgaagccgtgaccctgcaggacgtgagaggccgggactaccagaacgccatgcgggtgtggtccaacatccctggactgaaaagcaagcacgcacctctgacccctaaagaagaggagtacctgcaggcccaggtgcggagcagaagcaagctggacgcccctaaggtggatctgctggtgaagaattgcctcctgcccctgagagagtacttcaagtatttcagccagaatagtctgcccctgggcggcccaagcagcggcgcccctcctcccagcggcggcagcccagccggctccccaacctctaccgaggagggcacctctgagtccgccacccccgagagcggccctggcacctccaccgagcccagcgagggcagcgcacccggcagccctgccggcagccccacctccacagaggagggaaccagcaccgagcccagcgaaggcagcgccccaggcaccagcaccgagcctagtgagggcggctctggcggcggcagcgcccaggagattaaacggatcaacaagatcagaagaagacttgtgaaagacagcaacaccaagaaggccggcaagacaggccccatgaaaaccctgctggttagagtgatgacacccgatctgagagagcggctggaaaacctgagaaagaagcctgaaaatatcccccagcccatcagcaatacatctagagccaacctgaataagctgctgaccgattacaccgaaatgaagaaggcgatcctgcatgtgtactgggaagagttccagaaggaccctgtgggcctgatgagccgggtggcccagcctgccagcaagaagatcgatcagaacaagctgaaacctgagatggacgagaagggcaacctgaccaccgccggctttgcctgctctcagtgtggccagcccctgttcgtgtacaagctggagcaggtgtctgagaagggcaaggcttacaccaactacttcggacggtgcaatgtggccgagcacgaaaagctgatcctgctggcccagctgaagcccgagaaggatagcgacgaagccgtgacatatagcctgggaaagtttgggcagagggccctggatttctacagcattcatgtgaccaaggagtccacccaccccgtgaagcccctggcccagatcgccggaaacagatacgcctccggacctgtgggaaaggccctgagcgacgcatgtatgggcacaatcgcctccttcctgtctaagtaccaggacatcatcatcgaacaccagaaggtggtgaagggcaaccagaagagactggagagcctgcgggagctggccggcaaggaaaacctggaataccctagcgtgaccctgccacctcagcctcacaccaaggagggcgttgatgcctacaacgaagtgatcgcccgggtgcgaatgtgggtgaacctgaacctgtggcagaagctgaagctaagcagagatgatgccaagcctctgctgagactgaagggattcccttcctttcctctggtcgagagacaggccaacgaagtggactggtgggacatggtgtgtaacgtgaagaagctgatcaacgagaaaaaggaggatggcaaggtgttttggcagaatctggctggctacaagagacaggaagccctgagaccatacctgagcagcgaggaagatcggaagaagggaaagaaattcgctcggtaccagctgggcgacctgctgctgcacctggaaaagaagcacggcgaggactggggaaaggtgtacgacgaggcctgggagcggattgacaagaaagtggaaggcctgagcaagcacatcaagctggaagaggaacggagaagcgaggacgcccagagcaaggccgccctgaccgactggctgcgggctaaggccagcttcgtgatcgagggcctgaaggaggccgacaaggacgagttctgcagatgcgagctgaagctgcagaagtggtacggggacctgcggggaaagcccttcgccatcgaagccgagaacagcatcctggacatcagcggcttcagcaagcagtacaactgtgccttcatctggcagaaggacggcgtgaagaagctgaacctgtacctgatcatcaactacttcaagggcggcaagctgcggttcaagaagatcaaacctgaagccttcgaagccaacagattctacaccgtgatcaacaaaaagagcggcgagatcgtgcccatggaggtgaacttcaacttcgacgaccccaacctgatcatcctgcctctggcctttggcaagagacagggcagagaattcatctggaacgacctgctgtccctggaaaccggcagcctgaagctggccaacggaagagtgatcgagaagacactgtacaacagaagaacccggcaggatgagcctgccctgttcgtggccctgaccttcgagcggcgggaggtcctggactcctccaatatcaaaccaatgaacctgatcggcgtggcaagaggcgaaaacatccccgccgtgatcgccctgaccgaccccgagggctgcccactgagccggtttaaggatagcctgggaaacccaacccacatcctgagaatcggcgagagctataaggagaagcagcggaccatccaggccaagaaggaggtggagcagcggagagccggcggctacagccggaagtacgccagcaaagccaagaatctggcagacgatatggtgagaaacaccgctagagatctgctgtactacgccgtgacccaggatgccatgctgatcttcgccaacctgagccggggcttcggccggcagggcaagcggaccttcatggccgagagacagtacacacggatggaggactggctgaccgccaagctggcctacgagggcctgagcaagacctacctgtccaagacactggcccagtacacctccaagacatgcagcaactgtgggtttaccatcaccagcgccgactacgacagggtgctggagaagctgaagaagacagcaacaggctggatgaccacaattaacggcaaggagctgaaggtggagggccagattacctactacaacagatacaagagacagaacgtagtcaaggacctgtccgtcgagctggatagactgagcgaagaatctgtgaacaacgacatctcctcctggacaaagggcagaagcggagaagctctgagcctcctgaagaaaagattctcccatagacccgtgcaggagaagttcgtgtgcctgaactgcggcttcgagacacacgcagccgagcaagccgccctgaacatcgccagatcctggctgttcctgcggagccaggagtacaagaaataccagacaaacaagacaaccggcaacaccgataagagagccttcgtcgagacctggcagtccttttaccggaagaagcttaaggaggtgtggaaacctgccgtgcggtctggcggatctggcggaggctccacaagcgcccagggcagcgtgatgttcagcgacgtgagcatcgacttcagccaggaggagtgggagtgcctgaacgacgaccagagggacctgtacagggacgtgatgctggagaactacagcaacctggtgagcatgggccactgcatcagcaagcccgacgtgatcagcttcctggagcagggcaaggagccctggctggtggacagggagcccaccaggtaccagtggcccgtgctggagagcaggaccagccccaagaaaaagagaaaagtctaagctgccttctgcggggcttgccttctggccatgcccttcttctctcccttgcacctgtacctcttggtctttgaataaagcctgagtaggaaggctagcaaaaaaaaaaaaaaaaaaaaaaaaaaaaaaaaaaaaaaaaaaaaaaaaaaaaaaaaaaaaaaaaaaaaaaaaaaaaaaaa

SEQ ID NO: 6535 - RNA, 5797 nt, synthetic construct
  source 1..5797: mol_type = other RNA
aggaaataagagagaaaagaagagtaagaagaaatataagagccaccatggcccctaagaagaagcgtaaagtgagccggatggaacgcctcgtctacgaggtgcggcagaagtgcagaaacatcgaggacatctgcatctcctgcggatctctgaacgtgaccctggagcacccactgttcatcggcggcatgtgccagaactgtaaaaactgttttctggagtgtgcctatcaatacgacgatgacggctaccagagctactgcaccatctgttgcggcggaagagaggtgctgatgtgtggaaataacaactgctgccggtgcttctgcgtggaatgcgtggacctgctggtgggccccggcgccgcccaggccgctattaaggaagatccttggaactgctacatgtgcggccacaagggcacatacggcctgctgagacggagagaggactggcctagcagactgcagatgttcttcgccaataaccacgaccaggagttcgacccccctaaggtgtaccctcccgtccccgccgagaagagaaagcccatccgggtcctgagcctgttcgatggcatcgccaccggtctgctggtgctgaaggacctgggcatccaggtggataggtacattgcctccgaggtgtgcgaggactccatcaccgtgggaatggtgcgtcatcagggcaagatcatgtacgtgggcgacgtgcggagcgtgacacagaagcatatccaggagtggggccctttcgacctggtgatcggcggcagcccttgcaatgacctgagcatcgtgaacccagcccggaagggcctgtacgagggaaccggcagactgttcttcgagttttacagactgctgcacgacgcccggcctaaggaaggcgacgaccggcccttcttttggctgttcgagaatgtggtggccatgggagtcagcgacaagcgggatattagccggttcctggagagcaaccccgtgatgatcgatgccaaggaagtgagcgccgcccaccgggccagatacttctggggcaatctgcctggcatgaacagacccctggccagcaccgtgaacgacaagctggagctgcaggagtgcctggagcacggccggatcgccaagttcagcaaggtgagaaccatcaccacccgaagcaacagcatcaaacaaggcaaggaccagcactttcctgtgttcatgaacgagaaggaggacatcctgtggtgtaccgagatggagagagtgttcgggttcccagtccactacacagatgtcagcaacatgtctagactggccagacagagactgctgggaagaagctggtccgtccctgtgatcagacacctgttcgcccctctgaaggagtacttcgcctgcgtgagcagcggcaacagcaacgccaacagccggggccccagcttctctagcggcctggtgccactgtccctgagagggagccacatgggccccatggagatctacaaaaccgtgagcgcctggaagcggcagcctgtgcgcgtgctgagcctgtttcggaatatcgataaagtcctgaaaagcctgggattcctggagagcggctctggctccggcggtggcaccctgaagtacgtggaggatgtgacaaacgtggtcagacgggatgtggagaagtggggccccttcgatctggtgtacggcagcacccaacccctgggcagctcttgtgaccggtgccctggctggtacatgtttcagttccaccggatcctgcagtacgccctgccgagacaggagtcccagcggccattcttttggattttcatggacaacttgctgctgaccgaggatgaccaggaaactaccactcggttcctgcagaccgaagccgtgaccctgcaggacgtgagaggccgggactaccagaacgccatgcgggtgtggtccaacatccctggactgaaaagcaagcacgcacctctgacccctaaagaagaggagtacctgcaggcccaggtgcggagcagaagcaagctggacgcccctaaggtggatctgctggtgaagaattgcctcctgcccctgagagagtacttcaagtatttcagccagaatagtctgcccctgggcggcccaagcagcggcgcccctcctcccagcggcggcagcccagccggctccccaacctctaccgaggagggcacctctgagtccgccacccccgagagcggccctggcacctccaccgagcccagcgagggcagcgcacccggcagccctgccggcagccccacctccacagaggagggaaccagcaccgagcccagcgaaggcagcgccccaggcaccagcaccgagcctagtgagggcggctctggcggcggcagcgcccaggagattaaacggatcaacaagatcagaagaagacttgtgaaagacagcaacaccaagaaggccggcaagacaggccccatgaaaaccctgctggttagagtgatgacacccgatctgagagagcggctggaaaacctgagaaagaagcctgaaaatatcccccagcccatcagcaatacatctagagccaacctgaataagctgctgaccgattacaccgaaatgaagaaggcgatcctgcatgtgtactgggaagagttccagaaggaccctgtgggcctgatgagccgggtggcccagcctgccagcaagaagatcgatcagaacaagctgaaacctgagatggacgagaagggcaacctgaccaccgccggctttgcctgctctcagtgtggccagcccctgttcgtgtacaagctggagcaggtgtctgagaagggcaaggcttacaccaactacttcggacggtgcaatgtggccgagcacgaaaagctgatcctgctggcccagctgaagcccgagaaggatagcgacgaagccgtgacatatagcctgggaaagtttgggcagagggccctggatttctacagcattcatgtgaccaaggagtccacccaccccgtgaagcccctggcccagatcgccggaaacagatacgcctccggacctgtgggaaaggccctgagcgacgcatgtatgggcacaatcgcctccttcctgtctaagtaccaggacatcatcatcgaacaccagaaggtggtgaagggcaaccagaagagactggagagcctgcgggagctggccggcaaggaaaacctggaataccctagcgtgaccctgccacctcagcctcacaccaaggagggcgttgatgcctacaacgaagtgatcgcccgggtgcgaatgtgggtgaacctgaacctgtggcagaagctgaagctaagcagagatgatgccaagcctctgctgagactgaagggattcccttcctttcctctggtcgagagacaggccaacgaagtggactggtgggacatggtgtgtaacgtgaagaagctgatcaacgagaaaaaggaggatggcaaggtgttttggcagaatctggctggctacaagagacaggaagccctgagaccatacctgagcagcgaggaagatcggaagaagggaaagaaattcgctcggtaccagctgggcgacctgctgctgcacctggaaaagaagcacggcgaggactggggaaaggtgtacgacgaggcctgggagcggattgacaagaaagtggaaggcctgagcaagcacatcaagctggaagaggaacggagaagcgaggacgcccagagcaaggccgccctgaccgactggctgcgggctaaggccagcttcgtgatcgagggcctgaaggaggccgacaaggacgagttctgcagatgcgagctgaagctgcagaagtggtacggggacctgcggggaaagcccttcgccatcgaagccgagaacagcatcctggacatcagcggcttcagcaagcagtacaactgtgccttcatctggcagaaggacggcgtgaagaagctgaacctgtacctgatcatcaactacttcaagggcggcaagctgcggttcaagaagatcaaacctgaagccttcgaagccaacagattctacaccgtgatcaacaaaaagagcggcgagatcgtgcccatggaggtgaacttcaacttcgacgaccccaacctgatcatcctgcctctggcctttggcaagagacagggcagagaattcatctggaacgacctgctgtccctggaaaccggcagcctgaagctggccaacggaagagtgatcgagaagacactgtacaacagaagaacccggcaggatgagcctgccctgttcgtggccctgaccttcgagcggcgggaggtcctggactcctccaatatcaaaccaatgaacctgatcggcgtggcaagaggcgaaaacatccccgccgtgatcgccctgaccgaccccgagggctgcccactgagccggtttaaggatagcctgggaaacccaacccacatcctgagaatcggcgagagctataaggagaagcagcggaccatccaggccaagaaggaggtggagcagcggagagccggcggctacagccggaagtacgccagcaaagccaagaatctggcagacgatatggtgagaaacaccgctagagatctgctgtactacgccgtgacccaggatgccatgctgatcttcgccaacctgagccggggcttcggccggcagggcaagcggaccttcatggccgagagacagtacacacggatggaggactggctgaccgccaagctggcctacgagggcctgagcaagacctacctgtccaagacactggcccagtacacctccaagacatgcagcaactgtgggtttaccatcaccagcgccgactacgacagggtgctggagaagctgaagaagacagcaacaggctggatgaccacaattaacggcaaggagctgaaggtggagggccagattacctactacaacagatacaagagacagaacgtagtcaaggacctgtccgtcgagctggatagactgagcgaagaatctgtgaacaacgacatctcctcctggacaaagggcagaagcggagaagctctgagcctcctgaagaaaagattctcccatagacccgtgcaggagaagttcgtgtgcctgaactgcggcttcgagacacacgcagccgagcaagccgccctgaacatcgccagatcctggctgttcctgcggagccaggagtacaagaaataccagacaaacaagacaaccggcaacaccgataagagagccttcgtcgagacctggcagtccttttaccggaagaagcttaaggaggtgtggaaacctgccgtgcggtctggcggatctggcggaggctccacaagcccccaggagcccgtgaccttcgaggacgtggccgtgtacttcacccagaaccagtgggccagcctggaccccacccagagggccctgtacagggaggtgatgctggagaactacgccagcgtggccagcctggtggccttccccttccccaagcccgacctggtgagccagctggagaggggcgaggccccctggagccccgacccctgggaggccgaggtgctgaagggcacctgccccggcaccagccccaagaaaaagagaaaagtctaagctgccttctgcggggcttgccttctggccatgcccttcttctctcccttgcacctgtacctcttggtctttgaataaagcctgagtaggaaggctagcaaaaaaaaaaaaaaaaaaaaaaaaaaaaaaaaaaaaaaaaaaaaaaaaaaaaaaaaaaaaaaaaaaaaaaaaaaaaaaaa

SEQ ID NO: 6536 - RNA, 5797 nt, synthetic construct
  source 1..5797: mol_type = other RNA
aggaaataagagagaaaagaagagtaagaagaaatataagagccaccatggcccctaagaagaagcgtaaagtgagccggatggaacgcctcgtctacgaggtgcggcagaagtgcagaaacatcgaggacatctgcatctcctgcggatctctgaacgtgaccctggagcacccactgttcatcggcggcatgtgccagaactgtaaaaactgttttctggagtgtgcctatcaatacgacgatgacggctaccagagctactgcaccatctgttgcggcggaagagaggtgctgatgtgtggaaataacaactgctgccggtgcttctgcgtggaatgcgtggacctgctggtgggccccggcgccgcccaggccgctattaaggaagatccttggaactgctacatgtgcggccacaagggcacatacggcctgctgagacggagagaggactggcctagcagactgcagatgttcttcgccaataaccacgaccaggagttcgacccccctaaggtgtaccctcccgtccccgccgagaagagaaagcccatccgggtcctgagcctgttcgatggcatcgccaccggtctgctggtgctgaaggacctgggcatccaggtggataggtacattgcctccgaggtgtgcgaggactccatcaccgtgggaatggtgcgtcatcagggcaagatcatgtacgtgggcgacgtgcggagcgtgacacagaagcatatccaggagtggggccctttcgacctggtgatcggcggcagcccttgcaatgacctgagcatcgtgaacccagcccggaagggcctgtacgagggaaccggcagactgttcttcgagttttacagactgctgcacgacgcccggcctaaggaaggcgacgaccggcccttcttttggctgttcgagaatgtggtggccatgggagtcagcgacaagcgggatattagccggttcctggagagcaaccccgtgatgatcgatgccaaggaagtgagcgccgcccaccgggccagatacttctggggcaatctgcctggcatgaacagacccctggccagcaccgtgaacgacaagctggagctgcaggagtgcctggagcacggccggatcgccaagttcagcaaggtgagaaccatcaccacccgaagcaacagcatcaaacaaggcaaggaccagcactttcctgtgttcatgaacgagaaggaggacatcctgtggtgtaccgagatggagagagtgttcgggttcccagtccactacacagatgtcagcaacatgtctagactggccagacagagactgctgggaagaagctggtccgtccctgtgatcagacacctgttcgcccctctgaaggagtacttcgcctgcgtgagcagcggcaacagcaacgccaacagccggggccccagcttctctagcggcctggtgccactgtccctgagagggagccacatgggccccatggagatctacaaaaccgtgagcgcctggaagcggcagcctgtgcgcgtgctgagcctgtttcggaatatcgataaagtcctgaaaagcctgggattcctggagagcggctctggctccggcggtggcaccctgaagtacgtggaggatgtgacaaacgtggtcagacgggatgtggagaagtggggccccttcgatctggtgtacggcagcacccaacccctgggcagctcttgtgaccggtgccctggctggtacatgtttcagttccaccggatcctgcagtacgccctgccgagacaggagtcccagcggccattcttttggattttcatggacaacttgctgctgaccgaggatgaccaggaaactaccactcggttcctgcagaccgaagccgtgaccctgcaggacgtgagaggccgggactaccagaacgccatgcgggtgtggtccaacatccctggactgaaaagcaagcacgcacctctgacccctaaagaagaggagtacctgcaggcccaggtgcggagcagaagcaagctggacgcccctaaggtggatctgctggtgaagaattgcctcctgcccctgagagagtacttcaagtatttcagccagaatagtctgcccctgggcggcccaagcagcggcgcccctcctcccagcggcggcagcccagccggctccccaacctctaccgaggagggcacctctgagtccgccacccccgagagcggccctggcacctccaccgagcccagcgagggcagcgcacccggcagccctgccggcagccccacctccacagaggagggaaccagcaccgagcccagcgaaggcagcgccccaggcaccagcaccgagcctagtgagggcggctctggcggcggcagcgcccaggagattaaacggatcaacaagatcagaagaagacttgtgaaagacagcaacaccaagaaggccggcaagacaggccccatgaaaaccctgctggttagagtgatgacacccgatctgagagagcggctggaaaacctgagaaagaagcctgaaaatatcccccagcccatcagcaatacatctagagccaacctgaataagctgctgaccgattacaccgaaatgaagaaggcgatcctgcatgtgtactgggaagagttccagaaggaccctgtgggcctgatgagccgggtggcccagcctgccagcaagaagatcgatcagaacaagctgaaacctgagatggacgagaagggcaacctgaccaccgccggctttgcctgctctcagtgtggccagcccctgttcgtgtacaagctggagcaggtgtctgagaagggcaaggcttacaccaactacttcggacggtgcaatgtggccgagcacgaaaagctgatcctgctggcccagctgaagcccgagaaggatagcgacgaagccgtgacatatagcctgggaaagtttgggcagagggccctggatttctacagcattcatgtgaccaaggagtccacccaccccgtgaagcccctggcccagatcgccggaaacagatacgcctccggacctgtgggaaaggccctgagcgacgcatgtatgggcacaatcgcctccttcctgtctaagtaccaggacatcatcatcgaacaccagaaggtggtgaagggcaaccagaagagactggagagcctgcgggagctggccggcaaggaaaacctggaataccctagcgtgaccctgccacctcagcctcacaccaaggagggcgttgatgcctacaacgaagtgatcgcccgggtgcgaatgtgggtgaacctgaacctgtggcagaagctgaagctaagcagagatgatgccaagcctctgctgagactgaagggattcccttcctttcctctggtcgagagacaggccaacgaagtggactggtgggacatggtgtgtaacgtgaagaagctgatcaacgagaaaaaggaggatggcaaggtgttttggcagaatctggctggctacaagagacaggaagccctgagaccatacctgagcagcgaggaagatcggaagaagggaaagaaattcgctcggtaccagctgggcgacctgctgctgcacctggaaaagaagcacggcgaggactggggaaaggtgtacgacgaggcctgggagcggattgacaagaaagtggaaggcctgagcaagcacatcaagctggaagaggaacggagaagcgaggacgcccagagcaaggccgccctgaccgactggctgcgggctaaggccagcttcgtgatcgagggcctgaaggaggccgacaaggacgagttctgcagatgcgagctgaagctgcagaagtggtacggggacctgcggggaaagcccttcgccatcgaagccgagaacagcatcctggacatcagcggcttcagcaagcagtacaactgtgccttcatctggcagaaggacggcgtgaagaagctgaacctgtacctgatcatcaactacttcaagggcggcaagctgcggttcaagaagatcaaacctgaagccttcgaagccaacagattctacaccgtgatcaacaaaaagagcggcgagatcgtgcccatggaggtgaacttcaacttcgacgaccccaacctgatcatcctgcctctggcctttggcaagagacagggcagagaattcatctggaacgacctgctgtccctggaaaccggcagcctgaagctggccaacggaagagtgatcgagaagacactgtacaacagaagaacccggcaggatgagcctgccctgttcgtggccctgaccttcgagcggcgggaggtcctggactcctccaatatcaaaccaatgaacctgatcggcgtggcaagaggcgaaaacatccccgccgtgatcgccctgaccgaccccgagggctgcccactgagccggtttaaggatagcctgggaaacccaacccacatcctgagaatcggcgagagctataaggagaagcagcggaccatccaggccaagaaggaggtggagcagcggagagccggcggctacagccggaagtacgccagcaaagccaagaatctggcagacgatatggtgagaaacaccgctagagatctgctgtactacgccgtgacccaggatgccatgctgatcttcgccaacctgagccggggcttcggccggcagggcaagcggaccttcatggccgagagacagtacacacggatggaggactggctgaccgccaagctggcctacgagggcctgagcaagacctacctgtccaagacactggcccagtacacctccaagacatgcagcaactgtgggtttaccatcaccagcgccgactacgacagggtgctggagaagctgaagaagacagcaacaggctggatgaccacaattaacggcaaggagctgaaggtggagggccagattacctactacaacagatacaagagacagaacgtagtcaaggacctgtccgtcgagctggatagactgagcgaagaatctgtgaacaacgacatctcctcctggacaaagggcagaagcggagaagctctgagcctcctgaagaaaagattctcccatagacccgtgcaggagaagttcgtgtgcctgaactgcggcttcgagacacacgcagccgagcaagccgccctgaacatcgccagatcctggctgttcctgcggagccaggagtacaagaaataccagacaaacaagacaaccggcaacaccgataagagagccttcgtcgagacctggcagtccttttaccggaagaagcttaaggaggtgtggaaacctgccgtgcggtctggcggatctggcggaggctccacaagcatgggcctggtgagcttcgaggacatcgccgtgtacttcaacctggaggagtggcaggacctggacaccgcccagaggaccctgtacagggacgtgatgctggagacctacagcagcctggtgttcctggacccctgcatcgccaagcccaagctgatcttcaacctggagaggggcttcggcccctggagcctggccgaggccagcagcaggagcctgcccggcgtgcacaacgtgagcaccaccagccccaagaaaaagagaaaagtctaagctgccttctgcggggcttgccttctggccatgcccttcttctctcccttgcacctgtacctcttggtctttgaataaagcctgagtaggaaggctagcaaaaaaaaaaaaaaaaaaaaaaaaaaaaaaaaaaaaaaaaaaaaaaaaaaaaaaaaaaaaaaaaaaaaaaaaaaaaaaaa

SEQ ID NO: 6537 - RNA, 5797 nt, synthetic construct
  source 1..5797: mol_type = other RNA
aggaaataagagagaaaagaagagtaagaagaaatataagagccaccatggcccctaagaagaagcgtaaagtgagccggatggaacgcctcgtctacgaggtgcggcagaagtgcagaaacatcgaggacatctgcatctcctgcggatctctgaacgtgaccctggagcacccactgttcatcggcggcatgtgccagaactgtaaaaactgttttctggagtgtgcctatcaatacgacgatgacggctaccagagctactgcaccatctgttgcggcggaagagaggtgctgatgtgtggaaataacaactgctgccggtgcttctgcgtggaatgcgtggacctgctggtgggccccggcgccgcccaggccgctattaaggaagatccttggaactgctacatgtgcggccacaagggcacatacggcctgctgagacggagagaggactggcctagcagactgcagatgttcttcgccaataaccacgaccaggagttcgacccccctaaggtgtaccctcccgtccccgccgagaagagaaagcccatccgggtcctgagcctgttcgatggcatcgccaccggtctgctggtgctgaaggacctgggcatccaggtggataggtacattgcctccgaggtgtgcgaggactccatcaccgtgggaatggtgcgtcatcagggcaagatcatgtacgtgggcgacgtgcggagcgtgacacagaagcatatccaggagtggggccctttcgacctggtgatcggcggcagcccttgcaatgacctgagcatcgtgaacccagcccggaagggcctgtacgagggaaccggcagactgttcttcgagttttacagactgctgcacgacgcccggcctaaggaaggcgacgaccggcccttcttttggctgttcgagaatgtggtggccatgggagtcagcgacaagcgggatattagccggttcctggagagcaaccccgtgatgatcgatgccaaggaagtgagcgccgcccaccgggccagatacttctggggcaatctgcctggcatgaacagacccctggccagcaccgtgaacgacaagctggagctgcaggagtgcctggagcacggccggatcgccaagttcagcaaggtgagaaccatcaccacccgaagcaacagcatcaaacaaggcaaggaccagcactttcctgtgttcatgaacgagaaggaggacatcctgtggtgtaccgagatggagagagtgttcgggttcccagtccactacacagatgtcagcaacatgtctagactggccagacagagactgctgggaagaagctggtccgtccctgtgatcagacacctgttcgcccctctgaaggagtacttcgcctgcgtgagcagcggcaacagcaacgccaacagccggggccccagcttctctagcggcctggtgccactgtccctgagagggagccacatgggccccatggagatctacaaaaccgtgagcgcctggaagcggcagcctgtgcgcgtgctgagcctgtttcggaatatcgataaagtcctgaaaagcctgggattcctggagagcggctctggctccggcggtggcaccctgaagtacgtggaggatgtgacaaacgtggtcagacgggatgtggagaagtggggccccttcgatctggtgtacggcagcacccaacccctgggcagctcttgtgaccggtgccctggctggtacatgtttcagttccaccggatcctgcagtacgccctgccgagacaggagtcccagcggccattcttttggattttcatggacaacttgctgctgaccgaggatgaccaggaaactaccactcggttcctgcagaccgaagccgtgaccctgcaggacgtgagaggccgggactaccagaacgccatgcgggtgtggtccaacatccctggactgaaaagcaagcacgcacctctgacccctaaagaagaggagtacctgcaggcccaggtgcggagcagaagcaagctggacgcccctaaggtggatctgctggtgaagaattgcctcctgcccctgagagagtacttcaagtatttcagccagaatagtctgcccctgggcggcccaagcagcggcgcccctcctcccagcggcggcagcccagccggctccccaacctctaccgaggagggcacctctgagtccgccacccccgagagcggccctggcacctccaccgagcccagcgagggcagcgcacccggcagccctgccggcagccccacctccacagaggagggaaccagcaccgagcccagcgaaggcagcgccccaggcaccagcaccgagcctagtgagggcggctctggcggcggcagcgcccaggagattaaacggatcaacaagatcagaagaagacttgtgaaagacagcaacaccaagaaggccggcaagacaggccccatgaaaaccctgctggttagagtgatgacacccgatctgagagagcggctggaaaacctgagaaagaagcctgaaaatatcccccagcccatcagcaatacatctagagccaacctgaataagctgctgaccgattacaccgaaatgaagaaggcgatcctgcatgtgtactgggaagagttccagaaggaccctgtgggcctgatgagccgggtggcccagcctgccagcaagaagatcgatcagaacaagctgaaacctgagatggacgagaagggcaacctgaccaccgccggctttgcctgctctcagtgtggccagcccctgttcgtgtacaagctggagcaggtgtctgagaagggcaaggcttacaccaactacttcggacggtgcaatgtggccgagcacgaaaagctgatcctgctggcccagctgaagcccgagaaggatagcgacgaagccgtgacatatagcctgggaaagtttgggcagagggccctggatttctacagcattcatgtgaccaaggagtccacccaccccgtgaagcccctggcccagatcgccggaaacagatacgcctccggacctgtgggaaaggccctgagcgacgcatgtatgggcacaatcgcctccttcctgtctaagtaccaggacatcatcatcgaacaccagaaggtggtgaagggcaaccagaagagactggagagcctgcgggagctggccggcaaggaaaacctggaataccctagcgtgaccctgccacctcagcctcacaccaaggagggcgttgatgcctacaacgaagtgatcgcccgggtgcgaatgtgggtgaacctgaacctgtggcagaagctgaagctaagcagagatgatgccaagcctctgctgagactgaagggattcccttcctttcctctggtcgagagacaggccaacgaagtggactggtgggacatggtgtgtaacgtgaagaagctgatcaacgagaaaaaggaggatggcaaggtgttttggcagaatctggctggctacaagagacaggaagccctgagaccatacctgagcagcgaggaagatcggaagaagggaaagaaattcgctcggtaccagctgggcgacctgctgctgcacctggaaaagaagcacggcgaggactggggaaaggtgtacgacgaggcctgggagcggattgacaagaaagtggaaggcctgagcaagcacatcaagctggaagaggaacggagaagcgaggacgcccagagcaaggccgccctgaccgactggctgcgggctaaggccagcttcgtgatcgagggcctgaaggaggccgacaaggacgagttctgcagatgcgagctgaagctgcagaagtggtacggggacctgcggggaaagcccttcgccatcgaagccgagaacagcatcctggacatcagcggcttcagcaagcagtacaactgtgccttcatctggcagaaggacggcgtgaagaagctgaacctgtacctgatcatcaactacttcaagggcggcaagctgcggttcaagaagatcaaacctgaagccttcgaagccaacagattctacaccgtgatcaacaaaaagagcggcgagatcgtgcccatggaggtgaacttcaacttcgacgaccccaacctgatcatcctgcctctggcctttggcaagagacagggcagagaattcatctggaacgacctgctgtccctggaaaccggcagcctgaagctggccaacggaagagtgatcgagaagacactgtacaacagaagaacccggcaggatgagcctgccctgttcgtggccctgaccttcgagcggcgggaggtcctggactcctccaatatcaaaccaatgaacctgatcggcgtggcaagaggcgaaaacatccccgccgtgatcgccctgaccgaccccgagggctgcccactgagccggtttaaggatagcctgggaaacccaacccacatcctgagaatcggcgagagctataaggagaagcagcggaccatccaggccaagaaggaggtggagcagcggagagccggcggctacagccggaagtacgccagcaaagccaagaatctggcagacgatatggtgagaaacaccgctagagatctgctgtactacgccgtgacccaggatgccatgctgatcttcgccaacctgagccggggcttcggccggcagggcaagcggaccttcatggccgagagacagtacacacggatggaggactggctgaccgccaagctggcctacgagggcctgagcaagacctacctgtccaagacactggcccagtacacctccaagacatgcagcaactgtgggtttaccatcaccagcgccgactacgacagggtgctggagaagctgaagaagacagcaacaggctggatgaccacaattaacggcaaggagctgaaggtggagggccagattacctactacaacagatacaagagacagaacgtagtcaaggacctgtccgtcgagctggatagactgagcgaagaatctgtgaacaacgacatctcctcctggacaaagggcagaagcggagaagctctgagcctcctgaagaaaagattctcccatagacccgtgcaggagaagttcgtgtgcctgaactgcggcttcgagacacacgcagccgagcaagccgccctgaacatcgccagatcctggctgttcctgcggagccaggagtacaagaaataccagacaaacaagacaaccggcaacaccgataagagagccttcgtcgagacctggcagtccttttaccggaagaagcttaaggaggtgtggaaacctgccgtgcggtctggcggatctggcggaggctccacaagcatggagagcctgaccctggaggacgtggccgtggacttcacctgggaggagtggcagttcctgagccccgcccagaaggacctgtacagggacgtgatgctggagaactacagcaacctggtggccgtgggctaccaggccaggaagcccgacgccctgagcaagctggagaggggcgaggagccctgcaccaccgaggacgagatctacgccaggatctgcagcgacagcggcggcgccagcaccagccccaagaaaaagagaaaagtctaagctgccttctgcggggcttgccttctggccatgcccttcttctctcccttgcacctgtacctcttggtctttgaataaagcctgagtaggaaggctagcaaaaaaaaaaaaaaaaaaaaaaaaaaaaaaaaaaaaaaaaaaaaaaaaaaaaaaaaaaaaaaaaaaaaaaaaaaaaaaaa

SEQ ID NO: 6538 - RNA, 5797 nt, synthetic construct
  source 1..5797: mol_type = other RNA
aggaaataagagagaaaagaagagtaagaagaaatataagagccaccatggcccctaagaagaagcgtaaagtgagccggatggaacgcctcgtctacgaggtgcggcagaagtgcagaaacatcgaggacatctgcatctcctgcggatctctgaacgtgaccctggagcacccactgttcatcggcggcatgtgccagaactgtaaaaactgttttctggagtgtgcctatcaatacgacgatgacggctaccagagctactgcaccatctgttgcggcggaagagaggtgctgatgtgtggaaataacaactgctgccggtgcttctgcgtggaatgcgtggacctgctggtgggccccggcgccgcccaggccgctattaaggaagatccttggaactgctacatgtgcggccacaagggcacatacggcctgctgagacggagagaggactggcctagcagactgcagatgttcttcgccaataaccacgaccaggagttcgacccccctaaggtgtaccctcccgtccccgccgagaagagaaagcccatccgggtcctgagcctgttcgatggcatcgccaccggtctgctggtgctgaaggacctgggcatccaggtggataggtacattgcctccgaggtgtgcgaggactccatcaccgtgggaatggtgcgtcatcagggcaagatcatgtacgtgggcgacgtgcggagcgtgacacagaagcatatccaggagtggggccctttcgacctggtgatcggcggcagcccttgcaatgacctgagcatcgtgaacccagcccggaagggcctgtacgagggaaccggcagactgttcttcgagttttacagactgctgcacgacgcccggcctaaggaaggcgacgaccggcccttcttttggctgttcgagaatgtggtggccatgggagtcagcgacaagcgggatattagccggttcctggagagcaaccccgtgatgatcgatgccaaggaagtgagcgccgcccaccgggccagatacttctggggcaatctgcctggcatgaacagacccctggccagcaccgtgaacgacaagctggagctgcaggagtgcctggagcacggccggatcgccaagttcagcaaggtgagaaccatcaccacccgaagcaacagcatcaaacaaggcaaggaccagcactttcctgtgttcatgaacgagaaggaggacatcctgtggtgtaccgagatggagagagtgttcgggttcccagtccactacacagatgtcagcaacatgtctagactggccagacagagactgctgggaagaagctggtccgtccctgtgatcagacacctgttcgcccctctgaaggagtacttcgcctgcgtgagcagcggcaacagcaacgccaacagccggggccccagcttctctagcggcctggtgccactgtccctgagagggagccacatgggccccatggagatctacaaaaccgtgagcgcctggaagcggcagcctgtgcgcgtgctgagcctgtttcggaatatcgataaagtcctgaaaagcctgggattcctggagagcggctctggctccggcggtggcaccctgaagtacgtggaggatgtgacaaacgtggtcagacgggatgtggagaagtggggccccttcgatctggtgtacggcagcacccaacccctgggcagctcttgtgaccggtgccctggctggtacatgtttcagttccaccggatcctgcagtacgccctgccgagacaggagtcccagcggccattcttttggattttcatggacaacttgctgctgaccgaggatgaccaggaaactaccactcggttcctgcagaccgaagccgtgaccctgcaggacgtgagaggccgggactaccagaacgccatgcgggtgtggtccaacatccctggactgaaaagcaagcacgcacctctgacccctaaagaagaggagtacctgcaggcccaggtgcggagcagaagcaagctggacgcccctaaggtggatctgctggtgaagaattgcctcctgcccctgagagagtacttcaagtatttcagccagaatagtctgcccctgggcggcccaagcagcggcgcccctcctcccagcggcggcagcccagccggctccccaacctctaccgaggagggcacctctgagtccgccacccccgagagcggccctggcacctccaccgagcccagcgagggcagcgcacccggcagccctgccggcagccccacctccacagaggagggaaccagcaccgagcccagcgaaggcagcgccccaggcaccagcaccgagcctagtgagggcggctctggcggcggcagcgcccaggagattaaacggatcaacaagatcagaagaagacttgtgaaagacagcaacaccaagaaggccggcaagacaggccccatgaaaaccctgctggttagagtgatgacacccgatctgagagagcggctggaaaacctgagaaagaagcctgaaaatatcccccagcccatcagcaatacatctagagccaacctgaataagctgctgaccgattacaccgaaatgaagaaggcgatcctgcatgtgtactgggaagagttccagaaggaccctgtgggcctgatgagccgggtggcccagcctgccagcaagaagatcgatcagaacaagctgaaacctgagatggacgagaagggcaacctgaccaccgccggctttgcctgctctcagtgtggccagcccctgttcgtgtacaagctggagcaggtgtctgagaagggcaaggcttacaccaactacttcggacggtgcaatgtggccgagcacgaaaagctgatcctgctggcccagctgaagcccgagaaggatagcgacgaagccgtgacatatagcctgggaaagtttgggcagagggccctggatttctacagcattcatgtgaccaaggagtccacccaccccgtgaagcccctggcccagatcgccggaaacagatacgcctccggacctgtgggaaaggccctgagcgacgcatgtatgggcacaatcgcctccttcctgtctaagtaccaggacatcatcatcgaacaccagaaggtggtgaagggcaaccagaagagactggagagcctgcgggagctggccggcaaggaaaacctggaataccctagcgtgaccctgccacctcagcctcacaccaaggagggcgttgatgcctacaacgaagtgatcgcccgggtgcgaatgtgggtgaacctgaacctgtggcagaagctgaagctaagcagagatgatgccaagcctctgctgagactgaagggattcccttcctttcctctggtcgagagacaggccaacgaagtggactggtgggacatggtgtgtaacgtgaagaagctgatcaacgagaaaaaggaggatggcaaggtgttttggcagaatctggctggctacaagagacaggaagccctgagaccatacctgagcagcgaggaagatcggaagaagggaaagaaattcgctcggtaccagctgggcgacctgctgctgcacctggaaaagaagcacggcgaggactggggaaaggtgtacgacgaggcctgggagcggattgacaagaaagtggaaggcctgagcaagcacatcaagctggaagaggaacggagaagcgaggacgcccagagcaaggccgccctgaccgactggctgcgggctaaggccagcttcgtgatcgagggcctgaaggaggccgacaaggacgagttctgcagatgcgagctgaagctgcagaagtggtacggggacctgcggggaaagcccttcgccatcgaagccgagaacagcatcctggacatcagcggcttcagcaagcagtacaactgtgccttcatctggcagaaggacggcgtgaagaagctgaacctgtacctgatcatcaactacttcaagggcggcaagctgcggttcaagaagatcaaacctgaagccttcgaagccaacagattctacaccgtgatcaacaaaaagagcggcgagatcgtgcccatggaggtgaacttcaacttcgacgaccccaacctgatcatcctgcctctggcctttggcaagagacagggcagagaattcatctggaacgacctgctgtccctggaaaccggcagcctgaagctggccaacggaagagtgatcgagaagacactgtacaacagaagaacccggcaggatgagcctgccctgttcgtggccctgaccttcgagcggcgggaggtcctggactcctccaatatcaaaccaatgaacctgatcggcgtggcaagaggcgaaaacatccccgccgtgatcgccctgaccgaccccgagggctgcccactgagccggtttaaggatagcctgggaaacccaacccacatcctgagaatcggcgagagctataaggagaagcagcggaccatccaggccaagaaggaggtggagcagcggagagccggcggctacagccggaagtacgccagcaaagccaagaatctggcagacgatatggtgagaaacaccgctagagatctgctgtactacgccgtgacccaggatgccatgctgatcttcgccaacctgagccggggcttcggccggcagggcaagcggaccttcatggccgagagacagtacacacggatggaggactggctgaccgccaagctggcctacgagggcctgagcaagacctacctgtccaagacactggcccagtacacctccaagacatgcagcaactgtgggtttaccatcaccagcgccgactacgacagggtgctggagaagctgaagaagacagcaacaggctggatgaccacaattaacggcaaggagctgaaggtggagggccagattacctactacaacagatacaagagacagaacgtagtcaaggacctgtccgtcgagctggatagactgagcgaagaatctgtgaacaacgacatctcctcctggacaaagggcagaagcggagaagctctgagcctcctgaagaaaagattctcccatagacccgtgcaggagaagttcgtgtgcctgaactgcggcttcgagacacacgcagccgagcaagccgccctgaacatcgccagatcctggctgttcctgcggagccaggagtacaagaaataccagacaaacaagacaaccggcaacaccgataagagagccttcgtcgagacctggcagtccttttaccggaagaagcttaaggaggtgtggaaacctgccgtgcggtctggcggatctggcggaggctccacaagccaggccggcagcgacctgttcagggacgtggccatcgtgttcagccaggaggagtgggagcagctggcccccacccagagggacctgtacagggacgtgatgctggagacctacagcaacctggtgagcctgggcctggccgtgagcaagcccgacgtgatcgccttcctggagcagggcagggagccctggaccgtggagggcgtggccaccggcggcctgtgccccgtgctgaagagcaggaccagccccaagaaaaagagaaaagtctaagctgccttctgcggggcttgccttctggccatgcccttcttctctcccttgcacctgtacctcttggtctttgaataaagcctgagtaggaaggctagcaaaaaaaaaaaaaaaaaaaaaaaaaaaaaaaaaaaaaaaaaaaaaaaaaaaaaaaaaaaaaaaaaaaaaaaaaaaaaaaa

SEQ ID NO: 6539 - RNA, 5797 nt, synthetic construct
  source 1..5797: mol_type = other RNA
aggaaataagagagaaaagaagagtaagaagaaatataagagccaccatggcccctaagaagaagcgtaaagtgagccggatggaacgcctcgtctacgaggtgcggcagaagtgcagaaacatcgaggacatctgcatctcctgcggatctctgaacgtgaccctggagcacccactgttcatcggcggcatgtgccagaactgtaaaaactgttttctggagtgtgcctatcaatacgacgatgacggctaccagagctactgcaccatctgttgcggcggaagagaggtgctgatgtgtggaaataacaactgctgccggtgcttctgcgtggaatgcgtggacctgctggtgggccccggcgccgcccaggccgctattaaggaagatccttggaactgctacatgtgcggccacaagggcacatacggcctgctgagacggagagaggactggcctagcagactgcagatgttcttcgccaataaccacgaccaggagttcgacccccctaaggtgtaccctcccgtccccgccgagaagagaaagcccatccgggtcctgagcctgttcgatggcatcgccaccggtctgctggtgctgaaggacctgggcatccaggtggataggtacattgcctccgaggtgtgcgaggactccatcaccgtgggaatggtgcgtcatcagggcaagatcatgtacgtgggcgacgtgcggagcgtgacacagaagcatatccaggagtggggccctttcgacctggtgatcggcggcagcccttgcaatgacctgagcatcgtgaacccagcccggaagggcctgtacgagggaaccggcagactgttcttcgagttttacagactgctgcacgacgcccggcctaaggaaggcgacgaccggcccttcttttggctgttcgagaatgtggtggccatgggagtcagcgacaagcgggatattagccggttcctggagagcaaccccgtgatgatcgatgccaaggaagtgagcgccgcccaccgggccagatacttctggggcaatctgcctggcatgaacagacccctggccagcaccgtgaacgacaagctggagctgcaggagtgcctggagcacggccggatcgccaagttcagcaaggtgagaaccatcaccacccgaagcaacagcatcaaacaaggcaaggaccagcactttcctgtgttcatgaacgagaaggaggacatcctgtggtgtaccgagatggagagagtgttcgggttcccagtccactacacagatgtcagcaacatgtctagactggccagacagagactgctgggaagaagctggtccgtccctgtgatcagacacctgttcgcccctctgaaggagtacttcgcctgcgtgagcagcggcaacagcaacgccaacagccggggccccagcttctctagcggcctggtgccactgtccctgagagggagccacatgggccccatggagatctacaaaaccgtgagcgcctggaagcggcagcctgtgcgcgtgctgagcctgtttcggaatatcgataaagtcctgaaaagcctgggattcctggagagcggctctggctccggcggtggcaccctgaagtacgtggaggatgtgacaaacgtggtcagacgggatgtggagaagtggggccccttcgatctggtgtacggcagcacccaacccctgggcagctcttgtgaccggtgccctggctggtacatgtttcagttccaccggatcctgcagtacgccctgccgagacaggagtcccagcggccattcttttggattttcatggacaacttgctgctgaccgaggatgaccaggaaactaccactcggttcctgcagaccgaagccgtgaccctgcaggacgtgagaggccgggactaccagaacgccatgcgggtgtggtccaacatccctggactgaaaagcaagcacgcacctctgacccctaaagaagaggagtacctgcaggcccaggtgcggagcagaagcaagctggacgcccctaaggtggatctgctggtgaagaattgcctcctgcccctgagagagtacttcaagtatttcagccagaatagtctgcccctgggcggcccaagcagcggcgcccctcctcccagcggcggcagcccagccggctccccaacctctaccgaggagggcacctctgagtccgccacccccgagagcggccctggcacctccaccgagcccagcgagggcagcgcacccggcagccctgccggcagccccacctccacagaggagggaaccagcaccgagcccagcgaaggcagcgccccaggcaccagcaccgagcctagtgagggcggctctggcggcggcagcgcccaggagattaaacggatcaacaagatcagaagaagacttgtgaaagacagcaacaccaagaaggccggcaagacaggccccatgaaaaccctgctggttagagtgatgacacccgatctgagagagcggctggaaaacctgagaaagaagcctgaaaatatcccccagcccatcagcaatacatctagagccaacctgaataagctgctgaccgattacaccgaaatgaagaaggcgatcctgcatgtgtactgggaagagttccagaaggaccctgtgggcctgatgagccgggtggcccagcctgccagcaagaagatcgatcagaacaagctgaaacctgagatggacgagaagggcaacctgaccaccgccggctttgcctgctctcagtgtggccagcccctgttcgtgtacaagctggagcaggtgtctgagaagggcaaggcttacaccaactacttcggacggtgcaatgtggccgagcacgaaaagctgatcctgctggcccagctgaagcccgagaaggatagcgacgaagccgtgacatatagcctgggaaagtttgggcagagggccctggatttctacagcattcatgtgaccaaggagtccacccaccccgtgaagcccctggcccagatcgccggaaacagatacgcctccggacctgtgggaaaggccctgagcgacgcatgtatgggcacaatcgcctccttcctgtctaagtaccaggacatcatcatcgaacaccagaaggtggtgaagggcaaccagaagagactggagagcctgcgggagctggccggcaaggaaaacctggaataccctagcgtgaccctgccacctcagcctcacaccaaggagggcgttgatgcctacaacgaagtgatcgcccgggtgcgaatgtgggtgaacctgaacctgtggcagaagctgaagctaagcagagatgatgccaagcctctgctgagactgaagggattcccttcctttcctctggtcgagagacaggccaacgaagtggactggtgggacatggtgtgtaacgtgaagaagctgatcaacgagaaaaaggaggatggcaaggtgttttggcagaatctggctggctacaagagacaggaagccctgagaccatacctgagcagcgaggaagatcggaagaagggaaagaaattcgctcggtaccagctgggcgacctgctgctgcacctggaaaagaagcacggcgaggactggggaaaggtgtacgacgaggcctgggagcggattgacaagaaagtggaaggcctgagcaagcacatcaagctggaagaggaacggagaagcgaggacgcccagagcaaggccgccctgaccgactggctgcgggctaaggccagcttcgtgatcgagggcctgaaggaggccgacaaggacgagttctgcagatgcgagctgaagctgcagaagtggtacggggacctgcggggaaagcccttcgccatcgaagccgagaacagcatcctggacatcagcggcttcagcaagcagtacaactgtgccttcatctggcagaaggacggcgtgaagaagctgaacctgtacctgatcatcaactacttcaagggcggcaagctgcggttcaagaagatcaaacctgaagccttcgaagccaacagattctacaccgtgatcaacaaaaagagcggcgagatcgtgcccatggaggtgaacttcaacttcgacgaccccaacctgatcatcctgcctctggcctttggcaagagacagggcagagaattcatctggaacgacctgctgtccctggaaaccggcagcctgaagctggccaacggaagagtgatcgagaagacactgtacaacagaagaacccggcaggatgagcctgccctgttcgtggccctgaccttcgagcggcgggaggtcctggactcctccaatatcaaaccaatgaacctgatcggcgtggcaagaggcgaaaacatccccgccgtgatcgccctgaccgaccccgagggctgcccactgagccggtttaaggatagcctgggaaacccaacccacatcctgagaatcggcgagagctataaggagaagcagcggaccatccaggccaagaaggaggtggagcagcggagagccggcggctacagccggaagtacgccagcaaagccaagaatctggcagacgatatggtgagaaacaccgctagagatctgctgtactacgccgtgacccaggatgccatgctgatcttcgccaacctgagccggggcttcggccggcagggcaagcggaccttcatggccgagagacagtacacacggatggaggactggctgaccgccaagctggcctacgagggcctgagcaagacctacctgtccaagacactggcccagtacacctccaagacatgcagcaactgtgggtttaccatcaccagcgccgactacgacagggtgctggagaagctgaagaagacagcaacaggctggatgaccacaattaacggcaaggagctgaaggtggagggccagattacctactacaacagatacaagagacagaacgtagtcaaggacctgtccgtcgagctggatagactgagcgaagaatctgtgaacaacgacatctcctcctggacaaagggcagaagcggagaagctctgagcctcctgaagaaaagattctcccatagacccgtgcaggagaagttcgtgtgcctgaactgcggcttcgagacacacgcagccgagcaagccgccctgaacatcgccagatcctggctgttcctgcggagccaggagtacaagaaataccagacaaacaagacaaccggcaacaccgataagagagccttcgtcgagacctggcagtccttttaccggaagaagcttaaggaggtgtggaaacctgccgtgcggtctggcggatctggcggaggctccacaagcatggacagcgtggccttcgaggacgtggccgtgaacttcacccacgaggagtgggccctgctgagccccagccagaagaacctgtacagggacgtgatgagggagaccatcaggaacctgaactgcatcggcatgaagtgggagaaccagaacatcgacgaccagtaccagaacctgaggaggaaccccaggtgcgacgtggtggagaggttcggcaagagcaaggacggcagccagtgcggcaccagccccaagaaaaagagaaaagtctaagctgccttctgcggggcttgccttctggccatgcccttcttctctcccttgcacctgtacctcttggtctttgaataaagcctgagtaggaaggctagcaaaaaaaaaaaaaaaaaaaaaaaaaaaaaaaaaaaaaaaaaaaaaaaaaaaaaaaaaaaaaaaaaaaaaaaaaaaaaaaa

SEQ ID NO: 6540 - RNA, 5797 nt, synthetic construct
  source 1..5797: mol_type = other RNA
aggaaataagagagaaaagaagagtaagaagaaatataagagccaccatggcccctaagaagaagcgtaaagtgagccggatggaacgcctcgtctacgaggtgcggcagaagtgcagaaacatcgaggacatctgcatctcctgcggatctctgaacgtgaccctggagcacccactgttcatcggcggcatgtgccagaactgtaaaaactgttttctggagtgtgcctatcaatacgacgatgacggctaccagagctactgcaccatctgttgcggcggaagagaggtgctgatgtgtggaaataacaactgctgccggtgcttctgcgtggaatgcgtggacctgctggtgggccccggcgccgcccaggccgctattaaggaagatccttggaactgctacatgtgcggccacaagggcacatacggcctgctgagacggagagaggactggcctagcagactgcagatgttcttcgccaataaccacgaccaggagttcgacccccctaaggtgtaccctcccgtccccgccgagaagagaaagcccatccgggtcctgagcctgttcgatggcatcgccaccggtctgctggtgctgaaggacctgggcatccaggtggataggtacattgcctccgaggtgtgcgaggactccatcaccgtgggaatggtgcgtcatcagggcaagatcatgtacgtgggcgacgtgcggagcgtgacacagaagcatatccaggagtggggccctttcgacctggtgatcggcggcagcccttgcaatgacctgagcatcgtgaacccagcccggaagggcctgtacgagggaaccggcagactgttcttcgagttttacagactgctgcacgacgcccggcctaaggaaggcgacgaccggcccttcttttggctgttcgagaatgtggtggccatgggagtcagcgacaagcgggatattagccggttcctggagagcaaccccgtgatgatcgatgccaaggaagtgagcgccgcccaccgggccagatacttctggggcaatctgcctggcatgaacagacccctggccagcaccgtgaacgacaagctggagctgcaggagtgcctggagcacggccggatcgccaagttcagcaaggtgagaaccatcaccacccgaagcaacagcatcaaacaaggcaaggaccagcactttcctgtgttcatgaacgagaaggaggacatcctgtggtgtaccgagatggagagagtgttcgggttcccagtccactacacagatgtcagcaacatgtctagactggccagacagagactgctgggaagaagctggtccgtccctgtgatcagacacctgttcgcccctctgaaggagtacttcgcctgcgtgagcagcggcaacagcaacgccaacagccggggccccagcttctctagcggcctggtgccactgtccctgagagggagccacatgggccccatggagatctacaaaaccgtgagcgcctggaagcggcagcctgtgcgcgtgctgagcctgtttcggaatatcgataaagtcctgaaaagcctgggattcctggagagcggctctggctccggcggtggcaccctgaagtacgtggaggatgtgacaaacgtggtcagacgggatgtggagaagtggggccccttcgatctggtgtacggcagcacccaacccctgggcagctcttgtgaccggtgccctggctggtacatgtttcagttccaccggatcctgcagtacgccctgccgagacaggagtcccagcggccattcttttggattttcatggacaacttgctgctgaccgaggatgaccaggaaactaccactcggttcctgcagaccgaagccgtgaccctgcaggacgtgagaggccgggactaccagaacgccatgcgggtgtggtccaacatccctggactgaaaagcaagcacgcacctctgacccctaaagaagaggagtacctgcaggcccaggtgcggagcagaagcaagctggacgcccctaaggtggatctgctggtgaagaattgcctcctgcccctgagagagtacttcaagtatttcagccagaatagtctgcccctgggcggcccaagcagcggcgcccctcctcccagcggcggcagcccagccggctccccaacctctaccgaggagggcacctctgagtccgccacccccgagagcggccctggcacctccaccgagcccagcgagggcagcgcacccggcagccctgccggcagccccacctccacagaggagggaaccagcaccgagcccagcgaaggcagcgccccaggcaccagcaccgagcctagtgagggcggctctggcggcggcagcgcccaggagattaaacggatcaacaagatcagaagaagacttgtgaaagacagcaacaccaagaaggccggcaagacaggccccatgaaaaccctgctggttagagtgatgacacccgatctgagagagcggctggaaaacctgagaaagaagcctgaaaatatcccccagcccatcagcaatacatctagagccaacctgaataagctgctgaccgattacaccgaaatgaagaaggcgatcctgcatgtgtactgggaagagttccagaaggaccctgtgggcctgatgagccgggtggcccagcctgccagcaagaagatcgatcagaacaagctgaaacctgagatggacgagaagggcaacctgaccaccgccggctttgcctgctctcagtgtggccagcccctgttcgtgtacaagctggagcaggtgtctgagaagggcaaggcttacaccaactacttcggacggtgcaatgtggccgagcacgaaaagctgatcctgctggcccagctgaagcccgagaaggatagcgacgaagccgtgacatatagcctgggaaagtttgggcagagggccctggatttctacagcattcatgtgaccaaggagtccacccaccccgtgaagcccctggcccagatcgccggaaacagatacgcctccggacctgtgggaaaggccctgagcgacgcatgtatgggcacaatcgcctccttcctgtctaagtaccaggacatcatcatcgaacaccagaaggtggtgaagggcaaccagaagagactggagagcctgcgggagctggccggcaaggaaaacctggaataccctagcgtgaccctgccacctcagcctcacaccaaggagggcgttgatgcctacaacgaagtgatcgcccgggtgcgaatgtgggtgaacctgaacctgtggcagaagctgaagctaagcagagatgatgccaagcctctgctgagactgaagggattcccttcctttcctctggtcgagagacaggccaacgaagtggactggtgggacatggtgtgtaacgtgaagaagctgatcaacgagaaaaaggaggatggcaaggtgttttggcagaatctggctggctacaagagacaggaagccctgagaccatacctgagcagcgaggaagatcggaagaagggaaagaaattcgctcggtaccagctgggcgacctgctgctgcacctggaaaagaagcacggcgaggactggggaaaggtgtacgacgaggcctgggagcggattgacaagaaagtggaaggcctgagcaagcacatcaagctggaagaggaacggagaagcgaggacgcccagagcaaggccgccctgaccgactggctgcgggctaaggccagcttcgtgatcgagggcctgaaggaggccgacaaggacgagttctgcagatgcgagctgaagctgcagaagtggtacggggacctgcggggaaagcccttcgccatcgaagccgagaacagcatcctggacatcagcggcttcagcaagcagtacaactgtgccttcatctggcagaaggacggcgtgaagaagctgaacctgtacctgatcatcaactacttcaagggcggcaagctgcggttcaagaagatcaaacctgaagccttcgaagccaacagattctacaccgtgatcaacaaaaagagcggcgagatcgtgcccatggaggtgaacttcaacttcgacgaccccaacctgatcatcctgcctctggcctttggcaagagacagggcagagaattcatctggaacgacctgctgtccctggaaaccggcagcctgaagctggccaacggaagagtgatcgagaagacactgtacaacagaagaacccggcaggatgagcctgccctgttcgtggccctgaccttcgagcggcgggaggtcctggactcctccaatatcaaaccaatgaacctgatcggcgtggcaagaggcgaaaacatccccgccgtgatcgccctgaccgaccccgagggctgcccactgagccggtttaaggatagcctgggaaacccaacccacatcctgagaatcggcgagagctataaggagaagcagcggaccatccaggccaagaaggaggtggagcagcggagagccggcggctacagccggaagtacgccagcaaagccaagaatctggcagacgatatggtgagaaacaccgctagagatctgctgtactacgccgtgacccaggatgccatgctgatcttcgccaacctgagccggggcttcggccggcagggcaagcggaccttcatggccgagagacagtacacacggatggaggactggctgaccgccaagctggcctacgagggcctgagcaagacctacctgtccaagacactggcccagtacacctccaagacatgcagcaactgtgggtttaccatcaccagcgccgactacgacagggtgctggagaagctgaagaagacagcaacaggctggatgaccacaattaacggcaaggagctgaaggtggagggccagattacctactacaacagatacaagagacagaacgtagtcaaggacctgtccgtcgagctggatagactgagcgaagaatctgtgaacaacgacatctcctcctggacaaagggcagaagcggagaagctctgagcctcctgaagaaaagattctcccatagacccgtgcaggagaagttcgtgtgcctgaactgcggcttcgagacacacgcagccgagcaagccgccctgaacatcgccagatcctggctgttcctgcggagccaggagtacaagaaataccagacaaacaagacaaccggcaacaccgataagagagccttcgtcgagacctggcagtccttttaccggaagaagcttaaggaggtgtggaaacctgccgtgcggtctggcggatctggcggaggctccacaagcttccagggcagcgtgaccttcgaggacgtggccatcgccttcagccagcaggagtgggagagcctggacagcagccagaggggcctgtacagggacgtgatgctggagaactacaggaacctggtgagcatgggccacagcctgagcaagccccacgtgatcgccctgctggagaggtggaaggagcccaaggtgaccgacaggaaggacggcaggaggtggtgcaccgacctgcagctggagaccagccccaagaaaaagagaaaagtctaagctgccttctgcggggcttgccttctggccatgcccttcttctctcccttgcacctgtacctcttggtctttgaataaagcctgagtaggaaggctagcaaaaaaaaaaaaaaaaaaaaaaaaaaaaaaaaaaaaaaaaaaaaaaaaaaaaaaaaaaaaaaaaaaaaaaaaaaaaaaaa

SEQ ID NO: 6541 - RNA, 5797 nt, synthetic construct
  source 1..5797: mol_type = other RNA
aggaaataagagagaaaagaagagtaagaagaaatataagagccaccatggcccctaagaagaagcgtaaagtgagccggatggaacgcctcgtctacgaggtgcggcagaagtgcagaaacatcgaggacatctgcatctcctgcggatctctgaacgtgaccctggagcacccactgttcatcggcggcatgtgccagaactgtaaaaactgttttctggagtgtgcctatcaatacgacgatgacggctaccagagctactgcaccatctgttgcggcggaagagaggtgctgatgtgtggaaataacaactgctgccggtgcttctgcgtggaatgcgtggacctgctggtgggccccggcgccgcccaggccgctattaaggaagatccttggaactgctacatgtgcggccacaagggcacatacggcctgctgagacggagagaggactggcctagcagactgcagatgttcttcgccaataaccacgaccaggagttcgacccccctaaggtgtaccctcccgtccccgccgagaagagaaagcccatccgggtcctgagcctgttcgatggcatcgccaccggtctgctggtgctgaaggacctgggcatccaggtggataggtacattgcctccgaggtgtgcgaggactccatcaccgtgggaatggtgcgtcatcagggcaagatcatgtacgtgggcgacgtgcggagcgtgacacagaagcatatccaggagtggggccctttcgacctggtgatcggcggcagcccttgcaatgacctgagcatcgtgaacccagcccggaagggcctgtacgagggaaccggcagactgttcttcgagttttacagactgctgcacgacgcccggcctaaggaaggcgacgaccggcccttcttttggctgttcgagaatgtggtggccatgggagtcagcgacaagcgggatattagccggttcctggagagcaaccccgtgatgatcgatgccaaggaagtgagcgccgcccaccgggccagatacttctggggcaatctgcctggcatgaacagacccctggccagcaccgtgaacgacaagctggagctgcaggagtgcctggagcacggccggatcgccaagttcagcaaggtgagaaccatcaccacccgaagcaacagcatcaaacaaggcaaggaccagcactttcctgtgttcatgaacgagaaggaggacatcctgtggtgtaccgagatggagagagtgttcgggttcccagtccactacacagatgtcagcaacatgtctagactggccagacagagactgctgggaagaagctggtccgtccctgtgatcagacacctgttcgcccctctgaaggagtacttcgcctgcgtgagcagcggcaacagcaacgccaacagccggggccccagcttctctagcggcctggtgccactgtccctgagagggagccacatgggccccatggagatctacaaaaccgtgagcgcctggaagcggcagcctgtgcgcgtgctgagcctgtttcggaatatcgataaagtcctgaaaagcctgggattcctggagagcggctctggctccggcggtggcaccctgaagtacgtggaggatgtgacaaacgtggtcagacgggatgtggagaagtggggccccttcgatctggtgtacggcagcacccaacccctgggcagctcttgtgaccggtgccctggctggtacatgtttcagttccaccggatcctgcagtacgccctgccgagacaggagtcccagcggccattcttttggattttcatggacaacttgctgctgaccgaggatgaccaggaaactaccactcggttcctgcagaccgaagccgtgaccctgcaggacgtgagaggccgggactaccagaacgccatgcgggtgtggtccaacatccctggactgaaaagcaagcacgcacctctgacccctaaagaagaggagtacctgcaggcccaggtgcggagcagaagcaagctggacgcccctaaggtggatctgctggtgaagaattgcctcctgcccctgagagagtacttcaagtatttcagccagaatagtctgcccctgggcggcccaagcagcggcgcccctcctcccagcggcggcagcccagccggctccccaacctctaccgaggagggcacctctgagtccgccacccccgagagcggccctggcacctccaccgagcccagcgagggcagcgcacccggcagccctgccggcagccccacctccacagaggagggaaccagcaccgagcccagcgaaggcagcgccccaggcaccagcaccgagcctagtgagggcggctctggcggcggcagcgcccaggagattaaacggatcaacaagatcagaagaagacttgtgaaagacagcaacaccaagaaggccggcaagacaggccccatgaaaaccctgctggttagagtgatgacacccgatctgagagagcggctggaaaacctgagaaagaagcctgaaaatatcccccagcccatcagcaatacatctagagccaacctgaataagctgctgaccgattacaccgaaatgaagaaggcgatcctgcatgtgtactgggaagagttccagaaggaccctgtgggcctgatgagccgggtggcccagcctgccagcaagaagatcgatcagaacaagctgaaacctgagatggacgagaagggcaacctgaccaccgccggctttgcctgctctcagtgtggccagcccctgttcgtgtacaagctggagcaggtgtctgagaagggcaaggcttacaccaactacttcggacggtgcaatgtggccgagcacgaaaagctgatcctgctggcccagctgaagcccgagaaggatagcgacgaagccgtgacatatagcctgggaaagtttgggcagagggccctggatttctacagcattcatgtgaccaaggagtccacccaccccgtgaagcccctggcccagatcgccggaaacagatacgcctccggacctgtgggaaaggccctgagcgacgcatgtatgggcacaatcgcctccttcctgtctaagtaccaggacatcatcatcgaacaccagaaggtggtgaagggcaaccagaagagactggagagcctgcgggagctggccggcaaggaaaacctggaataccctagcgtgaccctgccacctcagcctcacaccaaggagggcgttgatgcctacaacgaagtgatcgcccgggtgcgaatgtgggtgaacctgaacctgtggcagaagctgaagctaagcagagatgatgccaagcctctgctgagactgaagggattcccttcctttcctctggtcgagagacaggccaacgaagtggactggtgggacatggtgtgtaacgtgaagaagctgatcaacgagaaaaaggaggatggcaaggtgttttggcagaatctggctggctacaagagacaggaagccctgagaccatacctgagcagcgaggaagatcggaagaagggaaagaaattcgctcggtaccagctgggcgacctgctgctgcacctggaaaagaagcacggcgaggactggggaaaggtgtacgacgaggcctgggagcggattgacaagaaagtggaaggcctgagcaagcacatcaagctggaagaggaacggagaagcgaggacgcccagagcaaggccgccctgaccgactggctgcgggctaaggccagcttcgtgatcgagggcctgaaggaggccgacaaggacgagttctgcagatgcgagctgaagctgcagaagtggtacggggacctgcggggaaagcccttcgccatcgaagccgagaacagcatcctggacatcagcggcttcagcaagcagtacaactgtgccttcatctggcagaaggacggcgtgaagaagctgaacctgtacctgatcatcaactacttcaagggcggcaagctgcggttcaagaagatcaaacctgaagccttcgaagccaacagattctacaccgtgatcaacaaaaagagcggcgagatcgtgcccatggaggtgaacttcaacttcgacgaccccaacctgatcatcctgcctctggcctttggcaagagacagggcagagaattcatctggaacgacctgctgtccctggaaaccggcagcctgaagctggccaacggaagagtgatcgagaagacactgtacaacagaagaacccggcaggatgagcctgccctgttcgtggccctgaccttcgagcggcgggaggtcctggactcctccaatatcaaaccaatgaacctgatcggcgtggcaagaggcgaaaacatccccgccgtgatcgccctgaccgaccccgagggctgcccactgagccggtttaaggatagcctgggaaacccaacccacatcctgagaatcggcgagagctataaggagaagcagcggaccatccaggccaagaaggaggtggagcagcggagagccggcggctacagccggaagtacgccagcaaagccaagaatctggcagacgatatggtgagaaacaccgctagagatctgctgtactacgccgtgacccaggatgccatgctgatcttcgccaacctgagccggggcttcggccggcagggcaagcggaccttcatggccgagagacagtacacacggatggaggactggctgaccgccaagctggcctacgagggcctgagcaagacctacctgtccaagacactggcccagtacacctccaagacatgcagcaactgtgggtttaccatcaccagcgccgactacgacagggtgctggagaagctgaagaagacagcaacaggctggatgaccacaattaacggcaaggagctgaaggtggagggccagattacctactacaacagatacaagagacagaacgtagtcaaggacctgtccgtcgagctggatagactgagcgaagaatctgtgaacaacgacatctcctcctggacaaagggcagaagcggagaagctctgagcctcctgaagaaaagattctcccatagacccgtgcaggagaagttcgtgtgcctgaactgcggcttcgagacacacgcagccgagcaagccgccctgaacatcgccagatcctggctgttcctgcggagccaggagtacaagaaataccagacaaacaagacaaccggcaacaccgataagagagccttcgtcgagacctggcagtccttttaccggaagaagcttaaggaggtgtggaaacctgccgtgcggtctggcggatctggcggaggctccacaagcatgaacgtggaggtgctgaaggtgatcagccaggacctggtgaccttcaaggacgtggccatcgacttcagccaggaggagtggcagtggatgaaccccgcccagaagaggctgtacaggagcatgatgctggagaactaccagagcctggtgagcctgggcctgtgcgtgagcaagccctacgtgatcagcctgctggagcagggcagggagccctgggagatgaccagcgagatgaccaggaccagccccaagaaaaagagaaaagtctaagctgccttctgcggggcttgccttctggccatgcccttcttctctcccttgcacctgtacctcttggtctttgaataaagcctgagtaggaaggctagcaaaaaaaaaaaaaaaaaaaaaaaaaaaaaaaaaaaaaaaaaaaaaaaaaaaaaaaaaaaaaaaaaaaaaaaaaaaaaaaa

SEQ ID NO: 6542 - RNA, 5797 nt, synthetic construct
  source 1..5797: mol_type = other RNA
aggaaataagagagaaaagaagagtaagaagaaatataagagccaccatggcccctaagaagaagcgtaaagtgagccggatggaacgcctcgtctacgaggtgcggcagaagtgcagaaacatcgaggacatctgcatctcctgcggatctctgaacgtgaccctggagcacccactgttcatcggcggcatgtgccagaactgtaaaaactgttttctggagtgtgcctatcaatacgacgatgacggctaccagagctactgcaccatctgttgcggcggaagagaggtgctgatgtgtggaaataacaactgctgccggtgcttctgcgtggaatgcgtggacctgctggtgggccccggcgccgcccaggccgctattaaggaagatccttggaactgctacatgtgcggccacaagggcacatacggcctgctgagacggagagaggactggcctagcagactgcagatgttcttcgccaataaccacgaccaggagttcgacccccctaaggtgtaccctcccgtccccgccgagaagagaaagcccatccgggtcctgagcctgttcgatggcatcgccaccggtctgctggtgctgaaggacctgggcatccaggtggataggtacattgcctccgaggtgtgcgaggactccatcaccgtgggaatggtgcgtcatcagggcaagatcatgtacgtgggcgacgtgcggagcgtgacacagaagcatatccaggagtggggccctttcgacctggtgatcggcggcagcccttgcaatgacctgagcatcgtgaacccagcccggaagggcctgtacgagggaaccggcagactgttcttcgagttttacagactgctgcacgacgcccggcctaaggaaggcgacgaccggcccttcttttggctgttcgagaatgtggtggccatgggagtcagcgacaagcgggatattagccggttcctggagagcaaccccgtgatgatcgatgccaaggaagtgagcgccgcccaccgggccagatacttctggggcaatctgcctggcatgaacagacccctggccagcaccgtgaacgacaagctggagctgcaggagtgcctggagcacggccggatcgccaagttcagcaaggtgagaaccatcaccacccgaagcaacagcatcaaacaaggcaaggaccagcactttcctgtgttcatgaacgagaaggaggacatcctgtggtgtaccgagatggagagagtgttcgggttcccagtccactacacagatgtcagcaacatgtctagactggccagacagagactgctgggaagaagctggtccgtccctgtgatcagacacctgttcgcccctctgaaggagtacttcgcctgcgtgagcagcggcaacagcaacgccaacagccggggccccagcttctctagcggcctggtgccactgtccctgagagggagccacatgggccccatggagatctacaaaaccgtgagcgcctggaagcggcagcctgtgcgcgtgctgagcctgtttcggaatatcgataaagtcctgaaaagcctgggattcctggagagcggctctggctccggcggtggcaccctgaagtacgtggaggatgtgacaaacgtggtcagacgggatgtggagaagtggggccccttcgatctggtgtacggcagcacccaacccctgggcagctcttgtgaccggtgccctggctggtacatgtttcagttccaccggatcctgcagtacgccctgccgagacaggagtcccagcggccattcttttggattttcatggacaacttgctgctgaccgaggatgaccaggaaactaccactcggttcctgcagaccgaagccgtgaccctgcaggacgtgagaggccgggactaccagaacgccatgcgggtgtggtccaacatccctggactgaaaagcaagcacgcacctctgacccctaaagaagaggagtacctgcaggcccaggtgcggagcagaagcaagctggacgcccctaaggtggatctgctggtgaagaattgcctcctgcccctgagagagtacttcaagtatttcagccagaatagtctgcccctgggcggcccaagcagcggcgcccctcctcccagcggcggcagcccagccggctccccaacctctaccgaggagggcacctctgagtccgccacccccgagagcggccctggcacctccaccgagcccagcgagggcagcgcacccggcagccctgccggcagccccacctccacagaggagggaaccagcaccgagcccagcgaaggcagcgccccaggcaccagcaccgagcctagtgagggcggctctggcggcggcagcgcccaggagattaaacggatcaacaagatcagaagaagacttgtgaaagacagcaacaccaagaaggccggcaagacaggccccatgaaaaccctgctggttagagtgatgacacccgatctgagagagcggctggaaaacctgagaaagaagcctgaaaatatcccccagcccatcagcaatacatctagagccaacctgaataagctgctgaccgattacaccgaaatgaagaaggcgatcctgcatgtgtactgggaagagttccagaaggaccctgtgggcctgatgagccgggtggcccagcctgccagcaagaagatcgatcagaacaagctgaaacctgagatggacgagaagggcaacctgaccaccgccggctttgcctgctctcagtgtggccagcccctgttcgtgtacaagctggagcaggtgtctgagaagggcaaggcttacaccaactacttcggacggtgcaatgtggccgagcacgaaaagctgatcctgctggcccagctgaagcccgagaaggatagcgacgaagccgtgacatatagcctgggaaagtttgggcagagggccctggatttctacagcattcatgtgaccaaggagtccacccaccccgtgaagcccctggcccagatcgccggaaacagatacgcctccggacctgtgggaaaggccctgagcgacgcatgtatgggcacaatcgcctccttcctgtctaagtaccaggacatcatcatcgaacaccagaaggtggtgaagggcaaccagaagagactggagagcctgcgggagctggccggcaaggaaaacctggaataccctagcgtgaccctgccacctcagcctcacaccaaggagggcgttgatgcctacaacgaagtgatcgcccgggtgcgaatgtgggtgaacctgaacctgtggcagaagctgaagctaagcagagatgatgccaagcctctgctgagactgaagggattcccttcctttcctctggtcgagagacaggccaacgaagtggactggtgggacatggtgtgtaacgtgaagaagctgatcaacgagaaaaaggaggatggcaaggtgttttggcagaatctggctggctacaagagacaggaagccctgagaccatacctgagcagcgaggaagatcggaagaagggaaagaaattcgctcggtaccagctgggcgacctgctgctgcacctggaaaagaagcacggcgaggactggggaaaggtgtacgacgaggcctgggagcggattgacaagaaagtggaaggcctgagcaagcacatcaagctggaagaggaacggagaagcgaggacgcccagagcaaggccgccctgaccgactggctgcgggctaaggccagcttcgtgatcgagggcctgaaggaggccgacaaggacgagttctgcagatgcgagctgaagctgcagaagtggtacggggacctgcggggaaagcccttcgccatcgaagccgagaacagcatcctggacatcagcggcttcagcaagcagtacaactgtgccttcatctggcagaaggacggcgtgaagaagctgaacctgtacctgatcatcaactacttcaagggcggcaagctgcggttcaagaagatcaaacctgaagccttcgaagccaacagattctacaccgtgatcaacaaaaagagcggcgagatcgtgcccatggaggtgaacttcaacttcgacgaccccaacctgatcatcctgcctctggcctttggcaagagacagggcagagaattcatctggaacgacctgctgtccctggaaaccggcagcctgaagctggccaacggaagagtgatcgagaagacactgtacaacagaagaacccggcaggatgagcctgccctgttcgtggccctgaccttcgagcggcgggaggtcctggactcctccaatatcaaaccaatgaacctgatcggcgtggcaagaggcgaaaacatccccgccgtgatcgccctgaccgaccccgagggctgcccactgagccggtttaaggatagcctgggaaacccaacccacatcctgagaatcggcgagagctataaggagaagcagcggaccatccaggccaagaaggaggtggagcagcggagagccggcggctacagccggaagtacgccagcaaagccaagaatctggcagacgatatggtgagaaacaccgctagagatctgctgtactacgccgtgacccaggatgccatgctgatcttcgccaacctgagccggggcttcggccggcagggcaagcggaccttcatggccgagagacagtacacacggatggaggactggctgaccgccaagctggcctacgagggcctgagcaagacctacctgtccaagacactggcccagtacacctccaagacatgcagcaactgtgggtttaccatcaccagcgccgactacgacagggtgctggagaagctgaagaagacagcaacaggctggatgaccacaattaacggcaaggagctgaaggtggagggccagattacctactacaacagatacaagagacagaacgtagtcaaggacctgtccgtcgagctggatagactgagcgaagaatctgtgaacaacgacatctcctcctggacaaagggcagaagcggagaagctctgagcctcctgaagaaaagattctcccatagacccgtgcaggagaagttcgtgtgcctgaactgcggcttcgagacacacgcagccgagcaagccgccctgaacatcgccagatcctggctgttcctgcggagccaggagtacaagaaataccagacaaacaagacaaccggcaacaccgataagagagccttcgtcgagacctggcagtccttttaccggaagaagcttaaggaggtgtggaaacctgccgtgcggtctggcggatctggcggaggctccacaagcgcccaggagagcctgaccctggaggacgtggccgtggacttcagcagggaggagtggaggctgctggcccccgcccagaaggacctgtacagggacgtgatgctggagaacttcaggaacctggtgagcgtgggccaccaggccagcaagcccgacgtgctggccaagctggagaggggcgaggagccctgggccatcgaggaggaggtgaggagcggcaccagccccgagaccggcaaggtgaccagccccaagaaaaagagaaaagtctaagctgccttctgcggggcttgccttctggccatgcccttcttctctcccttgcacctgtacctcttggtctttgaataaagcctgagtaggaaggctagcaaaaaaaaaaaaaaaaaaaaaaaaaaaaaaaaaaaaaaaaaaaaaaaaaaaaaaaaaaaaaaaaaaaaaaaaaaaaaaaa

SEQ ID NO: 6543 - RNA, 5803 nt, synthetic construct
  source 1..5803: mol_type = other RNA
aggaaataagagagaaaagaagagtaagaagaaatataagagccaccatggcccctaagaagaagcgtaaagtgagccggatggaacgcctcgtctacgaggtgcggcagaagtgcagaaacatcgaggacatctgcatctcctgcggatctctgaacgtgaccctggagcacccactgttcatcggcggcatgtgccagaactgtaaaaactgttttctggagtgtgcctatcaatacgacgatgacggctaccagagctactgcaccatctgttgcggcggaagagaggtgctgatgtgtggaaataacaactgctgccggtgcttctgcgtggaatgcgtggacctgctggtgggccccggcgccgcccaggccgctattaaggaagatccttggaactgctacatgtgcggccacaagggcacatacggcctgctgagacggagagaggactggcctagcagactgcagatgttcttcgccaataaccacgaccaggagttcgacccccctaaggtgtaccctcccgtccccgccgagaagagaaagcccatccgggtcctgagcctgttcgatggcatcgccaccggtctgctggtgctgaaggacctgggcatccaggtggataggtacattgcctccgaggtgtgcgaggactccatcaccgtgggaatggtgcgtcatcagggcaagatcatgtacgtgggcgacgtgcggagcgtgacacagaagcatatccaggagtggggccctttcgacctggtgatcggcggcagcccttgcaatgacctgagcatcgtgaacccagcccggaagggcctgtacgagggaaccggcagactgttcttcgagttttacagactgctgcacgacgcccggcctaaggaaggcgacgaccggcccttcttttggctgttcgagaatgtggtggccatgggagtcagcgacaagcgggatattagccggttcctggagagcaaccccgtgatgatcgatgccaaggaagtgagcgccgcccaccgggccagatacttctggggcaatctgcctggcatgaacagacccctggccagcaccgtgaacgacaagctggagctgcaggagtgcctggagcacggccggatcgccaagttcagcaaggtgagaaccatcaccacccgaagcaacagcatcaaacaaggcaaggaccagcactttcctgtgttcatgaacgagaaggaggacatcctgtggtgtaccgagatggagagagtgttcgggttcccagtccactacacagatgtcagcaacatgtctagactggccagacagagactgctgggaagaagctggtccgtccctgtgatcagacacctgttcgcccctctgaaggagtacttcgcctgcgtgagcagcggcaacagcaacgccaacagccggggccccagcttctctagcggcctggtgccactgtccctgagagggagccacatgggccccatggagatctacaaaaccgtgagcgcctggaagcggcagcctgtgcgcgtgctgagcctgtttcggaatatcgataaagtcctgaaaagcctgggattcctggagagcggctctggctccggcggtggcaccctgaagtacgtggaggatgtgacaaacgtggtcagacgggatgtggagaagtggggccccttcgatctggtgtacggcagcacccaacccctgggcagctcttgtgaccggtgccctggctggtacatgtttcagttccaccggatcctgcagtacgccctgccgagacaggagtcccagcggccattcttttggattttcatggacaacttgctgctgaccgaggatgaccaggaaactaccactcggttcctgcagaccgaagccgtgaccctgcaggacgtgagaggccgggactaccagaacgccatgcgggtgtggtccaacatccctggactgaaaagcaagcacgcacctctgacccctaaagaagaggagtacctgcaggcccaggtgcggagcagaagcaagctggacgcccctaaggtggatctgctggtgaagaattgcctcctgcccctgagagagtacttcaagtatttcagccagaatagtctgcccctgggcggcccaagcagcggcgcccctcctcccagcggcggcagcccagccggctccccaacctctaccgaggagggcacctctgagtccgccacccccgagagcggccctggcacctccaccgagcccagcgagggcagcgcacccggcagccctgccggcagccccacctccacagaggagggaaccagcaccgagcccagcgaaggcagcgccccaggcaccagcaccgagcctagtgagggcggctctggcggcggcagcgcccaggagattaaacggatcaacaagatcagaagaagacttgtgaaagacagcaacaccaagaaggccggcaagacaggccccatgaaaaccctgctggttagagtgatgacacccgatctgagagagcggctggaaaacctgagaaagaagcctgaaaatatcccccagcccatcagcaatacatctagagccaacctgaataagctgctgaccgattacaccgaaatgaagaaggcgatcctgcatgtgtactgggaagagttccagaaggaccctgtgggcctgatgagccgggtggcccagcctgccagcaagaagatcgatcagaacaagctgaaacctgagatggacgagaagggcaacctgaccaccgccggctttgcctgctctcagtgtggccagcccctgttcgtgtacaagctggagcaggtgtctgagaagggcaaggcttacaccaactacttcggacggtgcaatgtggccgagcacgaaaagctgatcctgctggcccagctgaagcccgagaaggatagcgacgaagccgtgacatatagcctgggaaagtttgggcagagggccctggatttctacagcattcatgtgaccaaggagtccacccaccccgtgaagcccctggcccagatcgccggaaacagatacgcctccggacctgtgggaaaggccctgagcgacgcatgtatgggcacaatcgcctccttcctgtctaagtaccaggacatcatcatcgaacaccagaaggtggtgaagggcaaccagaagagactggagagcctgcgggagctggccggcaaggaaaacctggaataccctagcgtgaccctgccacctcagcctcacaccaaggagggcgttgatgcctacaacgaagtgatcgcccgggtgcgaatgtgggtgaacctgaacctgtggcagaagctgaagctaagcagagatgatgccaagcctctgctgagactgaagggattcccttcctttcctctggtcgagagacaggccaacgaagtggactggtgggacatggtgtgtaacgtgaagaagctgatcaacgagaaaaaggaggatggcaaggtgttttggcagaatctggctggctacaagagacaggaagccctgagaccatacctgagcagcgaggaagatcggaagaagggaaagaaattcgctcggtaccagctgggcgacctgctgctgcacctggaaaagaagcacggcgaggactggggaaaggtgtacgacgaggcctgggagcggattgacaagaaagtggaaggcctgagcaagcacatcaagctggaagaggaacggagaagcgaggacgcccagagcaaggccgccctgaccgactggctgcgggctaaggccagcttcgtgatcgagggcctgaaggaggccgacaaggacgagttctgcagatgcgagctgaagctgcagaagtggtacggggacctgcggggaaagcccttcgccatcgaagccgagaacagcatcctggacatcagcggcttcagcaagcagtacaactgtgccttcatctggcagaaggacggcgtgaagaagctgaacctgtacctgatcatcaactacttcaagggcggcaagctgcggttcaagaagatcaaacctgaagccttcgaagccaacagattctacaccgtgatcaacaaaaagagcggcgagatcgtgcccatggaggtgaacttcaacttcgacgaccccaacctgatcatcctgcctctggcctttggcaagagacagggcagagaattcatctggaacgacctgctgtccctggaaaccggcagcctgaagctggccaacggaagagtgatcgagaagacactgtacaacagaagaacccggcaggatgagcctgccctgttcgtggccctgaccttcgagcggcgggaggtcctggactcctccaatatcaaaccaatgaacctgatcggcgtggcaagaggcgaaaacatccccgccgtgatcgccctgaccgaccccgagggctgcccactgagccggtttaaggatagcctgggaaacccaacccacatcctgagaatcggcgagagctataaggagaagcagcggaccatccaggccaagaaggaggtggagcagcggagagccggcggctacagccggaagtacgccagcaaagccaagaatctggcagacgatatggtgagaaacaccgctagagatctgctgtactacgccgtgacccaggatgccatgctgatcttcgccaacctgagccggggcttcggccggcagggcaagcggaccttcatggccgagagacagtacacacggatggaggactggctgaccgccaagctggcctacgagggcctgagcaagacctacctgtccaagacactggcccagtacacctccaagacatgcagcaactgtgggtttaccatcaccagcgccgactacgacagggtgctggagaagctgaagaagacagcaacaggctggatgaccacaattaacggcaaggagctgaaggtggagggccagattacctactacaacagatacaagagacagaacgtagtcaaggacctgtccgtcgagctggatagactgagcgaagaatctgtgaacaacgacatctcctcctggacaaagggcagaagcggagaagctctgagcctcctgaagaaaagattctcccatagacccgtgcaggagaagttcgtgtgcctgaactgcggcttcgagacacacgcagccgagcaagccgccctgaacatcgccagatcctggctgttcctgcggagccaggagtacaagaaataccagacaaacaagacaaccggcaacaccgataagagagccttcgtcgagacctggcagtccttttaccggaagaagcttaaggaggtgtggaaacctgccgtgcggtctggcggatctggcggaggctccacaagcgtgaccttcaaggacgtggccgtgatcttcaccgaggaggagctgggcctgctggaccccgcccagaggaagctgtacagggacgtgatgctggagaacttcaggaacctgctgagcgtgggccaccagcccttccacggcgacaccttccacttcctgagggaggagaagttctgggtgatgggcaccaccagccagagggagggcaacctgggcggcaagatccagaccgagatggagaccgtgcccaccagccccaagaaaaagagaaaagtctaagctgccttctgcggggcttgccttctggccatgcccttcttctctcccttgcacctgtacctcttggtctttgaataaagcctgagtaggaaggctagcaaaaaaaaaaaaaaaaaaaaaaaaaaaaaaaaaaaaaaaaaaaaaaaaaaaaaaaaaaaaaaaaaaaaaaaaaaaaaaaa

SEQ ID NO: 6544 - RNA, 5797 nt, synthetic construct
  source 1..5797: mol_type = other RNA
aggaaataagagagaaaagaagagtaagaagaaatataagagccaccatggcccctaagaagaagcgtaaagtgagccggatggaacgcctcgtctacgaggtgcggcagaagtgcagaaacatcgaggacatctgcatctcctgcggatctctgaacgtgaccctggagcacccactgttcatcggcggcatgtgccagaactgtaaaaactgttttctggagtgtgcctatcaatacgacgatgacggctaccagagctactgcaccatctgttgcggcggaagagaggtgctgatgtgtggaaataacaactgctgccggtgcttctgcgtggaatgcgtggacctgctggtgggccccggcgccgcccaggccgctattaaggaagatccttggaactgctacatgtgcggccacaagggcacatacggcctgctgagacggagagaggactggcctagcagactgcagatgttcttcgccaataaccacgaccaggagttcgacccccctaaggtgtaccctcccgtccccgccgagaagagaaagcccatccgggtcctgagcctgttcgatggcatcgccaccggtctgctggtgctgaaggacctgggcatccaggtggataggtacattgcctccgaggtgtgcgaggactccatcaccgtgggaatggtgcgtcatcagggcaagatcatgtacgtgggcgacgtgcggagcgtgacacagaagcatatccaggagtggggccctttcgacctggtgatcggcggcagcccttgcaatgacctgagcatcgtgaacccagcccggaagggcctgtacgagggaaccggcagactgttcttcgagttttacagactgctgcacgacgcccggcctaaggaaggcgacgaccggcccttcttttggctgttcgagaatgtggtggccatgggagtcagcgacaagcgggatattagccggttcctggagagcaaccccgtgatgatcgatgccaaggaagtgagcgccgcccaccgggccagatacttctggggcaatctgcctggcatgaacagacccctggccagcaccgtgaacgacaagctggagctgcaggagtgcctggagcacggccggatcgccaagttcagcaaggtgagaaccatcaccacccgaagcaacagcatcaaacaaggcaaggaccagcactttcctgtgttcatgaacgagaaggaggacatcctgtggtgtaccgagatggagagagtgttcgggttcccagtccactacacagatgtcagcaacatgtctagactggccagacagagactgctgggaagaagctggtccgtccctgtgatcagacacctgttcgcccctctgaaggagtacttcgcctgcgtgagcagcggcaacagcaacgccaacagccggggccccagcttctctagcggcctggtgccactgtccctgagagggagccacatgggccccatggagatctacaaaaccgtgagcgcctggaagcggcagcctgtgcgcgtgctgagcctgtttcggaatatcgataaagtcctgaaaagcctgggattcctggagagcggctctggctccggcggtggcaccctgaagtacgtggaggatgtgacaaacgtggtcagacgggatgtggagaagtggggccccttcgatctggtgtacggcagcacccaacccctgggcagctcttgtgaccggtgccctggctggtacatgtttcagttccaccggatcctgcagtacgccctgccgagacaggagtcccagcggccattcttttggattttcatggacaacttgctgctgaccgaggatgaccaggaaactaccactcggttcctgcagaccgaagccgtgaccctgcaggacgtgagaggccgggactaccagaacgccatgcgggtgtggtccaacatccctggactgaaaagcaagcacgcacctctgacccctaaagaagaggagtacctgcaggcccaggtgcggagcagaagcaagctggacgcccctaaggtggatctgctggtgaagaattgcctcctgcccctgagagagtacttcaagtatttcagccagaatagtctgcccctgggcggcccaagcagcggcgcccctcctcccagcggcggcagcccagccggctccccaacctctaccgaggagggcacctctgagtccgccacccccgagagcggccctggcacctccaccgagcccagcgagggcagcgcacccggcagccctgccggcagccccacctccacagaggagggaaccagcaccgagcccagcgaaggcagcgccccaggcaccagcaccgagcctagtgagggcggctctggcggcggcagcgcccaggagattaaacggatcaacaagatcagaagaagacttgtgaaagacagcaacaccaagaaggccggcaagacaggccccatgaaaaccctgctggttagagtgatgacacccgatctgagagagcggctggaaaacctgagaaagaagcctgaaaatatcccccagcccatcagcaatacatctagagccaacctgaataagctgctgaccgattacaccgaaatgaagaaggcgatcctgcatgtgtactgggaagagttccagaaggaccctgtgggcctgatgagccgggtggcccagcctgccagcaagaagatcgatcagaacaagctgaaacctgagatggacgagaagggcaacctgaccaccgccggctttgcctgctctcagtgtggccagcccctgttcgtgtacaagctggagcaggtgtctgagaagggcaaggcttacaccaactacttcggacggtgcaatgtggccgagcacgaaaagctgatcctgctggcccagctgaagcccgagaaggatagcgacgaagccgtgacatatagcctgggaaagtttgggcagagggccctggatttctacagcattcatgtgaccaaggagtccacccaccccgtgaagcccctggcccagatcgccggaaacagatacgcctccggacctgtgggaaaggccctgagcgacgcatgtatgggcacaatcgcctccttcctgtctaagtaccaggacatcatcatcgaacaccagaaggtggtgaagggcaaccagaagagactggagagcctgcgggagctggccggcaaggaaaacctggaataccctagcgtgaccctgccacctcagcctcacaccaaggagggcgttgatgcctacaacgaagtgatcgcccgggtgcgaatgtgggtgaacctgaacctgtggcagaagctgaagctaagcagagatgatgccaagcctctgctgagactgaagggattcccttcctttcctctggtcgagagacaggccaacgaagtggactggtgggacatggtgtgtaacgtgaagaagctgatcaacgagaaaaaggaggatggcaaggtgttttggcagaatctggctggctacaagagacaggaagccctgagaccatacctgagcagcgaggaagatcggaagaagggaaagaaattcgctcggtaccagctgggcgacctgctgctgcacctggaaaagaagcacggcgaggactggggaaaggtgtacgacgaggcctgggagcggattgacaagaaagtggaaggcctgagcaagcacatcaagctggaagaggaacggagaagcgaggacgcccagagcaaggccgccctgaccgactggctgcgggctaaggccagcttcgtgatcgagggcctgaaggaggccgacaaggacgagttctgcagatgcgagctgaagctgcagaagtggtacggggacctgcggggaaagcccttcgccatcgaagccgagaacagcatcctggacatcagcggcttcagcaagcagtacaactgtgccttcatctggcagaaggacggcgtgaagaagctgaacctgtacctgatcatcaactacttcaagggcggcaagctgcggttcaagaagatcaaacctgaagccttcgaagccaacagattctacaccgtgatcaacaaaaagagcggcgagatcgtgcccatggaggtgaacttcaacttcgacgaccccaacctgatcatcctgcctctggcctttggcaagagacagggcagagaattcatctggaacgacctgctgtccctggaaaccggcagcctgaagctggccaacggaagagtgatcgagaagacactgtacaacagaagaacccggcaggatgagcctgccctgttcgtggccctgaccttcgagcggcgggaggtcctggactcctccaatatcaaaccaatgaacctgatcggcgtggcaagaggcgaaaacatccccgccgtgatcgccctgaccgaccccgagggctgcccactgagccggtttaaggatagcctgggaaacccaacccacatcctgagaatcggcgagagctataaggagaagcagcggaccatccaggccaagaaggaggtggagcagcggagagccggcggctacagccggaagtacgccagcaaagccaagaatctggcagacgatatggtgagaaacaccgctagagatctgctgtactacgccgtgacccaggatgccatgctgatcttcgccaacctgagccggggcttcggccggcagggcaagcggaccttcatggccgagagacagtacacacggatggaggactggctgaccgccaagctggcctacgagggcctgagcaagacctacctgtccaagacactggcccagtacacctccaagacatgcagcaactgtgggtttaccatcaccagcgccgactacgacagggtgctggagaagctgaagaagacagcaacaggctggatgaccacaattaacggcaaggagctgaaggtggagggccagattacctactacaacagatacaagagacagaacgtagtcaaggacctgtccgtcgagctggatagactgagcgaagaatctgtgaacaacgacatctcctcctggacaaagggcagaagcggagaagctctgagcctcctgaagaaaagattctcccatagacccgtgcaggagaagttcgtgtgcctgaactgcggcttcgagacacacgcagccgagcaagccgccctgaacatcgccagatcctggctgttcctgcggagccaggagtacaagaaataccagacaaacaagacaaccggcaacaccgataagagagccttcgtcgagacctggcagtccttttaccggaagaagcttaaggaggtgtggaaacctgccgtgcggtctggcggatctggcggaggctccacaagcagccagggcctggtgaccttcggcgacgtggccatcgacttcagccaggaggagtgggagtggctgagccccatccagaggaacctgtacaggaaggtgatgctggagaactacaggaacctggccagcctgggcctgtgcgtgagcaagcccgacgtgatcagcctgctggagcagggcaaggagccctggaccgtgaagaggaggatgaccagggccggctgccccgacctgaaggccgtgaccagccccaagaaaaagagaaaagtctaagctgccttctgcggggcttgccttctggccatgcccttcttctctcccttgcacctgtacctcttggtctttgaataaagcctgagtaggaaggctagcaaaaaaaaaaaaaaaaaaaaaaaaaaaaaaaaaaaaaaaaaaaaaaaaaaaaaaaaaaaaaaaaaaaaaaaaaaaaaaaa

SEQ ID NO: 6545 - RNA, 5797 nt, synthetic construct
  source 1..5797: mol_type = other RNA
aggaaataagagagaaaagaagagtaagaagaaatataagagccaccatggcccctaagaagaagcgtaaagtgagccggatggaacgcctcgtctacgaggtgcggcagaagtgcagaaacatcgaggacatctgcatctcctgcggatctctgaacgtgaccctggagcacccactgttcatcggcggcatgtgccagaactgtaaaaactgttttctggagtgtgcctatcaatacgacgatgacggctaccagagctactgcaccatctgttgcggcggaagagaggtgctgatgtgtggaaataacaactgctgccggtgcttctgcgtggaatgcgtggacctgctggtgggccccggcgccgcccaggccgctattaaggaagatccttggaactgctacatgtgcggccacaagggcacatacggcctgctgagacggagagaggactggcctagcagactgcagatgttcttcgccaataaccacgaccaggagttcgacccccctaaggtgtaccctcccgtccccgccgagaagagaaagcccatccgggtcctgagcctgttcgatggcatcgccaccggtctgctggtgctgaaggacctgggcatccaggtggataggtacattgcctccgaggtgtgcgaggactccatcaccgtgggaatggtgcgtcatcagggcaagatcatgtacgtgggcgacgtgcggagcgtgacacagaagcatatccaggagtggggccctttcgacctggtgatcggcggcagcccttgcaatgacctgagcatcgtgaacccagcccggaagggcctgtacgagggaaccggcagactgttcttcgagttttacagactgctgcacgacgcccggcctaaggaaggcgacgaccggcccttcttttggctgttcgagaatgtggtggccatgggagtcagcgacaagcgggatattagccggttcctggagagcaaccccgtgatgatcgatgccaaggaagtgagcgccgcccaccgggccagatacttctggggcaatctgcctggcatgaacagacccctggccagcaccgtgaacgacaagctggagctgcaggagtgcctggagcacggccggatcgccaagttcagcaaggtgagaaccatcaccacccgaagcaacagcatcaaacaaggcaaggaccagcactttcctgtgttcatgaacgagaaggaggacatcctgtggtgtaccgagatggagagagtgttcgggttcccagtccactacacagatgtcagcaacatgtctagactggccagacagagactgctgggaagaagctggtccgtccctgtgatcagacacctgttcgcccctctgaaggagtacttcgcctgcgtgagcagcggcaacagcaacgccaacagccggggccccagcttctctagcggcctggtgccactgtccctgagagggagccacatgggccccatggagatctacaaaaccgtgagcgcctggaagcggcagcctgtgcgcgtgctgagcctgtttcggaatatcgataaagtcctgaaaagcctgggattcctggagagcggctctggctccggcggtggcaccctgaagtacgtggaggatgtgacaaacgtggtcagacgggatgtggagaagtggggccccttcgatctggtgtacggcagcacccaacccctgggcagctcttgtgaccggtgccctggctggtacatgtttcagttccaccggatcctgcagtacgccctgccgagacaggagtcccagcggccattcttttggattttcatggacaacttgctgctgaccgaggatgaccaggaaactaccactcggttcctgcagaccgaagccgtgaccctgcaggacgtgagaggccgggactaccagaacgccatgcgggtgtggtccaacatccctggactgaaaagcaagcacgcacctctgacccctaaagaagaggagtacctgcaggcccaggtgcggagcagaagcaagctggacgcccctaaggtggatctgctggtgaagaattgcctcctgcccctgagagagtacttcaagtatttcagccagaatagtctgcccctgggcggcccaagcagcggcgcccctcctcccagcggcggcagcccagccggctccccaacctctaccgaggagggcacctctgagtccgccacccccgagagcggccctggcacctccaccgagcccagcgagggcagcgcacccggcagccctgccggcagccccacctccacagaggagggaaccagcaccgagcccagcgaaggcagcgccccaggcaccagcaccgagcctagtgagggcggctctggcggcggcagcgcccaggagattaaacggatcaacaagatcagaagaagacttgtgaaagacagcaacaccaagaaggccggcaagacaggccccatgaaaaccctgctggttagagtgatgacacccgatctgagagagcggctggaaaacctgagaaagaagcctgaaaatatcccccagcccatcagcaatacatctagagccaacctgaataagctgctgaccgattacaccgaaatgaagaaggcgatcctgcatgtgtactgggaagagttccagaaggaccctgtgggcctgatgagccgggtggcccagcctgccagcaagaagatcgatcagaacaagctgaaacctgagatggacgagaagggcaacctgaccaccgccggctttgcctgctctcagtgtggccagcccctgttcgtgtacaagctggagcaggtgtctgagaagggcaaggcttacaccaactacttcggacggtgcaatgtggccgagcacgaaaagctgatcctgctggcccagctgaagcccgagaaggatagcgacgaagccgtgacatatagcctgggaaagtttgggcagagggccctggatttctacagcattcatgtgaccaaggagtccacccaccccgtgaagcccctggcccagatcgccggaaacagatacgcctccggacctgtgggaaaggccctgagcgacgcatgtatgggcacaatcgcctccttcctgtctaagtaccaggacatcatcatcgaacaccagaaggtggtgaagggcaaccagaagagactggagagcctgcgggagctggccggcaaggaaaacctggaataccctagcgtgaccctgccacctcagcctcacaccaaggagggcgttgatgcctacaacgaagtgatcgcccgggtgcgaatgtgggtgaacctgaacctgtggcagaagctgaagctaagcagagatgatgccaagcctctgctgagactgaagggattcccttcctttcctctggtcgagagacaggccaacgaagtggactggtgggacatggtgtgtaacgtgaagaagctgatcaacgagaaaaaggaggatggcaaggtgttttggcagaatctggctggctacaagagacaggaagccctgagaccatacctgagcagcgaggaagatcggaagaagggaaagaaattcgctcggtaccagctgggcgacctgctgctgcacctggaaaagaagcacggcgaggactggggaaaggtgtacgacgaggcctgggagcggattgacaagaaagtggaaggcctgagcaagcacatcaagctggaagaggaacggagaagcgaggacgcccagagcaaggccgccctgaccgactggctgcgggctaaggccagcttcgtgatcgagggcctgaaggaggccgacaaggacgagttctgcagatgcgagctgaagctgcagaagtggtacggggacctgcggggaaagcccttcgccatcgaagccgagaacagcatcctggacatcagcggcttcagcaagcagtacaactgtgccttcatctggcagaaggacggcgtgaagaagctgaacctgtacctgatcatcaactacttcaagggcggcaagctgcggttcaagaagatcaaacctgaagccttcgaagccaacagattctacaccgtgatcaacaaaaagagcggcgagatcgtgcccatggaggtgaacttcaacttcgacgaccccaacctgatcatcctgcctctggcctttggcaagagacagggcagagaattcatctggaacgacctgctgtccctggaaaccggcagcctgaagctggccaacggaagagtgatcgagaagacactgtacaacagaagaacccggcaggatgagcctgccctgttcgtggccctgaccttcgagcggcgggaggtcctggactcctccaatatcaaaccaatgaacctgatcggcgtggcaagaggcgaaaacatccccgccgtgatcgccctgaccgaccccgagggctgcccactgagccggtttaaggatagcctgggaaacccaacccacatcctgagaatcggcgagagctataaggagaagcagcggaccatccaggccaagaaggaggtggagcagcggagagccggcggctacagccggaagtacgccagcaaagccaagaatctggcagacgatatggtgagaaacaccgctagagatctgctgtactacgccgtgacccaggatgccatgctgatcttcgccaacctgagccggggcttcggccggcagggcaagcggaccttcatggccgagagacagtacacacggatggaggactggctgaccgccaagctggcctacgagggcctgagcaagacctacctgtccaagacactggcccagtacacctccaagacatgcagcaactgtgggtttaccatcaccagcgccgactacgacagggtgctggagaagctgaagaagacagcaacaggctggatgaccacaattaacggcaaggagctgaaggtggagggccagattacctactacaacagatacaagagacagaacgtagtcaaggacctgtccgtcgagctggatagactgagcgaagaatctgtgaacaacgacatctcctcctggacaaagggcagaagcggagaagctctgagcctcctgaagaaaagattctcccatagacccgtgcaggagaagttcgtgtgcctgaactgcggcttcgagacacacgcagccgagcaagccgccctgaacatcgccagatcctggctgttcctgcggagccaggagtacaagaaataccagacaaacaagacaaccggcaacaccgataagagagccttcgtcgagacctggcagtccttttaccggaagaagcttaaggaggtgtggaaacctgccgtgcggtctggcggatctggcggaggctccacaagcgcccaggaggtggtgagcttcaaggacgtggccgtggacttcaccagggaggagtggaggctgctgagccccccccagaaggagctgtacaaggaggtgatgctggagaacgccaggaacctgctgagcgtgggcctgagcgccccccccgaggacatgttcagcagcctggagcagagggaggccccctggatgctggagaaggacgacctgaggagctgctgccccgagggcaagatgaggaccagccccaagaaaaagagaaaagtctaagctgccttctgcggggcttgccttctggccatgcccttcttctctcccttgcacctgtacctcttggtctttgaataaagcctgagtaggaaggctagcaaaaaaaaaaaaaaaaaaaaaaaaaaaaaaaaaaaaaaaaaaaaaaaaaaaaaaaaaaaaaaaaaaaaaaaaaaaaaaaa

SEQ ID NO: 6546 - RNA, 5797 nt, synthetic construct
  source 1..5797: mol_type = other RNA
aggaaataagagagaaaagaagagtaagaagaaatataagagccaccatggcccctaagaagaagcgtaaagtgagccggatggaacgcctcgtctacgaggtgcggcagaagtgcagaaacatcgaggacatctgcatctcctgcggatctctgaacgtgaccctggagcacccactgttcatcggcggcatgtgccagaactgtaaaaactgttttctggagtgtgcctatcaatacgacgatgacggctaccagagctactgcaccatctgttgcggcggaagagaggtgctgatgtgtggaaataacaactgctgccggtgcttctgcgtggaatgcgtggacctgctggtgggccccggcgccgcccaggccgctattaaggaagatccttggaactgctacatgtgcggccacaagggcacatacggcctgctgagacggagagaggactggcctagcagactgcagatgttcttcgccaataaccacgaccaggagttcgacccccctaaggtgtaccctcccgtccccgccgagaagagaaagcccatccgggtcctgagcctgttcgatggcatcgccaccggtctgctggtgctgaaggacctgggcatccaggtggataggtacattgcctccgaggtgtgcgaggactccatcaccgtgggaatggtgcgtcatcagggcaagatcatgtacgtgggcgacgtgcggagcgtgacacagaagcatatccaggagtggggccctttcgacctggtgatcggcggcagcccttgcaatgacctgagcatcgtgaacccagcccggaagggcctgtacgagggaaccggcagactgttcttcgagttttacagactgctgcacgacgcccggcctaaggaaggcgacgaccggcccttcttttggctgttcgagaatgtggtggccatgggagtcagcgacaagcgggatattagccggttcctggagagcaaccccgtgatgatcgatgccaaggaagtgagcgccgcccaccgggccagatacttctggggcaatctgcctggcatgaacagacccctggccagcaccgtgaacgacaagctggagctgcaggagtgcctggagcacggccggatcgccaagttcagcaaggtgagaaccatcaccacccgaagcaacagcatcaaacaaggcaaggaccagcactttcctgtgttcatgaacgagaaggaggacatcctgtggtgtaccgagatggagagagtgttcgggttcccagtccactacacagatgtcagcaacatgtctagactggccagacagagactgctgggaagaagctggtccgtccctgtgatcagacacctgttcgcccctctgaaggagtacttcgcctgcgtgagcagcggcaacagcaacgccaacagccggggccccagcttctctagcggcctggtgccactgtccctgagagggagccacatgggccccatggagatctacaaaaccgtgagcgcctggaagcggcagcctgtgcgcgtgctgagcctgtttcggaatatcgataaagtcctgaaaagcctgggattcctggagagcggctctggctccggcggtggcaccctgaagtacgtggaggatgtgacaaacgtggtcagacgggatgtggagaagtggggccccttcgatctggtgtacggcagcacccaacccctgggcagctcttgtgaccggtgccctggctggtacatgtttcagttccaccggatcctgcagtacgccctgccgagacaggagtcccagcggccattcttttggattttcatggacaacttgctgctgaccgaggatgaccaggaaactaccactcggttcctgcagaccgaagccgtgaccctgcaggacgtgagaggccgggactaccagaacgccatgcgggtgtggtccaacatccctggactgaaaagcaagcacgcacctctgacccctaaagaagaggagtacctgcaggcccaggtgcggagcagaagcaagctggacgcccctaaggtggatctgctggtgaagaattgcctcctgcccctgagagagtacttcaagtatttcagccagaatagtctgcccctgggcggcccaagcagcggcgcccctcctcccagcggcggcagcccagccggctccccaacctctaccgaggagggcacctctgagtccgccacccccgagagcggccctggcacctccaccgagcccagcgagggcagcgcacccggcagccctgccggcagccccacctccacagaggagggaaccagcaccgagcccagcgaaggcagcgccccaggcaccagcaccgagcctagtgagggcggctctggcggcggcagcgcccaggagattaaacggatcaacaagatcagaagaagacttgtgaaagacagcaacaccaagaaggccggcaagacaggccccatgaaaaccctgctggttagagtgatgacacccgatctgagagagcggctggaaaacctgagaaagaagcctgaaaatatcccccagcccatcagcaatacatctagagccaacctgaataagctgctgaccgattacaccgaaatgaagaaggcgatcctgcatgtgtactgggaagagttccagaaggaccctgtgggcctgatgagccgggtggcccagcctgccagcaagaagatcgatcagaacaagctgaaacctgagatggacgagaagggcaacctgaccaccgccggctttgcctgctctcagtgtggccagcccctgttcgtgtacaagctggagcaggtgtctgagaagggcaaggcttacaccaactacttcggacggtgcaatgtggccgagcacgaaaagctgatcctgctggcccagctgaagcccgagaaggatagcgacgaagccgtgacatatagcctgggaaagtttgggcagagggccctggatttctacagcattcatgtgaccaaggagtccacccaccccgtgaagcccctggcccagatcgccggaaacagatacgcctccggacctgtgggaaaggccctgagcgacgcatgtatgggcacaatcgcctccttcctgtctaagtaccaggacatcatcatcgaacaccagaaggtggtgaagggcaaccagaagagactggagagcctgcgggagctggccggcaaggaaaacctggaataccctagcgtgaccctgccacctcagcctcacaccaaggagggcgttgatgcctacaacgaagtgatcgcccgggtgcgaatgtgggtgaacctgaacctgtggcagaagctgaagctaagcagagatgatgccaagcctctgctgagactgaagggattcccttcctttcctctggtcgagagacaggccaacgaagtggactggtgggacatggtgtgtaacgtgaagaagctgatcaacgagaaaaaggaggatggcaaggtgttttggcagaatctggctggctacaagagacaggaagccctgagaccatacctgagcagcgaggaagatcggaagaagggaaagaaattcgctcggtaccagctgggcgacctgctgctgcacctggaaaagaagcacggcgaggactggggaaaggtgtacgacgaggcctgggagcggattgacaagaaagtggaaggcctgagcaagcacatcaagctggaagaggaacggagaagcgaggacgcccagagcaaggccgccctgaccgactggctgcgggctaaggccagcttcgtgatcgagggcctgaaggaggccgacaaggacgagttctgcagatgcgagctgaagctgcagaagtggtacggggacctgcggggaaagcccttcgccatcgaagccgagaacagcatcctggacatcagcggcttcagcaagcagtacaactgtgccttcatctggcagaaggacggcgtgaagaagctgaacctgtacctgatcatcaactacttcaagggcggcaagctgcggttcaagaagatcaaacctgaagccttcgaagccaacagattctacaccgtgatcaacaaaaagagcggcgagatcgtgcccatggaggtgaacttcaacttcgacgaccccaacctgatcatcctgcctctggcctttggcaagagacagggcagagaattcatctggaacgacctgctgtccctggaaaccggcagcctgaagctggccaacggaagagtgatcgagaagacactgtacaacagaagaacccggcaggatgagcctgccctgttcgtggccctgaccttcgagcggcgggaggtcctggactcctccaatatcaaaccaatgaacctgatcggcgtggcaagaggcgaaaacatccccgccgtgatcgccctgaccgaccccgagggctgcccactgagccggtttaaggatagcctgggaaacccaacccacatcctgagaatcggcgagagctataaggagaagcagcggaccatccaggccaagaaggaggtggagcagcggagagccggcggctacagccggaagtacgccagcaaagccaagaatctggcagacgatatggtgagaaacaccgctagagatctgctgtactacgccgtgacccaggatgccatgctgatcttcgccaacctgagccggggcttcggccggcagggcaagcggaccttcatggccgagagacagtacacacggatggaggactggctgaccgccaagctggcctacgagggcctgagcaagacctacctgtccaagacactggcccagtacacctccaagacatgcagcaactgtgggtttaccatcaccagcgccgactacgacagggtgctggagaagctgaagaagacagcaacaggctggatgaccacaattaacggcaaggagctgaaggtggagggccagattacctactacaacagatacaagagacagaacgtagtcaaggacctgtccgtcgagctggatagactgagcgaagaatctgtgaacaacgacatctcctcctggacaaagggcagaagcggagaagctctgagcctcctgaagaaaagattctcccatagacccgtgcaggagaagttcgtgtgcctgaactgcggcttcgagacacacgcagccgagcaagccgccctgaacatcgccagatcctggctgttcctgcggagccaggagtacaagaaataccagacaaacaagacaaccggcaacaccgataagagagccttcgtcgagacctggcagtccttttaccggaagaagcttaaggaggtgtggaaacctgccgtgcggtctggcggatctggcggaggctccacaagcagccagagcctggtgaccttcggcgacgtggccgtggacttcagccaggaggagtgggagaggctgagcagcgaccagagggacctgtacaggagggtgatgctggagaactacaggaacctggtgagcctgggcctgtgcttcagcaagcccgacatcatcagcagcctggagcagaggaaggagctgtggatggccaagagggaggtgaccaggggccagtgccccgactggaaggccgtgaccagccccaagaaaaagagaaaagtctaagctgccttctgcggggcttgccttctggccatgcccttcttctctcccttgcacctgtacctcttggtctttgaataaagcctgagtaggaaggctagcaaaaaaaaaaaaaaaaaaaaaaaaaaaaaaaaaaaaaaaaaaaaaaaaaaaaaaaaaaaaaaaaaaaaaaaaaaaaaaaa

SEQ ID NO: 6547 - RNA, 5797 nt, synthetic construct
  source 1..5797: mol_type = other RNA
aggaaataagagagaaaagaagagtaagaagaaatataagagccaccatggcccctaagaagaagcgtaaagtgagccggatggaacgcctcgtctacgaggtgcggcagaagtgcagaaacatcgaggacatctgcatctcctgcggatctctgaacgtgaccctggagcacccactgttcatcggcggcatgtgccagaactgtaaaaactgttttctggagtgtgcctatcaatacgacgatgacggctaccagagctactgcaccatctgttgcggcggaagagaggtgctgatgtgtggaaataacaactgctgccggtgcttctgcgtggaatgcgtggacctgctggtgggccccggcgccgcccaggccgctattaaggaagatccttggaactgctacatgtgcggccacaagggcacatacggcctgctgagacggagagaggactggcctagcagactgcagatgttcttcgccaataaccacgaccaggagttcgacccccctaaggtgtaccctcccgtccccgccgagaagagaaagcccatccgggtcctgagcctgttcgatggcatcgccaccggtctgctggtgctgaaggacctgggcatccaggtggataggtacattgcctccgaggtgtgcgaggactccatcaccgtgggaatggtgcgtcatcagggcaagatcatgtacgtgggcgacgtgcggagcgtgacacagaagcatatccaggagtggggccctttcgacctggtgatcggcggcagcccttgcaatgacctgagcatcgtgaacccagcccggaagggcctgtacgagggaaccggcagactgttcttcgagttttacagactgctgcacgacgcccggcctaaggaaggcgacgaccggcccttcttttggctgttcgagaatgtggtggccatgggagtcagcgacaagcgggatattagccggttcctggagagcaaccccgtgatgatcgatgccaaggaagtgagcgccgcccaccgggccagatacttctggggcaatctgcctggcatgaacagacccctggccagcaccgtgaacgacaagctggagctgcaggagtgcctggagcacggccggatcgccaagttcagcaaggtgagaaccatcaccacccgaagcaacagcatcaaacaaggcaaggaccagcactttcctgtgttcatgaacgagaaggaggacatcctgtggtgtaccgagatggagagagtgttcgggttcccagtccactacacagatgtcagcaacatgtctagactggccagacagagactgctgggaagaagctggtccgtccctgtgatcagacacctgttcgcccctctgaaggagtacttcgcctgcgtgagcagcggcaacagcaacgccaacagccggggccccagcttctctagcggcctggtgccactgtccctgagagggagccacatgggccccatggagatctacaaaaccgtgagcgcctggaagcggcagcctgtgcgcgtgctgagcctgtttcggaatatcgataaagtcctgaaaagcctgggattcctggagagcggctctggctccggcggtggcaccctgaagtacgtggaggatgtgacaaacgtggtcagacgggatgtggagaagtggggccccttcgatctggtgtacggcagcacccaacccctgggcagctcttgtgaccggtgccctggctggtacatgtttcagttccaccggatcctgcagtacgccctgccgagacaggagtcccagcggccattcttttggattttcatggacaacttgctgctgaccgaggatgaccaggaaactaccactcggttcctgcagaccgaagccgtgaccctgcaggacgtgagaggccgggactaccagaacgccatgcgggtgtggtccaacatccctggactgaaaagcaagcacgcacctctgacccctaaagaagaggagtacctgcaggcccaggtgcggagcagaagcaagctggacgcccctaaggtggatctgctggtgaagaattgcctcctgcccctgagagagtacttcaagtatttcagccagaatagtctgcccctgggcggcccaagcagcggcgcccctcctcccagcggcggcagcccagccggctccccaacctctaccgaggagggcacctctgagtccgccacccccgagagcggccctggcacctccaccgagcccagcgagggcagcgcacccggcagccctgccggcagccccacctccacagaggagggaaccagcaccgagcccagcgaaggcagcgccccaggcaccagcaccgagcctagtgagggcggctctggcggcggcagcgcccaggagattaaacggatcaacaagatcagaagaagacttgtgaaagacagcaacaccaagaaggccggcaagacaggccccatgaaaaccctgctggttagagtgatgacacccgatctgagagagcggctggaaaacctgagaaagaagcctgaaaatatcccccagcccatcagcaatacatctagagccaacctgaataagctgctgaccgattacaccgaaatgaagaaggcgatcctgcatgtgtactgggaagagttccagaaggaccctgtgggcctgatgagccgggtggcccagcctgccagcaagaagatcgatcagaacaagctgaaacctgagatggacgagaagggcaacctgaccaccgccggctttgcctgctctcagtgtggccagcccctgttcgtgtacaagctggagcaggtgtctgagaagggcaaggcttacaccaactacttcggacggtgcaatgtggccgagcacgaaaagctgatcctgctggcccagctgaagcccgagaaggatagcgacgaagccgtgacatatagcctgggaaagtttgggcagagggccctggatttctacagcattcatgtgaccaaggagtccacccaccccgtgaagcccctggcccagatcgccggaaacagatacgcctccggacctgtgggaaaggccctgagcgacgcatgtatgggcacaatcgcctccttcctgtctaagtaccaggacatcatcatcgaacaccagaaggtggtgaagggcaaccagaagagactggagagcctgcgggagctggccggcaaggaaaacctggaataccctagcgtgaccctgccacctcagcctcacaccaaggagggcgttgatgcctacaacgaagtgatcgcccgggtgcgaatgtgggtgaacctgaacctgtggcagaagctgaagctaagcagagatgatgccaagcctctgctgagactgaagggattcccttcctttcctctggtcgagagacaggccaacgaagtggactggtgggacatggtgtgtaacgtgaagaagctgatcaacgagaaaaaggaggatggcaaggtgttttggcagaatctggctggctacaagagacaggaagccctgagaccatacctgagcagcgaggaagatcggaagaagggaaagaaattcgctcggtaccagctgggcgacctgctgctgcacctggaaaagaagcacggcgaggactggggaaaggtgtacgacgaggcctgggagcggattgacaagaaagtggaaggcctgagcaagcacatcaagctggaagaggaacggagaagcgaggacgcccagagcaaggccgccctgaccgactggctgcgggctaaggccagcttcgtgatcgagggcctgaaggaggccgacaaggacgagttctgcagatgcgagctgaagctgcagaagtggtacggggacctgcggggaaagcccttcgccatcgaagccgagaacagcatcctggacatcagcggcttcagcaagcagtacaactgtgccttcatctggcagaaggacggcgtgaagaagctgaacctgtacctgatcatcaactacttcaagggcggcaagctgcggttcaagaagatcaaacctgaagccttcgaagccaacagattctacaccgtgatcaacaaaaagagcggcgagatcgtgcccatggaggtgaacttcaacttcgacgaccccaacctgatcatcctgcctctggcctttggcaagagacagggcagagaattcatctggaacgacctgctgtccctggaaaccggcagcctgaagctggccaacggaagagtgatcgagaagacactgtacaacagaagaacccggcaggatgagcctgccctgttcgtggccctgaccttcgagcggcgggaggtcctggactcctccaatatcaaaccaatgaacctgatcggcgtggcaagaggcgaaaacatccccgccgtgatcgccctgaccgaccccgagggctgcccactgagccggtttaaggatagcctgggaaacccaacccacatcctgagaatcggcgagagctataaggagaagcagcggaccatccaggccaagaaggaggtggagcagcggagagccggcggctacagccggaagtacgccagcaaagccaagaatctggcagacgatatggtgagaaacaccgctagagatctgctgtactacgccgtgacccaggatgccatgctgatcttcgccaacctgagccggggcttcggccggcagggcaagcggaccttcatggccgagagacagtacacacggatggaggactggctgaccgccaagctggcctacgagggcctgagcaagacctacctgtccaagacactggcccagtacacctccaagacatgcagcaactgtgggtttaccatcaccagcgccgactacgacagggtgctggagaagctgaagaagacagcaacaggctggatgaccacaattaacggcaaggagctgaaggtggagggccagattacctactacaacagatacaagagacagaacgtagtcaaggacctgtccgtcgagctggatagactgagcgaagaatctgtgaacaacgacatctcctcctggacaaagggcagaagcggagaagctctgagcctcctgaagaaaagattctcccatagacccgtgcaggagaagttcgtgtgcctgaactgcggcttcgagacacacgcagccgagcaagccgccctgaacatcgccagatcctggctgttcctgcggagccaggagtacaagaaataccagacaaacaagacaaccggcaacaccgataagagagccttcgtcgagacctggcagtccttttaccggaagaagcttaaggaggtgtggaaacctgccgtgcggtctggcggatctggcggaggctccacaagcaagcccggcgccctgagcttcgccgacgtggccgtgtacttcagcagcgaggagtggggctgcctgaggcccgcccagagggccctgtacagggacgtgatgagggagacctacggccacctgggcgccctgggcttcgccggccccaagcccgccctgatcagctggatggagaggaagaaggaggcctggagccccgaggccgaggaccccgaggacagggccaggcaccccggctacggcaccagccccaagaaaaagagaaaagtctaagctgccttctgcggggcttgccttctggccatgcccttcttctctcccttgcacctgtacctcttggtctttgaataaagcctgagtaggaaggctagcaaaaaaaaaaaaaaaaaaaaaaaaaaaaaaaaaaaaaaaaaaaaaaaaaaaaaaaaaaaaaaaaaaaaaaaaaaaaaaaa

SEQ ID NO: 6548 - RNA, 5797 nt, synthetic construct
  source 1..5797: mol_type = other RNA
aggaaataagagagaaaagaagagtaagaagaaatataagagccaccatggcccctaagaagaagcgtaaagtgagccggatggaacgcctcgtctacgaggtgcggcagaagtgcagaaacatcgaggacatctgcatctcctgcggatctctgaacgtgaccctggagcacccactgttcatcggcggcatgtgccagaactgtaaaaactgttttctggagtgtgcctatcaatacgacgatgacggctaccagagctactgcaccatctgttgcggcggaagagaggtgctgatgtgtggaaataacaactgctgccggtgcttctgcgtggaatgcgtggacctgctggtgggccccggcgccgcccaggccgctattaaggaagatccttggaactgctacatgtgcggccacaagggcacatacggcctgctgagacggagagaggactggcctagcagactgcagatgttcttcgccaataaccacgaccaggagttcgacccccctaaggtgtaccctcccgtccccgccgagaagagaaagcccatccgggtcctgagcctgttcgatggcatcgccaccggtctgctggtgctgaaggacctgggcatccaggtggataggtacattgcctccgaggtgtgcgaggactccatcaccgtgggaatggtgcgtcatcagggcaagatcatgtacgtgggcgacgtgcggagcgtgacacagaagcatatccaggagtggggccctttcgacctggtgatcggcggcagcccttgcaatgacctgagcatcgtgaacccagcccggaagggcctgtacgagggaaccggcagactgttcttcgagttttacagactgctgcacgacgcccggcctaaggaaggcgacgaccggcccttcttttggctgttcgagaatgtggtggccatgggagtcagcgacaagcgggatattagccggttcctggagagcaaccccgtgatgatcgatgccaaggaagtgagcgccgcccaccgggccagatacttctggggcaatctgcctggcatgaacagacccctggccagcaccgtgaacgacaagctggagctgcaggagtgcctggagcacggccggatcgccaagttcagcaaggtgagaaccatcaccacccgaagcaacagcatcaaacaaggcaaggaccagcactttcctgtgttcatgaacgagaaggaggacatcctgtggtgtaccgagatggagagagtgttcgggttcccagtccactacacagatgtcagcaacatgtctagactggccagacagagactgctgggaagaagctggtccgtccctgtgatcagacacctgttcgcccctctgaaggagtacttcgcctgcgtgagcagcggcaacagcaacgccaacagccggggccccagcttctctagcggcctggtgccactgtccctgagagggagccacatgggccccatggagatctacaaaaccgtgagcgcctggaagcggcagcctgtgcgcgtgctgagcctgtttcggaatatcgataaagtcctgaaaagcctgggattcctggagagcggctctggctccggcggtggcaccctgaagtacgtggaggatgtgacaaacgtggtcagacgggatgtggagaagtggggccccttcgatctggtgtacggcagcacccaacccctgggcagctcttgtgaccggtgccctggctggtacatgtttcagttccaccggatcctgcagtacgccctgccgagacaggagtcccagcggccattcttttggattttcatggacaacttgctgctgaccgaggatgaccaggaaactaccactcggttcctgcagaccgaagccgtgaccctgcaggacgtgagaggccgggactaccagaacgccatgcgggtgtggtccaacatccctggactgaaaagcaagcacgcacctctgacccctaaagaagaggagtacctgcaggcccaggtgcggagcagaagcaagctggacgcccctaaggtggatctgctggtgaagaattgcctcctgcccctgagagagtacttcaagtatttcagccagaatagtctgcccctgggcggcccaagcagcggcgcccctcctcccagcggcggcagcccagccggctccccaacctctaccgaggagggcacctctgagtccgccacccccgagagcggccctggcacctccaccgagcccagcgagggcagcgcacccggcagccctgccggcagccccacctccacagaggagggaaccagcaccgagcccagcgaaggcagcgccccaggcaccagcaccgagcctagtgagggcggctctggcggcggcagcgcccaggagattaaacggatcaacaagatcagaagaagacttgtgaaagacagcaacaccaagaaggccggcaagacaggccccatgaaaaccctgctggttagagtgatgacacccgatctgagagagcggctggaaaacctgagaaagaagcctgaaaatatcccccagcccatcagcaatacatctagagccaacctgaataagctgctgaccgattacaccgaaatgaagaaggcgatcctgcatgtgtactgggaagagttccagaaggaccctgtgggcctgatgagccgggtggcccagcctgccagcaagaagatcgatcagaacaagctgaaacctgagatggacgagaagggcaacctgaccaccgccggctttgcctgctctcagtgtggccagcccctgttcgtgtacaagctggagcaggtgtctgagaagggcaaggcttacaccaactacttcggacggtgcaatgtggccgagcacgaaaagctgatcctgctggcccagctgaagcccgagaaggatagcgacgaagccgtgacatatagcctgggaaagtttgggcagagggccctggatttctacagcattcatgtgaccaaggagtccacccaccccgtgaagcccctggcccagatcgccggaaacagatacgcctccggacctgtgggaaaggccctgagcgacgcatgtatgggcacaatcgcctccttcctgtctaagtaccaggacatcatcatcgaacaccagaaggtggtgaagggcaaccagaagagactggagagcctgcgggagctggccggcaaggaaaacctggaataccctagcgtgaccctgccacctcagcctcacaccaaggagggcgttgatgcctacaacgaagtgatcgcccgggtgcgaatgtgggtgaacctgaacctgtggcagaagctgaagctaagcagagatgatgccaagcctctgctgagactgaagggattcccttcctttcctctggtcgagagacaggccaacgaagtggactggtgggacatggtgtgtaacgtgaagaagctgatcaacgagaaaaaggaggatggcaaggtgttttggcagaatctggctggctacaagagacaggaagccctgagaccatacctgagcagcgaggaagatcggaagaagggaaagaaattcgctcggtaccagctgggcgacctgctgctgcacctggaaaagaagcacggcgaggactggggaaaggtgtacgacgaggcctgggagcggattgacaagaaagtggaaggcctgagcaagcacatcaagctggaagaggaacggagaagcgaggacgcccagagcaaggccgccctgaccgactggctgcgggctaaggccagcttcgtgatcgagggcctgaaggaggccgacaaggacgagttctgcagatgcgagctgaagctgcagaagtggtacggggacctgcggggaaagcccttcgccatcgaagccgagaacagcatcctggacatcagcggcttcagcaagcagtacaactgtgccttcatctggcagaaggacggcgtgaagaagctgaacctgtacctgatcatcaactacttcaagggcggcaagctgcggttcaagaagatcaaacctgaagccttcgaagccaacagattctacaccgtgatcaacaaaaagagcggcgagatcgtgcccatggaggtgaacttcaacttcgacgaccccaacctgatcatcctgcctctggcctttggcaagagacagggcagagaattcatctggaacgacctgctgtccctggaaaccggcagcctgaagctggccaacggaagagtgatcgagaagacactgtacaacagaagaacccggcaggatgagcctgccctgttcgtggccctgaccttcgagcggcgggaggtcctggactcctccaatatcaaaccaatgaacctgatcggcgtggcaagaggcgaaaacatccccgccgtgatcgccctgaccgaccccgagggctgcccactgagccggtttaaggatagcctgggaaacccaacccacatcctgagaatcggcgagagctataaggagaagcagcggaccatccaggccaagaaggaggtggagcagcggagagccggcggctacagccggaagtacgccagcaaagccaagaatctggcagacgatatggtgagaaacaccgctagagatctgctgtactacgccgtgacccaggatgccatgctgatcttcgccaacctgagccggggcttcggccggcagggcaagcggaccttcatggccgagagacagtacacacggatggaggactggctgaccgccaagctggcctacgagggcctgagcaagacctacctgtccaagacactggcccagtacacctccaagacatgcagcaactgtgggtttaccatcaccagcgccgactacgacagggtgctggagaagctgaagaagacagcaacaggctggatgaccacaattaacggcaaggagctgaaggtggagggccagattacctactacaacagatacaagagacagaacgtagtcaaggacctgtccgtcgagctggatagactgagcgaagaatctgtgaacaacgacatctcctcctggacaaagggcagaagcggagaagctctgagcctcctgaagaaaagattctcccatagacccgtgcaggagaagttcgtgtgcctgaactgcggcttcgagacacacgcagccgagcaagccgccctgaacatcgccagatcctggctgttcctgcggagccaggagtacaagaaataccagacaaacaagacaaccggcaacaccgataagagagccttcgtcgagacctggcagtccttttaccggaagaagcttaaggaggtgtggaaacctgccgtgcggtctggcggatctggcggaggctccacaagcatggagcccctgaagttcagggacgtggccgtggagttcagcctggaggagtggcagtgcctggacaccatccagcagaacctgtacaggaacgtgatgctggagaactacaggaacctggtgttcctgggcatcgccgtgagcaagcccgacctgatcacctgcctggagcaggagaaggagccctggaccaggaagaggcacaggatggtggccaagcccgtgacctgcagccacttcgccaccagccccaagaaaaagagaaaagtctaagctgccttctgcggggcttgccttctggccatgcccttcttctctcccttgcacctgtacctcttggtctttgaataaagcctgagtaggaaggctagcaaaaaaaaaaaaaaaaaaaaaaaaaaaaaaaaaaaaaaaaaaaaaaaaaaaaaaaaaaaaaaaaaaaaaaaaaaaaaaaa

SEQ ID NO: 6549 - RNA, 5797 nt, synthetic construct
  source 1..5797: mol_type = other RNA
aggaaataagagagaaaagaagagtaagaagaaatataagagccaccatggcccctaagaagaagcgtaaagtgagccggatggaacgcctcgtctacgaggtgcggcagaagtgcagaaacatcgaggacatctgcatctcctgcggatctctgaacgtgaccctggagcacccactgttcatcggcggcatgtgccagaactgtaaaaactgttttctggagtgtgcctatcaatacgacgatgacggctaccagagctactgcaccatctgttgcggcggaagagaggtgctgatgtgtggaaataacaactgctgccggtgcttctgcgtggaatgcgtggacctgctggtgggccccggcgccgcccaggccgctattaaggaagatccttggaactgctacatgtgcggccacaagggcacatacggcctgctgagacggagagaggactggcctagcagactgcagatgttcttcgccaataaccacgaccaggagttcgacccccctaaggtgtaccctcccgtccccgccgagaagagaaagcccatccgggtcctgagcctgttcgatggcatcgccaccggtctgctggtgctgaaggacctgggcatccaggtggataggtacattgcctccgaggtgtgcgaggactccatcaccgtgggaatggtgcgtcatcagggcaagatcatgtacgtgggcgacgtgcggagcgtgacacagaagcatatccaggagtggggccctttcgacctggtgatcggcggcagcccttgcaatgacctgagcatcgtgaacccagcccggaagggcctgtacgagggaaccggcagactgttcttcgagttttacagactgctgcacgacgcccggcctaaggaaggcgacgaccggcccttcttttggctgttcgagaatgtggtggccatgggagtcagcgacaagcgggatattagccggttcctggagagcaaccccgtgatgatcgatgccaaggaagtgagcgccgcccaccgggccagatacttctggggcaatctgcctggcatgaacagacccctggccagcaccgtgaacgacaagctggagctgcaggagtgcctggagcacggccggatcgccaagttcagcaaggtgagaaccatcaccacccgaagcaacagcatcaaacaaggcaaggaccagcactttcctgtgttcatgaacgagaaggaggacatcctgtggtgtaccgagatggagagagtgttcgggttcccagtccactacacagatgtcagcaacatgtctagactggccagacagagactgctgggaagaagctggtccgtccctgtgatcagacacctgttcgcccctctgaaggagtacttcgcctgcgtgagcagcggcaacagcaacgccaacagccggggccccagcttctctagcggcctggtgccactgtccctgagagggagccacatgggccccatggagatctacaaaaccgtgagcgcctggaagcggcagcctgtgcgcgtgctgagcctgtttcggaatatcgataaagtcctgaaaagcctgggattcctggagagcggctctggctccggcggtggcaccctgaagtacgtggaggatgtgacaaacgtggtcagacgggatgtggagaagtggggccccttcgatctggtgtacggcagcacccaacccctgggcagctcttgtgaccggtgccctggctggtacatgtttcagttccaccggatcctgcagtacgccctgccgagacaggagtcccagcggccattcttttggattttcatggacaacttgctgctgaccgaggatgaccaggaaactaccactcggttcctgcagaccgaagccgtgaccctgcaggacgtgagaggccgggactaccagaacgccatgcgggtgtggtccaacatccctggactgaaaagcaagcacgcacctctgacccctaaagaagaggagtacctgcaggcccaggtgcggagcagaagcaagctggacgcccctaaggtggatctgctggtgaagaattgcctcctgcccctgagagagtacttcaagtatttcagccagaatagtctgcccctgggcggcccaagcagcggcgcccctcctcccagcggcggcagcccagccggctccccaacctctaccgaggagggcacctctgagtccgccacccccgagagcggccctggcacctccaccgagcccagcgagggcagcgcacccggcagccctgccggcagccccacctccacagaggagggaaccagcaccgagcccagcgaaggcagcgccccaggcaccagcaccgagcctagtgagggcggctctggcggcggcagcgcccaggagattaaacggatcaacaagatcagaagaagacttgtgaaagacagcaacaccaagaaggccggcaagacaggccccatgaaaaccctgctggttagagtgatgacacccgatctgagagagcggctggaaaacctgagaaagaagcctgaaaatatcccccagcccatcagcaatacatctagagccaacctgaataagctgctgaccgattacaccgaaatgaagaaggcgatcctgcatgtgtactgggaagagttccagaaggaccctgtgggcctgatgagccgggtggcccagcctgccagcaagaagatcgatcagaacaagctgaaacctgagatggacgagaagggcaacctgaccaccgccggctttgcctgctctcagtgtggccagcccctgttcgtgtacaagctggagcaggtgtctgagaagggcaaggcttacaccaactacttcggacggtgcaatgtggccgagcacgaaaagctgatcctgctggcccagctgaagcccgagaaggatagcgacgaagccgtgacatatagcctgggaaagtttgggcagagggccctggatttctacagcattcatgtgaccaaggagtccacccaccccgtgaagcccctggcccagatcgccggaaacagatacgcctccggacctgtgggaaaggccctgagcgacgcatgtatgggcacaatcgcctccttcctgtctaagtaccaggacatcatcatcgaacaccagaaggtggtgaagggcaaccagaagagactggagagcctgcgggagctggccggcaaggaaaacctggaataccctagcgtgaccctgccacctcagcctcacaccaaggagggcgttgatgcctacaacgaagtgatcgcccgggtgcgaatgtgggtgaacctgaacctgtggcagaagctgaagctaagcagagatgatgccaagcctctgctgagactgaagggattcccttcctttcctctggtcgagagacaggccaacgaagtggactggtgggacatggtgtgtaacgtgaagaagctgatcaacgagaaaaaggaggatggcaaggtgttttggcagaatctggctggctacaagagacaggaagccctgagaccatacctgagcagcgaggaagatcggaagaagggaaagaaattcgctcggtaccagctgggcgacctgctgctgcacctggaaaagaagcacggcgaggactggggaaaggtgtacgacgaggcctgggagcggattgacaagaaagtggaaggcctgagcaagcacatcaagctggaagaggaacggagaagcgaggacgcccagagcaaggccgccctgaccgactggctgcgggctaaggccagcttcgtgatcgagggcctgaaggaggccgacaaggacgagttctgcagatgcgagctgaagctgcagaagtggtacggggacctgcggggaaagcccttcgccatcgaagccgagaacagcatcctggacatcagcggcttcagcaagcagtacaactgtgccttcatctggcagaaggacggcgtgaagaagctgaacctgtacctgatcatcaactacttcaagggcggcaagctgcggttcaagaagatcaaacctgaagccttcgaagccaacagattctacaccgtgatcaacaaaaagagcggcgagatcgtgcccatggaggtgaacttcaacttcgacgaccccaacctgatcatcctgcctctggcctttggcaagagacagggcagagaattcatctggaacgacctgctgtccctggaaaccggcagcctgaagctggccaacggaagagtgatcgagaagacactgtacaacagaagaacccggcaggatgagcctgccctgttcgtggccctgaccttcgagcggcgggaggtcctggactcctccaatatcaaaccaatgaacctgatcggcgtggcaagaggcgaaaacatccccgccgtgatcgccctgaccgaccccgagggctgcccactgagccggtttaaggatagcctgggaaacccaacccacatcctgagaatcggcgagagctataaggagaagcagcggaccatccaggccaagaaggaggtggagcagcggagagccggcggctacagccggaagtacgccagcaaagccaagaatctggcagacgatatggtgagaaacaccgctagagatctgctgtactacgccgtgacccaggatgccatgctgatcttcgccaacctgagccggggcttcggccggcagggcaagcggaccttcatggccgagagacagtacacacggatggaggactggctgaccgccaagctggcctacgagggcctgagcaagacctacctgtccaagacactggcccagtacacctccaagacatgcagcaactgtgggtttaccatcaccagcgccgactacgacagggtgctggagaagctgaagaagacagcaacaggctggatgaccacaattaacggcaaggagctgaaggtggagggccagattacctactacaacagatacaagagacagaacgtagtcaaggacctgtccgtcgagctggatagactgagcgaagaatctgtgaacaacgacatctcctcctggacaaagggcagaagcggagaagctctgagcctcctgaagaaaagattctcccatagacccgtgcaggagaagttcgtgtgcctgaactgcggcttcgagacacacgcagccgagcaagccgccctgaacatcgccagatcctggctgttcctgcggagccaggagtacaagaaataccagacaaacaagacaaccggcaacaccgataagagagccttcgtcgagacctggcagtccttttaccggaagaagcttaaggaggtgtggaaacctgccgtgcggtctggcggatctggcggaggctccacaagcctgctgcaggagagcctgaccctggaggacgtggccgtggacttcacccaggaggagtggaggctgctggcccccgcccagaaggacctgtacagggacgtgatgctggagaacttcaggaacctggtgagcgtgggctacgtggccagcatgcccgccgccctgagcaggctggagaggggcggcaggtggatgaccgaggacgagaccaggaggggcatctgccccgagatcaagaaggacaccagccccaagaaaaagagaaaagtctaagctgccttctgcggggcttgccttctggccatgcccttcttctctcccttgcacctgtacctcttggtctttgaataaagcctgagtaggaaggctagcaaaaaaaaaaaaaaaaaaaaaaaaaaaaaaaaaaaaaaaaaaaaaaaaaaaaaaaaaaaaaaaaaaaaaaaaaaaaaaaa

SEQ ID NO: 6550 - RNA, 5797 nt, synthetic construct
  source 1..5797: mol_type = other RNA
aggaaataagagagaaaagaagagtaagaagaaatataagagccaccatggcccctaagaagaagcgtaaagtgagccggatggaacgcctcgtctacgaggtgcggcagaagtgcagaaacatcgaggacatctgcatctcctgcggatctctgaacgtgaccctggagcacccactgttcatcggcggcatgtgccagaactgtaaaaactgttttctggagtgtgcctatcaatacgacgatgacggctaccagagctactgcaccatctgttgcggcggaagagaggtgctgatgtgtggaaataacaactgctgccggtgcttctgcgtggaatgcgtggacctgctggtgggccccggcgccgcccaggccgctattaaggaagatccttggaactgctacatgtgcggccacaagggcacatacggcctgctgagacggagagaggactggcctagcagactgcagatgttcttcgccaataaccacgaccaggagttcgacccccctaaggtgtaccctcccgtccccgccgagaagagaaagcccatccgggtcctgagcctgttcgatggcatcgccaccggtctgctggtgctgaaggacctgggcatccaggtggataggtacattgcctccgaggtgtgcgaggactccatcaccgtgggaatggtgcgtcatcagggcaagatcatgtacgtgggcgacgtgcggagcgtgacacagaagcatatccaggagtggggccctttcgacctggtgatcggcggcagcccttgcaatgacctgagcatcgtgaacccagcccggaagggcctgtacgagggaaccggcagactgttcttcgagttttacagactgctgcacgacgcccggcctaaggaaggcgacgaccggcccttcttttggctgttcgagaatgtggtggccatgggagtcagcgacaagcgggatattagccggttcctggagagcaaccccgtgatgatcgatgccaaggaagtgagcgccgcccaccgggccagatacttctggggcaatctgcctggcatgaacagacccctggccagcaccgtgaacgacaagctggagctgcaggagtgcctggagcacggccggatcgccaagttcagcaaggtgagaaccatcaccacccgaagcaacagcatcaaacaaggcaaggaccagcactttcctgtgttcatgaacgagaaggaggacatcctgtggtgtaccgagatggagagagtgttcgggttcccagtccactacacagatgtcagcaacatgtctagactggccagacagagactgctgggaagaagctggtccgtccctgtgatcagacacctgttcgcccctctgaaggagtacttcgcctgcgtgagcagcggcaacagcaacgccaacagccggggccccagcttctctagcggcctggtgccactgtccctgagagggagccacatgggccccatggagatctacaaaaccgtgagcgcctggaagcggcagcctgtgcgcgtgctgagcctgtttcggaatatcgataaagtcctgaaaagcctgggattcctggagagcggctctggctccggcggtggcaccctgaagtacgtggaggatgtgacaaacgtggtcagacgggatgtggagaagtggggccccttcgatctggtgtacggcagcacccaacccctgggcagctcttgtgaccggtgccctggctggtacatgtttcagttccaccggatcctgcagtacgccctgccgagacaggagtcccagcggccattcttttggattttcatggacaacttgctgctgaccgaggatgaccaggaaactaccactcggttcctgcagaccgaagccgtgaccctgcaggacgtgagaggccgggactaccagaacgccatgcgggtgtggtccaacatccctggactgaaaagcaagcacgcacctctgacccctaaagaagaggagtacctgcaggcccaggtgcggagcagaagcaagctggacgcccctaaggtggatctgctggtgaagaattgcctcctgcccctgagagagtacttcaagtatttcagccagaatagtctgcccctgggcggcccaagcagcggcgcccctcctcccagcggcggcagcccagccggctccccaacctctaccgaggagggcacctctgagtccgccacccccgagagcggccctggcacctccaccgagcccagcgagggcagcgcacccggcagccctgccggcagccccacctccacagaggagggaaccagcaccgagcccagcgaaggcagcgccccaggcaccagcaccgagcctagtgagggcggctctggcggcggcagcgcccaggagattaaacggatcaacaagatcagaagaagacttgtgaaagacagcaacaccaagaaggccggcaagacaggccccatgaaaaccctgctggttagagtgatgacacccgatctgagagagcggctggaaaacctgagaaagaagcctgaaaatatcccccagcccatcagcaatacatctagagccaacctgaataagctgctgaccgattacaccgaaatgaagaaggcgatcctgcatgtgtactgggaagagttccagaaggaccctgtgggcctgatgagccgggtggcccagcctgccagcaagaagatcgatcagaacaagctgaaacctgagatggacgagaagggcaacctgaccaccgccggctttgcctgctctcagtgtggccagcccctgttcgtgtacaagctggagcaggtgtctgagaagggcaaggcttacaccaactacttcggacggtgcaatgtggccgagcacgaaaagctgatcctgctggcccagctgaagcccgagaaggatagcgacgaagccgtgacatatagcctgggaaagtttgggcagagggccctggatttctacagcattcatgtgaccaaggagtccacccaccccgtgaagcccctggcccagatcgccggaaacagatacgcctccggacctgtgggaaaggccctgagcgacgcatgtatgggcacaatcgcctccttcctgtctaagtaccaggacatcatcatcgaacaccagaaggtggtgaagggcaaccagaagagactggagagcctgcgggagctggccggcaaggaaaacctggaataccctagcgtgaccctgccacctcagcctcacaccaaggagggcgttgatgcctacaacgaagtgatcgcccgggtgcgaatgtgggtgaacctgaacctgtggcagaagctgaagctaagcagagatgatgccaagcctctgctgagactgaagggattcccttcctttcctctggtcgagagacaggccaacgaagtggactggtgggacatggtgtgtaacgtgaagaagctgatcaacgagaaaaaggaggatggcaaggtgttttggcagaatctggctggctacaagagacaggaagccctgagaccatacctgagcagcgaggaagatcggaagaagggaaagaaattcgctcggtaccagctgggcgacctgctgctgcacctggaaaagaagcacggcgaggactggggaaaggtgtacgacgaggcctgggagcggattgacaagaaagtggaaggcctgagcaagcacatcaagctggaagaggaacggagaagcgaggacgcccagagcaaggccgccctgaccgactggctgcgggctaaggccagcttcgtgatcgagggcctgaaggaggccgacaaggacgagttctgcagatgcgagctgaagctgcagaagtggtacggggacctgcggggaaagcccttcgccatcgaagccgagaacagcatcctggacatcagcggcttcagcaagcagtacaactgtgccttcatctggcagaaggacggcgtgaagaagctgaacctgtacctgatcatcaactacttcaagggcggcaagctgcggttcaagaagatcaaacctgaagccttcgaagccaacagattctacaccgtgatcaacaaaaagagcggcgagatcgtgcccatggaggtgaacttcaacttcgacgaccccaacctgatcatcctgcctctggcctttggcaagagacagggcagagaattcatctggaacgacctgctgtccctggaaaccggcagcctgaagctggccaacggaagagtgatcgagaagacactgtacaacagaagaacccggcaggatgagcctgccctgttcgtggccctgaccttcgagcggcgggaggtcctggactcctccaatatcaaaccaatgaacctgatcggcgtggcaagaggcgaaaacatccccgccgtgatcgccctgaccgaccccgagggctgcccactgagccggtttaaggatagcctgggaaacccaacccacatcctgagaatcggcgagagctataaggagaagcagcggaccatccaggccaagaaggaggtggagcagcggagagccggcggctacagccggaagtacgccagcaaagccaagaatctggcagacgatatggtgagaaacaccgctagagatctgctgtactacgccgtgacccaggatgccatgctgatcttcgccaacctgagccggggcttcggccggcagggcaagcggaccttcatggccgagagacagtacacacggatggaggactggctgaccgccaagctggcctacgagggcctgagcaagacctacctgtccaagacactggcccagtacacctccaagacatgcagcaactgtgggtttaccatcaccagcgccgactacgacagggtgctggagaagctgaagaagacagcaacaggctggatgaccacaattaacggcaaggagctgaaggtggagggccagattacctactacaacagatacaagagacagaacgtagtcaaggacctgtccgtcgagctggatagactgagcgaagaatctgtgaacaacgacatctcctcctggacaaagggcagaagcggagaagctctgagcctcctgaagaaaagattctcccatagacccgtgcaggagaagttcgtgtgcctgaactgcggcttcgagacacacgcagccgagcaagccgccctgaacatcgccagatcctggctgttcctgcggagccaggagtacaagaaataccagacaaacaagacaaccggcaacaccgataagagagccttcgtcgagacctggcagtccttttaccggaagaagcttaaggaggtgtggaaacctgccgtgcggtctggcggatctggcggaggctccacaagcatgaacaccgtgacctacgacgacgtgcacgtgaacttcacctgggaggagtggaccctgctggaccccagccagaagaacctgtacaaggacgtgatgctggagacctacaggaacctgaccgccgtgggctacagctgggaggaccacaacgtggaggagcactgccagagctacaggaggcacagcaggctggagaggagccacaccggcgagaagagcagcgtgcacacccagtgcgtgaccagccccaagaaaaagagaaaagtctaagctgccttctgcggggcttgccttctggccatgcccttcttctctcccttgcacctgtacctcttggtctttgaataaagcctgagtaggaaggctagcaaaaaaaaaaaaaaaaaaaaaaaaaaaaaaaaaaaaaaaaaaaaaaaaaaaaaaaaaaaaaaaaaaaaaaaaaaaaaaaa

SEQ ID NO: 6551 - RNA, 5797 nt, synthetic construct
  source 1..5797: mol_type = other RNA
aggaaataagagagaaaagaagagtaagaagaaatataagagccaccatggcccctaagaagaagcgtaaagtgagccggatggaacgcctcgtctacgaggtgcggcagaagtgcagaaacatcgaggacatctgcatctcctgcggatctctgaacgtgaccctggagcacccactgttcatcggcggcatgtgccagaactgtaaaaactgttttctggagtgtgcctatcaatacgacgatgacggctaccagagctactgcaccatctgttgcggcggaagagaggtgctgatgtgtggaaataacaactgctgccggtgcttctgcgtggaatgcgtggacctgctggtgggccccggcgccgcccaggccgctattaaggaagatccttggaactgctacatgtgcggccacaagggcacatacggcctgctgagacggagagaggactggcctagcagactgcagatgttcttcgccaataaccacgaccaggagttcgacccccctaaggtgtaccctcccgtccccgccgagaagagaaagcccatccgggtcctgagcctgttcgatggcatcgccaccggtctgctggtgctgaaggacctgggcatccaggtggataggtacattgcctccgaggtgtgcgaggactccatcaccgtgggaatggtgcgtcatcagggcaagatcatgtacgtgggcgacgtgcggagcgtgacacagaagcatatccaggagtggggccctttcgacctggtgatcggcggcagcccttgcaatgacctgagcatcgtgaacccagcccggaagggcctgtacgagggaaccggcagactgttcttcgagttttacagactgctgcacgacgcccggcctaaggaaggcgacgaccggcccttcttttggctgttcgagaatgtggtggccatgggagtcagcgacaagcgggatattagccggttcctggagagcaaccccgtgatgatcgatgccaaggaagtgagcgccgcccaccgggccagatacttctggggcaatctgcctggcatgaacagacccctggccagcaccgtgaacgacaagctggagctgcaggagtgcctggagcacggccggatcgccaagttcagcaaggtgagaaccatcaccacccgaagcaacagcatcaaacaaggcaaggaccagcactttcctgtgttcatgaacgagaaggaggacatcctgtggtgtaccgagatggagagagtgttcgggttcccagtccactacacagatgtcagcaacatgtctagactggccagacagagactgctgggaagaagctggtccgtccctgtgatcagacacctgttcgcccctctgaaggagtacttcgcctgcgtgagcagcggcaacagcaacgccaacagccggggccccagcttctctagcggcctggtgccactgtccctgagagggagccacatgggccccatggagatctacaaaaccgtgagcgcctggaagcggcagcctgtgcgcgtgctgagcctgtttcggaatatcgataaagtcctgaaaagcctgggattcctggagagcggctctggctccggcggtggcaccctgaagtacgtggaggatgtgacaaacgtggtcagacgggatgtggagaagtggggccccttcgatctggtgtacggcagcacccaacccctgggcagctcttgtgaccggtgccctggctggtacatgtttcagttccaccggatcctgcagtacgccctgccgagacaggagtcccagcggccattcttttggattttcatggacaacttgctgctgaccgaggatgaccaggaaactaccactcggttcctgcagaccgaagccgtgaccctgcaggacgtgagaggccgggactaccagaacgccatgcgggtgtggtccaacatccctggactgaaaagcaagcacgcacctctgacccctaaagaagaggagtacctgcaggcccaggtgcggagcagaagcaagctggacgcccctaaggtggatctgctggtgaagaattgcctcctgcccctgagagagtacttcaagtatttcagccagaatagtctgcccctgggcggcccaagcagcggcgcccctcctcccagcggcggcagcccagccggctccccaacctctaccgaggagggcacctctgagtccgccacccccgagagcggccctggcacctccaccgagcccagcgagggcagcgcacccggcagccctgccggcagccccacctccacagaggagggaaccagcaccgagcccagcgaaggcagcgccccaggcaccagcaccgagcctagtgagggcggctctggcggcggcagcgcccaggagattaaacggatcaacaagatcagaagaagacttgtgaaagacagcaacaccaagaaggccggcaagacaggccccatgaaaaccctgctggttagagtgatgacacccgatctgagagagcggctggaaaacctgagaaagaagcctgaaaatatcccccagcccatcagcaatacatctagagccaacctgaataagctgctgaccgattacaccgaaatgaagaaggcgatcctgcatgtgtactgggaagagttccagaaggaccctgtgggcctgatgagccgggtggcccagcctgccagcaagaagatcgatcagaacaagctgaaacctgagatggacgagaagggcaacctgaccaccgccggctttgcctgctctcagtgtggccagcccctgttcgtgtacaagctggagcaggtgtctgagaagggcaaggcttacaccaactacttcggacggtgcaatgtggccgagcacgaaaagctgatcctgctggcccagctgaagcccgagaaggatagcgacgaagccgtgacatatagcctgggaaagtttgggcagagggccctggatttctacagcattcatgtgaccaaggagtccacccaccccgtgaagcccctggcccagatcgccggaaacagatacgcctccggacctgtgggaaaggccctgagcgacgcatgtatgggcacaatcgcctccttcctgtctaagtaccaggacatcatcatcgaacaccagaaggtggtgaagggcaaccagaagagactggagagcctgcgggagctggccggcaaggaaaacctggaataccctagcgtgaccctgccacctcagcctcacaccaaggagggcgttgatgcctacaacgaagtgatcgcccgggtgcgaatgtgggtgaacctgaacctgtggcagaagctgaagctaagcagagatgatgccaagcctctgctgagactgaagggattcccttcctttcctctggtcgagagacaggccaacgaagtggactggtgggacatggtgtgtaacgtgaagaagctgatcaacgagaaaaaggaggatggcaaggtgttttggcagaatctggctggctacaagagacaggaagccctgagaccatacctgagcagcgaggaagatcggaagaagggaaagaaattcgctcggtaccagctgggcgacctgctgctgcacctggaaaagaagcacggcgaggactggggaaaggtgtacgacgaggcctgggagcggattgacaagaaagtggaaggcctgagcaagcacatcaagctggaagaggaacggagaagcgaggacgcccagagcaaggccgccctgaccgactggctgcgggctaaggccagcttcgtgatcgagggcctgaaggaggccgacaaggacgagttctgcagatgcgagctgaagctgcagaagtggtacggggacctgcggggaaagcccttcgccatcgaagccgagaacagcatcctggacatcagcggcttcagcaagcagtacaactgtgccttcatctggcagaaggacggcgtgaagaagctgaacctgtacctgatcatcaactacttcaagggcggcaagctgcggttcaagaagatcaaacctgaagccttcgaagccaacagattctacaccgtgatcaacaaaaagagcggcgagatcgtgcccatggaggtgaacttcaacttcgacgaccccaacctgatcatcctgcctctggcctttggcaagagacagggcagagaattcatctggaacgacctgctgtccctggaaaccggcagcctgaagctggccaacggaagagtgatcgagaagacactgtacaacagaagaacccggcaggatgagcctgccctgttcgtggccctgaccttcgagcggcgggaggtcctggactcctccaatatcaaaccaatgaacctgatcggcgtggcaagaggcgaaaacatccccgccgtgatcgccctgaccgaccccgagggctgcccactgagccggtttaaggatagcctgggaaacccaacccacatcctgagaatcggcgagagctataaggagaagcagcggaccatccaggccaagaaggaggtggagcagcggagagccggcggctacagccggaagtacgccagcaaagccaagaatctggcagacgatatggtgagaaacaccgctagagatctgctgtactacgccgtgacccaggatgccatgctgatcttcgccaacctgagccggggcttcggccggcagggcaagcggaccttcatggccgagagacagtacacacggatggaggactggctgaccgccaagctggcctacgagggcctgagcaagacctacctgtccaagacactggcccagtacacctccaagacatgcagcaactgtgggtttaccatcaccagcgccgactacgacagggtgctggagaagctgaagaagacagcaacaggctggatgaccacaattaacggcaaggagctgaaggtggagggccagattacctactacaacagatacaagagacagaacgtagtcaaggacctgtccgtcgagctggatagactgagcgaagaatctgtgaacaacgacatctcctcctggacaaagggcagaagcggagaagctctgagcctcctgaagaaaagattctcccatagacccgtgcaggagaagttcgtgtgcctgaactgcggcttcgagacacacgcagccgagcaagccgccctgaacatcgccagatcctggctgttcctgcggagccaggagtacaagaaataccagacaaacaagacaaccggcaacaccgataagagagccttcgtcgagacctggcagtccttttaccggaagaagcttaaggaggtgtggaaacctgccgtgcggtctggcggatctggcggaggctccacaagcgccagggcccccgtgagcttcgaggaggtggccgtgtacttcagccccgaggagtggcagaccctgcagggctggcagaaggagatgtacaggggcgtgatgagggagaactacgagatcatgctgagcctgggctaccagttcagcaagcccgagatcctgctgatgatggagaggggcgaggagccctgcgtggaggactgccagaggaggatccccgtgaccttcagggagaagcacctgaccagccccaagaaaaagagaaaagtctaagctgccttctgcggggcttgccttctggccatgcccttcttctctcccttgcacctgtacctcttggtctttgaataaagcctgagtaggaaggctagcaaaaaaaaaaaaaaaaaaaaaaaaaaaaaaaaaaaaaaaaaaaaaaaaaaaaaaaaaaaaaaaaaaaaaaaaaaaaaaaa

SEQ ID NO: 6552 - RNA, 5797 nt, synthetic construct
  source 1..5797: mol_type = other RNA
aggaaataagagagaaaagaagagtaagaagaaatataagagccaccatggcccctaagaagaagcgtaaagtgagccggatggaacgcctcgtctacgaggtgcggcagaagtgcagaaacatcgaggacatctgcatctcctgcggatctctgaacgtgaccctggagcacccactgttcatcggcggcatgtgccagaactgtaaaaactgttttctggagtgtgcctatcaatacgacgatgacggctaccagagctactgcaccatctgttgcggcggaagagaggtgctgatgtgtggaaataacaactgctgccggtgcttctgcgtggaatgcgtggacctgctggtgggccccggcgccgcccaggccgctattaaggaagatccttggaactgctacatgtgcggccacaagggcacatacggcctgctgagacggagagaggactggcctagcagactgcagatgttcttcgccaataaccacgaccaggagttcgacccccctaaggtgtaccctcccgtccccgccgagaagagaaagcccatccgggtcctgagcctgttcgatggcatcgccaccggtctgctggtgctgaaggacctgggcatccaggtggataggtacattgcctccgaggtgtgcgaggactccatcaccgtgggaatggtgcgtcatcagggcaagatcatgtacgtgggcgacgtgcggagcgtgacacagaagcatatccaggagtggggccctttcgacctggtgatcggcggcagcccttgcaatgacctgagcatcgtgaacccagcccggaagggcctgtacgagggaaccggcagactgttcttcgagttttacagactgctgcacgacgcccggcctaaggaaggcgacgaccggcccttcttttggctgttcgagaatgtggtggccatgggagtcagcgacaagcgggatattagccggttcctggagagcaaccccgtgatgatcgatgccaaggaagtgagcgccgcccaccgggccagatacttctggggcaatctgcctggcatgaacagacccctggccagcaccgtgaacgacaagctggagctgcaggagtgcctggagcacggccggatcgccaagttcagcaaggtgagaaccatcaccacccgaagcaacagcatcaaacaaggcaaggaccagcactttcctgtgttcatgaacgagaaggaggacatcctgtggtgtaccgagatggagagagtgttcgggttcccagtccactacacagatgtcagcaacatgtctagactggccagacagagactgctgggaagaagctggtccgtccctgtgatcagacacctgttcgcccctctgaaggagtacttcgcctgcgtgagcagcggcaacagcaacgccaacagccggggccccagcttctctagcggcctggtgccactgtccctgagagggagccacatgggccccatggagatctacaaaaccgtgagcgcctggaagcggcagcctgtgcgcgtgctgagcctgtttcggaatatcgataaagtcctgaaaagcctgggattcctggagagcggctctggctccggcggtggcaccctgaagtacgtggaggatgtgacaaacgtggtcagacgggatgtggagaagtggggccccttcgatctggtgtacggcagcacccaacccctgggcagctcttgtgaccggtgccctggctggtacatgtttcagttccaccggatcctgcagtacgccctgccgagacaggagtcccagcggccattcttttggattttcatggacaacttgctgctgaccgaggatgaccaggaaactaccactcggttcctgcagaccgaagccgtgaccctgcaggacgtgagaggccgggactaccagaacgccatgcgggtgtggtccaacatccctggactgaaaagcaagcacgcacctctgacccctaaagaagaggagtacctgcaggcccaggtgcggagcagaagcaagctggacgcccctaaggtggatctgctggtgaagaattgcctcctgcccctgagagagtacttcaagtatttcagccagaatagtctgcccctgggcggcccaagcagcggcgcccctcctcccagcggcggcagcccagccggctccccaacctctaccgaggagggcacctctgagtccgccacccccgagagcggccctggcacctccaccgagcccagcgagggcagcgcacccggcagccctgccggcagccccacctccacagaggagggaaccagcaccgagcccagcgaaggcagcgccccaggcaccagcaccgagcctagtgagggcggctctggcggcggcagcgcccaggagattaaacggatcaacaagatcagaagaagacttgtgaaagacagcaacaccaagaaggccggcaagacaggccccatgaaaaccctgctggttagagtgatgacacccgatctgagagagcggctggaaaacctgagaaagaagcctgaaaatatcccccagcccatcagcaatacatctagagccaacctgaataagctgctgaccgattacaccgaaatgaagaaggcgatcctgcatgtgtactgggaagagttccagaaggaccctgtgggcctgatgagccgggtggcccagcctgccagcaagaagatcgatcagaacaagctgaaacctgagatggacgagaagggcaacctgaccaccgccggctttgcctgctctcagtgtggccagcccctgttcgtgtacaagctggagcaggtgtctgagaagggcaaggcttacaccaactacttcggacggtgcaatgtggccgagcacgaaaagctgatcctgctggcccagctgaagcccgagaaggatagcgacgaagccgtgacatatagcctgggaaagtttgggcagagggccctggatttctacagcattcatgtgaccaaggagtccacccaccccgtgaagcccctggcccagatcgccggaaacagatacgcctccggacctgtgggaaaggccctgagcgacgcatgtatgggcacaatcgcctccttcctgtctaagtaccaggacatcatcatcgaacaccagaaggtggtgaagggcaaccagaagagactggagagcctgcgggagctggccggcaaggaaaacctggaataccctagcgtgaccctgccacctcagcctcacaccaaggagggcgttgatgcctacaacgaagtgatcgcccgggtgcgaatgtgggtgaacctgaacctgtggcagaagctgaagctaagcagagatgatgccaagcctctgctgagactgaagggattcccttcctttcctctggtcgagagacaggccaacgaagtggactggtgggacatggtgtgtaacgtgaagaagctgatcaacgagaaaaaggaggatggcaaggtgttttggcagaatctggctggctacaagagacaggaagccctgagaccatacctgagcagcgaggaagatcggaagaagggaaagaaattcgctcggtaccagctgggcgacctgctgctgcacctggaaaagaagcacggcgaggactggggaaaggtgtacgacgaggcctgggagcggattgacaagaaagtggaaggcctgagcaagcacatcaagctggaagaggaacggagaagcgaggacgcccagagcaaggccgccctgaccgactggctgcgggctaaggccagcttcgtgatcgagggcctgaaggaggccgacaaggacgagttctgcagatgcgagctgaagctgcagaagtggtacggggacctgcggggaaagcccttcgccatcgaagccgagaacagcatcctggacatcagcggcttcagcaagcagtacaactgtgccttcatctggcagaaggacggcgtgaagaagctgaacctgtacctgatcatcaactacttcaagggcggcaagctgcggttcaagaagatcaaacctgaagccttcgaagccaacagattctacaccgtgatcaacaaaaagagcggcgagatcgtgcccatggaggtgaacttcaacttcgacgaccccaacctgatcatcctgcctctggcctttggcaagagacagggcagagaattcatctggaacgacctgctgtccctggaaaccggcagcctgaagctggccaacggaagagtgatcgagaagacactgtacaacagaagaacccggcaggatgagcctgccctgttcgtggccctgaccttcgagcggcgggaggtcctggactcctccaatatcaaaccaatgaacctgatcggcgtggcaagaggcgaaaacatccccgccgtgatcgccctgaccgaccccgagggctgcccactgagccggtttaaggatagcctgggaaacccaacccacatcctgagaatcggcgagagctataaggagaagcagcggaccatccaggccaagaaggaggtggagcagcggagagccggcggctacagccggaagtacgccagcaaagccaagaatctggcagacgatatggtgagaaacaccgctagagatctgctgtactacgccgtgacccaggatgccatgctgatcttcgccaacctgagccggggcttcggccggcagggcaagcggaccttcatggccgagagacagtacacacggatggaggactggctgaccgccaagctggcctacgagggcctgagcaagacctacctgtccaagacactggcccagtacacctccaagacatgcagcaactgtgggtttaccatcaccagcgccgactacgacagggtgctggagaagctgaagaagacagcaacaggctggatgaccacaattaacggcaaggagctgaaggtggagggccagattacctactacaacagatacaagagacagaacgtagtcaaggacctgtccgtcgagctggatagactgagcgaagaatctgtgaacaacgacatctcctcctggacaaagggcagaagcggagaagctctgagcctcctgaagaaaagattctcccatagacccgtgcaggagaagttcgtgtgcctgaactgcggcttcgagacacacgcagccgagcaagccgccctgaacatcgccagatcctggctgttcctgcggagccaggagtacaagaaataccagacaaacaagacaaccggcaacaccgataagagagccttcgtcgagacctggcagtccttttaccggaagaagcttaaggaggtgtggaaacctgccgtgcggtctggcggatctggcggaggctccacaagcatggagaccctgaccttcagggacgtggccatcgagttcagcctggaggagtggcagtgcctggacatcgcccagcaggacctgtacaggaaggtgatgctggagaactacaggaacctggccttcctgggcatcgccctgaccaagcccgacctgatcacctgcctggagcagaggaaggtgccctggaacatgaagaggcacgagatggccgacgagccccccgtgctgtgcagcaacttcaccagccccaagaaaaagagaaaagtctaagctgccttctgcggggcttgccttctggccatgcccttcttctctcccttgcacctgtacctcttggtctttgaataaagcctgagtaggaaggctagcaaaaaaaaaaaaaaaaaaaaaaaaaaaaaaaaaaaaaaaaaaaaaaaaaaaaaaaaaaaaaaaaaaaaaaaaaaaaaaaa

SEQ ID NO: 6553 - RNA, 5797 nt, synthetic construct
  source 1..5797: mol_type = other RNA
aggaaataagagagaaaagaagagtaagaagaaatataagagccaccatggcccctaagaagaagcgtaaagtgagccggatggaacgcctcgtctacgaggtgcggcagaagtgcagaaacatcgaggacatctgcatctcctgcggatctctgaacgtgaccctggagcacccactgttcatcggcggcatgtgccagaactgtaaaaactgttttctggagtgtgcctatcaatacgacgatgacggctaccagagctactgcaccatctgttgcggcggaagagaggtgctgatgtgtggaaataacaactgctgccggtgcttctgcgtggaatgcgtggacctgctggtgggccccggcgccgcccaggccgctattaaggaagatccttggaactgctacatgtgcggccacaagggcacatacggcctgctgagacggagagaggactggcctagcagactgcagatgttcttcgccaataaccacgaccaggagttcgacccccctaaggtgtaccctcccgtccccgccgagaagagaaagcccatccgggtcctgagcctgttcgatggcatcgccaccggtctgctggtgctgaaggacctgggcatccaggtggataggtacattgcctccgaggtgtgcgaggactccatcaccgtgggaatggtgcgtcatcagggcaagatcatgtacgtgggcgacgtgcggagcgtgacacagaagcatatccaggagtggggccctttcgacctggtgatcggcggcagcccttgcaatgacctgagcatcgtgaacccagcccggaagggcctgtacgagggaaccggcagactgttcttcgagttttacagactgctgcacgacgcccggcctaaggaaggcgacgaccggcccttcttttggctgttcgagaatgtggtggccatgggagtcagcgacaagcgggatattagccggttcctggagagcaaccccgtgatgatcgatgccaaggaagtgagcgccgcccaccgggccagatacttctggggcaatctgcctggcatgaacagacccctggccagcaccgtgaacgacaagctggagctgcaggagtgcctggagcacggccggatcgccaagttcagcaaggtgagaaccatcaccacccgaagcaacagcatcaaacaaggcaaggaccagcactttcctgtgttcatgaacgagaaggaggacatcctgtggtgtaccgagatggagagagtgttcgggttcccagtccactacacagatgtcagcaacatgtctagactggccagacagagactgctgggaagaagctggtccgtccctgtgatcagacacctgttcgcccctctgaaggagtacttcgcctgcgtgagcagcggcaacagcaacgccaacagccggggccccagcttctctagcggcctggtgccactgtccctgagagggagccacatgggccccatggagatctacaaaaccgtgagcgcctggaagcggcagcctgtgcgcgtgctgagcctgtttcggaatatcgataaagtcctgaaaagcctgggattcctggagagcggctctggctccggcggtggcaccctgaagtacgtggaggatgtgacaaacgtggtcagacgggatgtggagaagtggggccccttcgatctggtgtacggcagcacccaacccctgggcagctcttgtgaccggtgccctggctggtacatgtttcagttccaccggatcctgcagtacgccctgccgagacaggagtcccagcggccattcttttggattttcatggacaacttgctgctgaccgaggatgaccaggaaactaccactcggttcctgcagaccgaagccgtgaccctgcaggacgtgagaggccgggactaccagaacgccatgcgggtgtggtccaacatccctggactgaaaagcaagcacgcacctctgacccctaaagaagaggagtacctgcaggcccaggtgcggagcagaagcaagctggacgcccctaaggtggatctgctggtgaagaattgcctcctgcccctgagagagtacttcaagtatttcagccagaatagtctgcccctgggcggcccaagcagcggcgcccctcctcccagcggcggcagcccagccggctccccaacctctaccgaggagggcacctctgagtccgccacccccgagagcggccctggcacctccaccgagcccagcgagggcagcgcacccggcagccctgccggcagccccacctccacagaggagggaaccagcaccgagcccagcgaaggcagcgccccaggcaccagcaccgagcctagtgagggcggctctggcggcggcagcgcccaggagattaaacggatcaacaagatcagaagaagacttgtgaaagacagcaacaccaagaaggccggcaagacaggccccatgaaaaccctgctggttagagtgatgacacccgatctgagagagcggctggaaaacctgagaaagaagcctgaaaatatcccccagcccatcagcaatacatctagagccaacctgaataagctgctgaccgattacaccgaaatgaagaaggcgatcctgcatgtgtactgggaagagttccagaaggaccctgtgggcctgatgagccgggtggcccagcctgccagcaagaagatcgatcagaacaagctgaaacctgagatggacgagaagggcaacctgaccaccgccggctttgcctgctctcagtgtggccagcccctgttcgtgtacaagctggagcaggtgtctgagaagggcaaggcttacaccaactacttcggacggtgcaatgtggccgagcacgaaaagctgatcctgctggcccagctgaagcccgagaaggatagcgacgaagccgtgacatatagcctgggaaagtttgggcagagggccctggatttctacagcattcatgtgaccaaggagtccacccaccccgtgaagcccctggcccagatcgccggaaacagatacgcctccggacctgtgggaaaggccctgagcgacgcatgtatgggcacaatcgcctccttcctgtctaagtaccaggacatcatcatcgaacaccagaaggtggtgaagggcaaccagaagagactggagagcctgcgggagctggccggcaaggaaaacctggaataccctagcgtgaccctgccacctcagcctcacaccaaggagggcgttgatgcctacaacgaagtgatcgcccgggtgcgaatgtgggtgaacctgaacctgtggcagaagctgaagctaagcagagatgatgccaagcctctgctgagactgaagggattcccttcctttcctctggtcgagagacaggccaacgaagtggactggtgggacatggtgtgtaacgtgaagaagctgatcaacgagaaaaaggaggatggcaaggtgttttggcagaatctggctggctacaagagacaggaagccctgagaccatacctgagcagcgaggaagatcggaagaagggaaagaaattcgctcggtaccagctgggcgacctgctgctgcacctggaaaagaagcacggcgaggactggggaaaggtgtacgacgaggcctgggagcggattgacaagaaagtggaaggcctgagcaagcacatcaagctggaagaggaacggagaagcgaggacgcccagagcaaggccgccctgaccgactggctgcgggctaaggccagcttcgtgatcgagggcctgaaggaggccgacaaggacgagttctgcagatgcgagctgaagctgcagaagtggtacggggacctgcggggaaagcccttcgccatcgaagccgagaacagcatcctggacatcagcggcttcagcaagcagtacaactgtgccttcatctggcagaaggacggcgtgaagaagctgaacctgtacctgatcatcaactacttcaagggcggcaagctgcggttcaagaagatcaaacctgaagccttcgaagccaacagattctacaccgtgatcaacaaaaagagcggcgagatcgtgcccatggaggtgaacttcaacttcgacgaccccaacctgatcatcctgcctctggcctttggcaagagacagggcagagaattcatctggaacgacctgctgtccctggaaaccggcagcctgaagctggccaacggaagagtgatcgagaagacactgtacaacagaagaacccggcaggatgagcctgccctgttcgtggccctgaccttcgagcggcgggaggtcctggactcctccaatatcaaaccaatgaacctgatcggcgtggcaagaggcgaaaacatccccgccgtgatcgccctgaccgaccccgagggctgcccactgagccggtttaaggatagcctgggaaacccaacccacatcctgagaatcggcgagagctataaggagaagcagcggaccatccaggccaagaaggaggtggagcagcggagagccggcggctacagccggaagtacgccagcaaagccaagaatctggcagacgatatggtgagaaacaccgctagagatctgctgtactacgccgtgacccaggatgccatgctgatcttcgccaacctgagccggggcttcggccggcagggcaagcggaccttcatggccgagagacagtacacacggatggaggactggctgaccgccaagctggcctacgagggcctgagcaagacctacctgtccaagacactggcccagtacacctccaagacatgcagcaactgtgggtttaccatcaccagcgccgactacgacagggtgctggagaagctgaagaagacagcaacaggctggatgaccacaattaacggcaaggagctgaaggtggagggccagattacctactacaacagatacaagagacagaacgtagtcaaggacctgtccgtcgagctggatagactgagcgaagaatctgtgaacaacgacatctcctcctggacaaagggcagaagcggagaagctctgagcctcctgaagaaaagattctcccatagacccgtgcaggagaagttcgtgtgcctgaactgcggcttcgagacacacgcagccgagcaagccgccctgaacatcgccagatcctggctgttcctgcggagccaggagtacaagaaataccagacaaacaagacaaccggcaacaccgataagagagccttcgtcgagacctggcagtccttttaccggaagaagcttaaggaggtgtggaaacctgccgtgcggtctggcggatctggcggaggctccacaagcgaggagctgcccgtggtgttcgaggacgtggccgtgtacttcaccagggaggagtggggcgtgctggacaagaggcagaaggagctgtacagggacgtgatgaggatgaactacgagctgctggccagcctgggccccgccgccgccaagcccgacctgatcagcaagctggagaggagggccgccccctggatcaaggaccccaacggccccaagtggggcaagggcagggtgcccgcctgcaccagccccaagaaaaagagaaaagtctaagctgccttctgcggggcttgccttctggccatgcccttcttctctcccttgcacctgtacctcttggtctttgaataaagcctgagtaggaaggctagcaaaaaaaaaaaaaaaaaaaaaaaaaaaaaaaaaaaaaaaaaaaaaaaaaaaaaaaaaaaaaaaaaaaaaaaaaaaaaaaa

SEQ ID NO: 6554 - RNA, 5797 nt, synthetic construct
  source 1..5797: mol_type = other RNA
aggaaataagagagaaaagaagagtaagaagaaatataagagccaccatggcccctaagaagaagcgtaaagtgagccggatggaacgcctcgtctacgaggtgcggcagaagtgcagaaacatcgaggacatctgcatctcctgcggatctctgaacgtgaccctggagcacccactgttcatcggcggcatgtgccagaactgtaaaaactgttttctggagtgtgcctatcaatacgacgatgacggctaccagagctactgcaccatctgttgcggcggaagagaggtgctgatgtgtggaaataacaactgctgccggtgcttctgcgtggaatgcgtggacctgctggtgggccccggcgccgcccaggccgctattaaggaagatccttggaactgctacatgtgcggccacaagggcacatacggcctgctgagacggagagaggactggcctagcagactgcagatgttcttcgccaataaccacgaccaggagttcgacccccctaaggtgtaccctcccgtccccgccgagaagagaaagcccatccgggtcctgagcctgttcgatggcatcgccaccggtctgctggtgctgaaggacctgggcatccaggtggataggtacattgcctccgaggtgtgcgaggactccatcaccgtgggaatggtgcgtcatcagggcaagatcatgtacgtgggcgacgtgcggagcgtgacacagaagcatatccaggagtggggccctttcgacctggtgatcggcggcagcccttgcaatgacctgagcatcgtgaacccagcccggaagggcctgtacgagggaaccggcagactgttcttcgagttttacagactgctgcacgacgcccggcctaaggaaggcgacgaccggcccttcttttggctgttcgagaatgtggtggccatgggagtcagcgacaagcgggatattagccggttcctggagagcaaccccgtgatgatcgatgccaaggaagtgagcgccgcccaccgggccagatacttctggggcaatctgcctggcatgaacagacccctggccagcaccgtgaacgacaagctggagctgcaggagtgcctggagcacggccggatcgccaagttcagcaaggtgagaaccatcaccacccgaagcaacagcatcaaacaaggcaaggaccagcactttcctgtgttcatgaacgagaaggaggacatcctgtggtgtaccgagatggagagagtgttcgggttcccagtccactacacagatgtcagcaacatgtctagactggccagacagagactgctgggaagaagctggtccgtccctgtgatcagacacctgttcgcccctctgaaggagtacttcgcctgcgtgagcagcggcaacagcaacgccaacagccggggccccagcttctctagcggcctggtgccactgtccctgagagggagccacatgggccccatggagatctacaaaaccgtgagcgcctggaagcggcagcctgtgcgcgtgctgagcctgtttcggaatatcgataaagtcctgaaaagcctgggattcctggagagcggctctggctccggcggtggcaccctgaagtacgtggaggatgtgacaaacgtggtcagacgggatgtggagaagtggggccccttcgatctggtgtacggcagcacccaacccctgggcagctcttgtgaccggtgccctggctggtacatgtttcagttccaccggatcctgcagtacgccctgccgagacaggagtcccagcggccattcttttggattttcatggacaacttgctgctgaccgaggatgaccaggaaactaccactcggttcctgcagaccgaagccgtgaccctgcaggacgtgagaggccgggactaccagaacgccatgcgggtgtggtccaacatccctggactgaaaagcaagcacgcacctctgacccctaaagaagaggagtacctgcaggcccaggtgcggagcagaagcaagctggacgcccctaaggtggatctgctggtgaagaattgcctcctgcccctgagagagtacttcaagtatttcagccagaatagtctgcccctgggcggcccaagcagcggcgcccctcctcccagcggcggcagcccagccggctccccaacctctaccgaggagggcacctctgagtccgccacccccgagagcggccctggcacctccaccgagcccagcgagggcagcgcacccggcagccctgccggcagccccacctccacagaggagggaaccagcaccgagcccagcgaaggcagcgccccaggcaccagcaccgagcctagtgagggcggctctggcggcggcagcgcccaggagattaaacggatcaacaagatcagaagaagacttgtgaaagacagcaacaccaagaaggccggcaagacaggccccatgaaaaccctgctggttagagtgatgacacccgatctgagagagcggctggaaaacctgagaaagaagcctgaaaatatcccccagcccatcagcaatacatctagagccaacctgaataagctgctgaccgattacaccgaaatgaagaaggcgatcctgcatgtgtactgggaagagttccagaaggaccctgtgggcctgatgagccgggtggcccagcctgccagcaagaagatcgatcagaacaagctgaaacctgagatggacgagaagggcaacctgaccaccgccggctttgcctgctctcagtgtggccagcccctgttcgtgtacaagctggagcaggtgtctgagaagggcaaggcttacaccaactacttcggacggtgcaatgtggccgagcacgaaaagctgatcctgctggcccagctgaagcccgagaaggatagcgacgaagccgtgacatatagcctgggaaagtttgggcagagggccctggatttctacagcattcatgtgaccaaggagtccacccaccccgtgaagcccctggcccagatcgccggaaacagatacgcctccggacctgtgggaaaggccctgagcgacgcatgtatgggcacaatcgcctccttcctgtctaagtaccaggacatcatcatcgaacaccagaaggtggtgaagggcaaccagaagagactggagagcctgcgggagctggccggcaaggaaaacctggaataccctagcgtgaccctgccacctcagcctcacaccaaggagggcgttgatgcctacaacgaagtgatcgcccgggtgcgaatgtgggtgaacctgaacctgtggcagaagctgaagctaagcagagatgatgccaagcctctgctgagactgaagggattcccttcctttcctctggtcgagagacaggccaacgaagtggactggtgggacatggtgtgtaacgtgaagaagctgatcaacgagaaaaaggaggatggcaaggtgttttggcagaatctggctggctacaagagacaggaagccctgagaccatacctgagcagcgaggaagatcggaagaagggaaagaaattcgctcggtaccagctgggcgacctgctgctgcacctggaaaagaagcacggcgaggactggggaaaggtgtacgacgaggcctgggagcggattgacaagaaagtggaaggcctgagcaagcacatcaagctggaagaggaacggagaagcgaggacgcccagagcaaggccgccctgaccgactggctgcgggctaaggccagcttcgtgatcgagggcctgaaggaggccgacaaggacgagttctgcagatgcgagctgaagctgcagaagtggtacggggacctgcggggaaagcccttcgccatcgaagccgagaacagcatcctggacatcagcggcttcagcaagcagtacaactgtgccttcatctggcagaaggacggcgtgaagaagctgaacctgtacctgatcatcaactacttcaagggcggcaagctgcggttcaagaagatcaaacctgaagccttcgaagccaacagattctacaccgtgatcaacaaaaagagcggcgagatcgtgcccatggaggtgaacttcaacttcgacgaccccaacctgatcatcctgcctctggcctttggcaagagacagggcagagaattcatctggaacgacctgctgtccctggaaaccggcagcctgaagctggccaacggaagagtgatcgagaagacactgtacaacagaagaacccggcaggatgagcctgccctgttcgtggccctgaccttcgagcggcgggaggtcctggactcctccaatatcaaaccaatgaacctgatcggcgtggcaagaggcgaaaacatccccgccgtgatcgccctgaccgaccccgagggctgcccactgagccggtttaaggatagcctgggaaacccaacccacatcctgagaatcggcgagagctataaggagaagcagcggaccatccaggccaagaaggaggtggagcagcggagagccggcggctacagccggaagtacgccagcaaagccaagaatctggcagacgatatggtgagaaacaccgctagagatctgctgtactacgccgtgacccaggatgccatgctgatcttcgccaacctgagccggggcttcggccggcagggcaagcggaccttcatggccgagagacagtacacacggatggaggactggctgaccgccaagctggcctacgagggcctgagcaagacctacctgtccaagacactggcccagtacacctccaagacatgcagcaactgtgggtttaccatcaccagcgccgactacgacagggtgctggagaagctgaagaagacagcaacaggctggatgaccacaattaacggcaaggagctgaaggtggagggccagattacctactacaacagatacaagagacagaacgtagtcaaggacctgtccgtcgagctggatagactgagcgaagaatctgtgaacaacgacatctcctcctggacaaagggcagaagcggagaagctctgagcctcctgaagaaaagattctcccatagacccgtgcaggagaagttcgtgtgcctgaactgcggcttcgagacacacgcagccgagcaagccgccctgaacatcgccagatcctggctgttcctgcggagccaggagtacaagaaataccagacaaacaagacaaccggcaacaccgataagagagccttcgtcgagacctggcagtccttttaccggaagaagcttaaggaggtgtggaaacctgccgtgcggtctggcggatctggcggaggctccacaagcagccaggacctggtgaccttcaaggacgtggccatcgacttcagccaggaggagtggcagtggatgaaccccgcccagaagaggctgtacaggagcatgatgctggagaactaccagagcctggtgagcctgggcctgtgcgtgagcaagccctacgtgatcagcctgctggagcagggcagggagccctgggagatgaccagcgagatgaccaggagccccttcagcgactgggagagcatcaccagccccaagaaaaagagaaaagtctaagctgccttctgcggggcttgccttctggccatgcccttcttctctcccttgcacctgtacctcttggtctttgaataaagcctgagtaggaaggctagcaaaaaaaaaaaaaaaaaaaaaaaaaaaaaaaaaaaaaaaaaaaaaaaaaaaaaaaaaaaaaaaaaaaaaaaaaaaaaaaa

SEQ ID NO: 6555 - RNA, 5797 nt, synthetic construct
  source 1..5797: mol_type = other RNA
aggaaataagagagaaaagaagagtaagaagaaatataagagccaccatggcccctaagaagaagcgtaaagtgagccggatggaacgcctcgtctacgaggtgcggcagaagtgcagaaacatcgaggacatctgcatctcctgcggatctctgaacgtgaccctggagcacccactgttcatcggcggcatgtgccagaactgtaaaaactgttttctggagtgtgcctatcaatacgacgatgacggctaccagagctactgcaccatctgttgcggcggaagagaggtgctgatgtgtggaaataacaactgctgccggtgcttctgcgtggaatgcgtggacctgctggtgggccccggcgccgcccaggccgctattaaggaagatccttggaactgctacatgtgcggccacaagggcacatacggcctgctgagacggagagaggactggcctagcagactgcagatgttcttcgccaataaccacgaccaggagttcgacccccctaaggtgtaccctcccgtccccgccgagaagagaaagcccatccgggtcctgagcctgttcgatggcatcgccaccggtctgctggtgctgaaggacctgggcatccaggtggataggtacattgcctccgaggtgtgcgaggactccatcaccgtgggaatggtgcgtcatcagggcaagatcatgtacgtgggcgacgtgcggagcgtgacacagaagcatatccaggagtggggccctttcgacctggtgatcggcggcagcccttgcaatgacctgagcatcgtgaacccagcccggaagggcctgtacgagggaaccggcagactgttcttcgagttttacagactgctgcacgacgcccggcctaaggaaggcgacgaccggcccttcttttggctgttcgagaatgtggtggccatgggagtcagcgacaagcgggatattagccggttcctggagagcaaccccgtgatgatcgatgccaaggaagtgagcgccgcccaccgggccagatacttctggggcaatctgcctggcatgaacagacccctggccagcaccgtgaacgacaagctggagctgcaggagtgcctggagcacggccggatcgccaagttcagcaaggtgagaaccatcaccacccgaagcaacagcatcaaacaaggcaaggaccagcactttcctgtgttcatgaacgagaaggaggacatcctgtggtgtaccgagatggagagagtgttcgggttcccagtccactacacagatgtcagcaacatgtctagactggccagacagagactgctgggaagaagctggtccgtccctgtgatcagacacctgttcgcccctctgaaggagtacttcgcctgcgtgagcagcggcaacagcaacgccaacagccggggccccagcttctctagcggcctggtgccactgtccctgagagggagccacatgggccccatggagatctacaaaaccgtgagcgcctggaagcggcagcctgtgcgcgtgctgagcctgtttcggaatatcgataaagtcctgaaaagcctgggattcctggagagcggctctggctccggcggtggcaccctgaagtacgtggaggatgtgacaaacgtggtcagacgggatgtggagaagtggggccccttcgatctggtgtacggcagcacccaacccctgggcagctcttgtgaccggtgccctggctggtacatgtttcagttccaccggatcctgcagtacgccctgccgagacaggagtcccagcggccattcttttggattttcatggacaacttgctgctgaccgaggatgaccaggaaactaccactcggttcctgcagaccgaagccgtgaccctgcaggacgtgagaggccgggactaccagaacgccatgcgggtgtggtccaacatccctggactgaaaagcaagcacgcacctctgacccctaaagaagaggagtacctgcaggcccaggtgcggagcagaagcaagctggacgcccctaaggtggatctgctggtgaagaattgcctcctgcccctgagagagtacttcaagtatttcagccagaatagtctgcccctgggcggcccaagcagcggcgcccctcctcccagcggcggcagcccagccggctccccaacctctaccgaggagggcacctctgagtccgccacccccgagagcggccctggcacctccaccgagcccagcgagggcagcgcacccggcagccctgccggcagccccacctccacagaggagggaaccagcaccgagcccagcgaaggcagcgccccaggcaccagcaccgagcctagtgagggcggctctggcggcggcagcgcccaggagattaaacggatcaacaagatcagaagaagacttgtgaaagacagcaacaccaagaaggccggcaagacaggccccatgaaaaccctgctggttagagtgatgacacccgatctgagagagcggctggaaaacctgagaaagaagcctgaaaatatcccccagcccatcagcaatacatctagagccaacctgaataagctgctgaccgattacaccgaaatgaagaaggcgatcctgcatgtgtactgggaagagttccagaaggaccctgtgggcctgatgagccgggtggcccagcctgccagcaagaagatcgatcagaacaagctgaaacctgagatggacgagaagggcaacctgaccaccgccggctttgcctgctctcagtgtggccagcccctgttcgtgtacaagctggagcaggtgtctgagaagggcaaggcttacaccaactacttcggacggtgcaatgtggccgagcacgaaaagctgatcctgctggcccagctgaagcccgagaaggatagcgacgaagccgtgacatatagcctgggaaagtttgggcagagggccctggatttctacagcattcatgtgaccaaggagtccacccaccccgtgaagcccctggcccagatcgccggaaacagatacgcctccggacctgtgggaaaggccctgagcgacgcatgtatgggcacaatcgcctccttcctgtctaagtaccaggacatcatcatcgaacaccagaaggtggtgaagggcaaccagaagagactggagagcctgcgggagctggccggcaaggaaaacctggaataccctagcgtgaccctgccacctcagcctcacaccaaggagggcgttgatgcctacaacgaagtgatcgcccgggtgcgaatgtgggtgaacctgaacctgtggcagaagctgaagctaagcagagatgatgccaagcctctgctgagactgaagggattcccttcctttcctctggtcgagagacaggccaacgaagtggactggtgggacatggtgtgtaacgtgaagaagctgatcaacgagaaaaaggaggatggcaaggtgttttggcagaatctggctggctacaagagacaggaagccctgagaccatacctgagcagcgaggaagatcggaagaagggaaagaaattcgctcggtaccagctgggcgacctgctgctgcacctggaaaagaagcacggcgaggactggggaaaggtgtacgacgaggcctgggagcggattgacaagaaagtggaaggcctgagcaagcacatcaagctggaagaggaacggagaagcgaggacgcccagagcaaggccgccctgaccgactggctgcgggctaaggccagcttcgtgatcgagggcctgaaggaggccgacaaggacgagttctgcagatgcgagctgaagctgcagaagtggtacggggacctgcggggaaagcccttcgccatcgaagccgagaacagcatcctggacatcagcggcttcagcaagcagtacaactgtgccttcatctggcagaaggacggcgtgaagaagctgaacctgtacctgatcatcaactacttcaagggcggcaagctgcggttcaagaagatcaaacctgaagccttcgaagccaacagattctacaccgtgatcaacaaaaagagcggcgagatcgtgcccatggaggtgaacttcaacttcgacgaccccaacctgatcatcctgcctctggcctttggcaagagacagggcagagaattcatctggaacgacctgctgtccctggaaaccggcagcctgaagctggccaacggaagagtgatcgagaagacactgtacaacagaagaacccggcaggatgagcctgccctgttcgtggccctgaccttcgagcggcgggaggtcctggactcctccaatatcaaaccaatgaacctgatcggcgtggcaagaggcgaaaacatccccgccgtgatcgccctgaccgaccccgagggctgcccactgagccggtttaaggatagcctgggaaacccaacccacatcctgagaatcggcgagagctataaggagaagcagcggaccatccaggccaagaaggaggtggagcagcggagagccggcggctacagccggaagtacgccagcaaagccaagaatctggcagacgatatggtgagaaacaccgctagagatctgctgtactacgccgtgacccaggatgccatgctgatcttcgccaacctgagccggggcttcggccggcagggcaagcggaccttcatggccgagagacagtacacacggatggaggactggctgaccgccaagctggcctacgagggcctgagcaagacctacctgtccaagacactggcccagtacacctccaagacatgcagcaactgtgggtttaccatcaccagcgccgactacgacagggtgctggagaagctgaagaagacagcaacaggctggatgaccacaattaacggcaaggagctgaaggtggagggccagattacctactacaacagatacaagagacagaacgtagtcaaggacctgtccgtcgagctggatagactgagcgaagaatctgtgaacaacgacatctcctcctggacaaagggcagaagcggagaagctctgagcctcctgaagaaaagattctcccatagacccgtgcaggagaagttcgtgtgcctgaactgcggcttcgagacacacgcagccgagcaagccgccctgaacatcgccagatcctggctgttcctgcggagccaggagtacaagaaataccagacaaacaagacaaccggcaacaccgataagagagccttcgtcgagacctggcagtccttttaccggaagaagcttaaggaggtgtggaaacctgccgtgcggtctggcggatctggcggaggctccacaagcagcgaggagaccgtgaccttcaaggacgtggccgtggacttcacctgggaggagtggaagcagctgacccccgtgcagagggacctgtacagggacgtgatgctggagaactaccagaacctggtgagcctgggcctgcccgtgttccagagcgacctgatcagccagctggagaggggcgaggtgccctggatccccgagggcgagaccttcaggggcccctgccccggcagcatcaaccagaccagccccaagaaaaagagaaaagtctaagctgccttctgcggggcttgccttctggccatgcccttcttctctcccttgcacctgtacctcttggtctttgaataaagcctgagtaggaaggctagcaaaaaaaaaaaaaaaaaaaaaaaaaaaaaaaaaaaaaaaaaaaaaaaaaaaaaaaaaaaaaaaaaaaaaaaaaaaaaaaa

SEQ ID NO: 6556 - RNA, 5797 nt, synthetic construct
  source 1..5797: mol_type = other RNA
aggaaataagagagaaaagaagagtaagaagaaatataagagccaccatggcccctaagaagaagcgtaaagtgagccggatggaacgcctcgtctacgaggtgcggcagaagtgcagaaacatcgaggacatctgcatctcctgcggatctctgaacgtgaccctggagcacccactgttcatcggcggcatgtgccagaactgtaaaaactgttttctggagtgtgcctatcaatacgacgatgacggctaccagagctactgcaccatctgttgcggcggaagagaggtgctgatgtgtggaaataacaactgctgccggtgcttctgcgtggaatgcgtggacctgctggtgggccccggcgccgcccaggccgctattaaggaagatccttggaactgctacatgtgcggccacaagggcacatacggcctgctgagacggagagaggactggcctagcagactgcagatgttcttcgccaataaccacgaccaggagttcgacccccctaaggtgtaccctcccgtccccgccgagaagagaaagcccatccgggtcctgagcctgttcgatggcatcgccaccggtctgctggtgctgaaggacctgggcatccaggtggataggtacattgcctccgaggtgtgcgaggactccatcaccgtgggaatggtgcgtcatcagggcaagatcatgtacgtgggcgacgtgcggagcgtgacacagaagcatatccaggagtggggccctttcgacctggtgatcggcggcagcccttgcaatgacctgagcatcgtgaacccagcccggaagggcctgtacgagggaaccggcagactgttcttcgagttttacagactgctgcacgacgcccggcctaaggaaggcgacgaccggcccttcttttggctgttcgagaatgtggtggccatgggagtcagcgacaagcgggatattagccggttcctggagagcaaccccgtgatgatcgatgccaaggaagtgagcgccgcccaccgggccagatacttctggggcaatctgcctggcatgaacagacccctggccagcaccgtgaacgacaagctggagctgcaggagtgcctggagcacggccggatcgccaagttcagcaaggtgagaaccatcaccacccgaagcaacagcatcaaacaaggcaaggaccagcactttcctgtgttcatgaacgagaaggaggacatcctgtggtgtaccgagatggagagagtgttcgggttcccagtccactacacagatgtcagcaacatgtctagactggccagacagagactgctgggaagaagctggtccgtccctgtgatcagacacctgttcgcccctctgaaggagtacttcgcctgcgtgagcagcggcaacagcaacgccaacagccggggccccagcttctctagcggcctggtgccactgtccctgagagggagccacatgggccccatggagatctacaaaaccgtgagcgcctggaagcggcagcctgtgcgcgtgctgagcctgtttcggaatatcgataaagtcctgaaaagcctgggattcctggagagcggctctggctccggcggtggcaccctgaagtacgtggaggatgtgacaaacgtggtcagacgggatgtggagaagtggggccccttcgatctggtgtacggcagcacccaacccctgggcagctcttgtgaccggtgccctggctggtacatgtttcagttccaccggatcctgcagtacgccctgccgagacaggagtcccagcggccattcttttggattttcatggacaacttgctgctgaccgaggatgaccaggaaactaccactcggttcctgcagaccgaagccgtgaccctgcaggacgtgagaggccgggactaccagaacgccatgcgggtgtggtccaacatccctggactgaaaagcaagcacgcacctctgacccctaaagaagaggagtacctgcaggcccaggtgcggagcagaagcaagctggacgcccctaaggtggatctgctggtgaagaattgcctcctgcccctgagagagtacttcaagtatttcagccagaatagtctgcccctgggcggcccaagcagcggcgcccctcctcccagcggcggcagcccagccggctccccaacctctaccgaggagggcacctctgagtccgccacccccgagagcggccctggcacctccaccgagcccagcgagggcagcgcacccggcagccctgccggcagccccacctccacagaggagggaaccagcaccgagcccagcgaaggcagcgccccaggcaccagcaccgagcctagtgagggcggctctggcggcggcagcgcccaggagattaaacggatcaacaagatcagaagaagacttgtgaaagacagcaacaccaagaaggccggcaagacaggccccatgaaaaccctgctggttagagtgatgacacccgatctgagagagcggctggaaaacctgagaaagaagcctgaaaatatcccccagcccatcagcaatacatctagagccaacctgaataagctgctgaccgattacaccgaaatgaagaaggcgatcctgcatgtgtactgggaagagttccagaaggaccctgtgggcctgatgagccgggtggcccagcctgccagcaagaagatcgatcagaacaagctgaaacctgagatggacgagaagggcaacctgaccaccgccggctttgcctgctctcagtgtggccagcccctgttcgtgtacaagctggagcaggtgtctgagaagggcaaggcttacaccaactacttcggacggtgcaatgtggccgagcacgaaaagctgatcctgctggcccagctgaagcccgagaaggatagcgacgaagccgtgacatatagcctgggaaagtttgggcagagggccctggatttctacagcattcatgtgaccaaggagtccacccaccccgtgaagcccctggcccagatcgccggaaacagatacgcctccggacctgtgggaaaggccctgagcgacgcatgtatgggcacaatcgcctccttcctgtctaagtaccaggacatcatcatcgaacaccagaaggtggtgaagggcaaccagaagagactggagagcctgcgggagctggccggcaaggaaaacctggaataccctagcgtgaccctgccacctcagcctcacaccaaggagggcgttgatgcctacaacgaagtgatcgcccgggtgcgaatgtgggtgaacctgaacctgtggcagaagctgaagctaagcagagatgatgccaagcctctgctgagactgaagggattcccttcctttcctctggtcgagagacaggccaacgaagtggactggtgggacatggtgtgtaacgtgaagaagctgatcaacgagaaaaaggaggatggcaaggtgttttggcagaatctggctggctacaagagacaggaagccctgagaccatacctgagcagcgaggaagatcggaagaagggaaagaaattcgctcggtaccagctgggcgacctgctgctgcacctggaaaagaagcacggcgaggactggggaaaggtgtacgacgaggcctgggagcggattgacaagaaagtggaaggcctgagcaagcacatcaagctggaagaggaacggagaagcgaggacgcccagagcaaggccgccctgaccgactggctgcgggctaaggccagcttcgtgatcgagggcctgaaggaggccgacaaggacgagttctgcagatgcgagctgaagctgcagaagtggtacggggacctgcggggaaagcccttcgccatcgaagccgagaacagcatcctggacatcagcggcttcagcaagcagtacaactgtgccttcatctggcagaaggacggcgtgaagaagctgaacctgtacctgatcatcaactacttcaagggcggcaagctgcggttcaagaagatcaaacctgaagccttcgaagccaacagattctacaccgtgatcaacaaaaagagcggcgagatcgtgcccatggaggtgaacttcaacttcgacgaccccaacctgatcatcctgcctctggcctttggcaagagacagggcagagaattcatctggaacgacctgctgtccctggaaaccggcagcctgaagctggccaacggaagagtgatcgagaagacactgtacaacagaagaacccggcaggatgagcctgccctgttcgtggccctgaccttcgagcggcgggaggtcctggactcctccaatatcaaaccaatgaacctgatcggcgtggcaagaggcgaaaacatccccgccgtgatcgccctgaccgaccccgagggctgcccactgagccggtttaaggatagcctgggaaacccaacccacatcctgagaatcggcgagagctataaggagaagcagcggaccatccaggccaagaaggaggtggagcagcggagagccggcggctacagccggaagtacgccagcaaagccaagaatctggcagacgatatggtgagaaacaccgctagagatctgctgtactacgccgtgacccaggatgccatgctgatcttcgccaacctgagccggggcttcggccggcagggcaagcggaccttcatggccgagagacagtacacacggatggaggactggctgaccgccaagctggcctacgagggcctgagcaagacctacctgtccaagacactggcccagtacacctccaagacatgcagcaactgtgggtttaccatcaccagcgccgactacgacagggtgctggagaagctgaagaagacagcaacaggctggatgaccacaattaacggcaaggagctgaaggtggagggccagattacctactacaacagatacaagagacagaacgtagtcaaggacctgtccgtcgagctggatagactgagcgaagaatctgtgaacaacgacatctcctcctggacaaagggcagaagcggagaagctctgagcctcctgaagaaaagattctcccatagacccgtgcaggagaagttcgtgtgcctgaactgcggcttcgagacacacgcagccgagcaagccgccctgaacatcgccagatcctggctgttcctgcggagccaggagtacaagaaataccagacaaacaagacaaccggcaacaccgataagagagccttcgtcgagacctggcagtccttttaccggaagaagcttaaggaggtgtggaaacctgccgtgcggtctggcggatctggcggaggctccacaagcttccaggaggccgtgaccttcaaggacgtggccgtggccttcaccgaggaggagctgggcctgctggacagcgcccagaggaagctgtacagggaggtgatgctggagaacttcaggaacctggtgagcgtgggccaccagagcttcaagcccgagatgatcagccagctggagagggaggagaagctgtgggtgaaggagatccagacccagatgggcaggtgcaggggcggcaggaaccagaccagccccaagaaaaagagaaaagtctaagctgccttctgcggggcttgccttctggccatgcccttcttctctcccttgcacctgtacctcttggtctttgaataaagcctgagtaggaaggctagcaaaaaaaaaaaaaaaaaaaaaaaaaaaaaaaaaaaaaaaaaaaaaaaaaaaaaaaaaaaaaaaaaaaaaaaaaaaaaaaa

SEQ ID NO: 6557 - RNA, 5797 nt, synthetic construct
  source 1..5797: mol_type = other RNA
aggaaataagagagaaaagaagagtaagaagaaatataagagccaccatggcccctaagaagaagcgtaaagtgagccggatggaacgcctcgtctacgaggtgcggcagaagtgcagaaacatcgaggacatctgcatctcctgcggatctctgaacgtgaccctggagcacccactgttcatcggcggcatgtgccagaactgtaaaaactgttttctggagtgtgcctatcaatacgacgatgacggctaccagagctactgcaccatctgttgcggcggaagagaggtgctgatgtgtggaaataacaactgctgccggtgcttctgcgtggaatgcgtggacctgctggtgggccccggcgccgcccaggccgctattaaggaagatccttggaactgctacatgtgcggccacaagggcacatacggcctgctgagacggagagaggactggcctagcagactgcagatgttcttcgccaataaccacgaccaggagttcgacccccctaaggtgtaccctcccgtccccgccgagaagagaaagcccatccgggtcctgagcctgttcgatggcatcgccaccggtctgctggtgctgaaggacctgggcatccaggtggataggtacattgcctccgaggtgtgcgaggactccatcaccgtgggaatggtgcgtcatcagggcaagatcatgtacgtgggcgacgtgcggagcgtgacacagaagcatatccaggagtggggccctttcgacctggtgatcggcggcagcccttgcaatgacctgagcatcgtgaacccagcccggaagggcctgtacgagggaaccggcagactgttcttcgagttttacagactgctgcacgacgcccggcctaaggaaggcgacgaccggcccttcttttggctgttcgagaatgtggtggccatgggagtcagcgacaagcgggatattagccggttcctggagagcaaccccgtgatgatcgatgccaaggaagtgagcgccgcccaccgggccagatacttctggggcaatctgcctggcatgaacagacccctggccagcaccgtgaacgacaagctggagctgcaggagtgcctggagcacggccggatcgccaagttcagcaaggtgagaaccatcaccacccgaagcaacagcatcaaacaaggcaaggaccagcactttcctgtgttcatgaacgagaaggaggacatcctgtggtgtaccgagatggagagagtgttcgggttcccagtccactacacagatgtcagcaacatgtctagactggccagacagagactgctgggaagaagctggtccgtccctgtgatcagacacctgttcgcccctctgaaggagtacttcgcctgcgtgagcagcggcaacagcaacgccaacagccggggccccagcttctctagcggcctggtgccactgtccctgagagggagccacatgggccccatggagatctacaaaaccgtgagcgcctggaagcggcagcctgtgcgcgtgctgagcctgtttcggaatatcgataaagtcctgaaaagcctgggattcctggagagcggctctggctccggcggtggcaccctgaagtacgtggaggatgtgacaaacgtggtcagacgggatgtggagaagtggggccccttcgatctggtgtacggcagcacccaacccctgggcagctcttgtgaccggtgccctggctggtacatgtttcagttccaccggatcctgcagtacgccctgccgagacaggagtcccagcggccattcttttggattttcatggacaacttgctgctgaccgaggatgaccaggaaactaccactcggttcctgcagaccgaagccgtgaccctgcaggacgtgagaggccgggactaccagaacgccatgcgggtgtggtccaacatccctggactgaaaagcaagcacgcacctctgacccctaaagaagaggagtacctgcaggcccaggtgcggagcagaagcaagctggacgcccctaaggtggatctgctggtgaagaattgcctcctgcccctgagagagtacttcaagtatttcagccagaatagtctgcccctgggcggcccaagcagcggcgcccctcctcccagcggcggcagcccagccggctccccaacctctaccgaggagggcacctctgagtccgccacccccgagagcggccctggcacctccaccgagcccagcgagggcagcgcacccggcagccctgccggcagccccacctccacagaggagggaaccagcaccgagcccagcgaaggcagcgccccaggcaccagcaccgagcctagtgagggcggctctggcggcggcagcgcccaggagattaaacggatcaacaagatcagaagaagacttgtgaaagacagcaacaccaagaaggccggcaagacaggccccatgaaaaccctgctggttagagtgatgacacccgatctgagagagcggctggaaaacctgagaaagaagcctgaaaatatcccccagcccatcagcaatacatctagagccaacctgaataagctgctgaccgattacaccgaaatgaagaaggcgatcctgcatgtgtactgggaagagttccagaaggaccctgtgggcctgatgagccgggtggcccagcctgccagcaagaagatcgatcagaacaagctgaaacctgagatggacgagaagggcaacctgaccaccgccggctttgcctgctctcagtgtggccagcccctgttcgtgtacaagctggagcaggtgtctgagaagggcaaggcttacaccaactacttcggacggtgcaatgtggccgagcacgaaaagctgatcctgctggcccagctgaagcccgagaaggatagcgacgaagccgtgacatatagcctgggaaagtttgggcagagggccctggatttctacagcattcatgtgaccaaggagtccacccaccccgtgaagcccctggcccagatcgccggaaacagatacgcctccggacctgtgggaaaggccctgagcgacgcatgtatgggcacaatcgcctccttcctgtctaagtaccaggacatcatcatcgaacaccagaaggtggtgaagggcaaccagaagagactggagagcctgcgggagctggccggcaaggaaaacctggaataccctagcgtgaccctgccacctcagcctcacaccaaggagggcgttgatgcctacaacgaagtgatcgcccgggtgcgaatgtgggtgaacctgaacctgtggcagaagctgaagctaagcagagatgatgccaagcctctgctgagactgaagggattcccttcctttcctctggtcgagagacaggccaacgaagtggactggtgggacatggtgtgtaacgtgaagaagctgatcaacgagaaaaaggaggatggcaaggtgttttggcagaatctggctggctacaagagacaggaagccctgagaccatacctgagcagcgaggaagatcggaagaagggaaagaaattcgctcggtaccagctgggcgacctgctgctgcacctggaaaagaagcacggcgaggactggggaaaggtgtacgacgaggcctgggagcggattgacaagaaagtggaaggcctgagcaagcacatcaagctggaagaggaacggagaagcgaggacgcccagagcaaggccgccctgaccgactggctgcgggctaaggccagcttcgtgatcgagggcctgaaggaggccgacaaggacgagttctgcagatgcgagctgaagctgcagaagtggtacggggacctgcggggaaagcccttcgccatcgaagccgagaacagcatcctggacatcagcggcttcagcaagcagtacaactgtgccttcatctggcagaaggacggcgtgaagaagctgaacctgtacctgatcatcaactacttcaagggcggcaagctgcggttcaagaagatcaaacctgaagccttcgaagccaacagattctacaccgtgatcaacaaaaagagcggcgagatcgtgcccatggaggtgaacttcaacttcgacgaccccaacctgatcatcctgcctctggcctttggcaagagacagggcagagaattcatctggaacgacctgctgtccctggaaaccggcagcctgaagctggccaacggaagagtgatcgagaagacactgtacaacagaagaacccggcaggatgagcctgccctgttcgtggccctgaccttcgagcggcgggaggtcctggactcctccaatatcaaaccaatgaacctgatcggcgtggcaagaggcgaaaacatccccgccgtgatcgccctgaccgaccccgagggctgcccactgagccggtttaaggatagcctgggaaacccaacccacatcctgagaatcggcgagagctataaggagaagcagcggaccatccaggccaagaaggaggtggagcagcggagagccggcggctacagccggaagtacgccagcaaagccaagaatctggcagacgatatggtgagaaacaccgctagagatctgctgtactacgccgtgacccaggatgccatgctgatcttcgccaacctgagccggggcttcggccggcagggcaagcggaccttcatggccgagagacagtacacacggatggaggactggctgaccgccaagctggcctacgagggcctgagcaagacctacctgtccaagacactggcccagtacacctccaagacatgcagcaactgtgggtttaccatcaccagcgccgactacgacagggtgctggagaagctgaagaagacagcaacaggctggatgaccacaattaacggcaaggagctgaaggtggagggccagattacctactacaacagatacaagagacagaacgtagtcaaggacctgtccgtcgagctggatagactgagcgaagaatctgtgaacaacgacatctcctcctggacaaagggcagaagcggagaagctctgagcctcctgaagaaaagattctcccatagacccgtgcaggagaagttcgtgtgcctgaactgcggcttcgagacacacgcagccgagcaagccgccctgaacatcgccagatcctggctgttcctgcggagccaggagtacaagaaataccagacaaacaagacaaccggcaacaccgataagagagccttcgtcgagacctggcagtccttttaccggaagaagcttaaggaggtgtggaaacctgccgtgcggtctggcggatctggcggaggctccacaagccaggccagcgtgaccttcgaggacgtggccgtgaggttcacccaggaggagtgggccctgctggaccccagccagaagatcctgtacggcgacgtgatgcaggagacctacaggaacctgaccagcgtgggcatcaactgggagtgctgggacctggaggcctacttcaggagcctggagaggaacctgagggtgcagctggtgaagagggactgcgagctgaagaacaacgacccctgcggcaccagccccaagaaaaagagaaaagtctaagctgccttctgcggggcttgccttctggccatgcccttcttctctcccttgcacctgtacctcttggtctttgaataaagcctgagtaggaaggctagcaaaaaaaaaaaaaaaaaaaaaaaaaaaaaaaaaaaaaaaaaaaaaaaaaaaaaaaaaaaaaaaaaaaaaaaaaaaaaaaa

SEQ ID NO: 6558 - RNA, 5797 nt, synthetic construct
  source 1..5797: mol_type = other RNA
aggaaataagagagaaaagaagagtaagaagaaatataagagccaccatggcccctaagaagaagcgtaaagtgagccggatggaacgcctcgtctacgaggtgcggcagaagtgcagaaacatcgaggacatctgcatctcctgcggatctctgaacgtgaccctggagcacccactgttcatcggcggcatgtgccagaactgtaaaaactgttttctggagtgtgcctatcaatacgacgatgacggctaccagagctactgcaccatctgttgcggcggaagagaggtgctgatgtgtggaaataacaactgctgccggtgcttctgcgtggaatgcgtggacctgctggtgggccccggcgccgcccaggccgctattaaggaagatccttggaactgctacatgtgcggccacaagggcacatacggcctgctgagacggagagaggactggcctagcagactgcagatgttcttcgccaataaccacgaccaggagttcgacccccctaaggtgtaccctcccgtccccgccgagaagagaaagcccatccgggtcctgagcctgttcgatggcatcgccaccggtctgctggtgctgaaggacctgggcatccaggtggataggtacattgcctccgaggtgtgcgaggactccatcaccgtgggaatggtgcgtcatcagggcaagatcatgtacgtgggcgacgtgcggagcgtgacacagaagcatatccaggagtggggccctttcgacctggtgatcggcggcagcccttgcaatgacctgagcatcgtgaacccagcccggaagggcctgtacgagggaaccggcagactgttcttcgagttttacagactgctgcacgacgcccggcctaaggaaggcgacgaccggcccttcttttggctgttcgagaatgtggtggccatgggagtcagcgacaagcgggatattagccggttcctggagagcaaccccgtgatgatcgatgccaaggaagtgagcgccgcccaccgggccagatacttctggggcaatctgcctggcatgaacagacccctggccagcaccgtgaacgacaagctggagctgcaggagtgcctggagcacggccggatcgccaagttcagcaaggtgagaaccatcaccacccgaagcaacagcatcaaacaaggcaaggaccagcactttcctgtgttcatgaacgagaaggaggacatcctgtggtgtaccgagatggagagagtgttcgggttcccagtccactacacagatgtcagcaacatgtctagactggccagacagagactgctgggaagaagctggtccgtccctgtgatcagacacctgttcgcccctctgaaggagtacttcgcctgcgtgagcagcggcaacagcaacgccaacagccggggccccagcttctctagcggcctggtgccactgtccctgagagggagccacatgggccccatggagatctacaaaaccgtgagcgcctggaagcggcagcctgtgcgcgtgctgagcctgtttcggaatatcgataaagtcctgaaaagcctgggattcctggagagcggctctggctccggcggtggcaccctgaagtacgtggaggatgtgacaaacgtggtcagacgggatgtggagaagtggggccccttcgatctggtgtacggcagcacccaacccctgggcagctcttgtgaccggtgccctggctggtacatgtttcagttccaccggatcctgcagtacgccctgccgagacaggagtcccagcggccattcttttggattttcatggacaacttgctgctgaccgaggatgaccaggaaactaccactcggttcctgcagaccgaagccgtgaccctgcaggacgtgagaggccgggactaccagaacgccatgcgggtgtggtccaacatccctggactgaaaagcaagcacgcacctctgacccctaaagaagaggagtacctgcaggcccaggtgcggagcagaagcaagctggacgcccctaaggtggatctgctggtgaagaattgcctcctgcccctgagagagtacttcaagtatttcagccagaatagtctgcccctgggcggcccaagcagcggcgcccctcctcccagcggcggcagcccagccggctccccaacctctaccgaggagggcacctctgagtccgccacccccgagagcggccctggcacctccaccgagcccagcgagggcagcgcacccggcagccctgccggcagccccacctccacagaggagggaaccagcaccgagcccagcgaaggcagcgccccaggcaccagcaccgagcctagtgagggcggctctggcggcggcagcgcccaggagattaaacggatcaacaagatcagaagaagacttgtgaaagacagcaacaccaagaaggccggcaagacaggccccatgaaaaccctgctggttagagtgatgacacccgatctgagagagcggctggaaaacctgagaaagaagcctgaaaatatcccccagcccatcagcaatacatctagagccaacctgaataagctgctgaccgattacaccgaaatgaagaaggcgatcctgcatgtgtactgggaagagttccagaaggaccctgtgggcctgatgagccgggtggcccagcctgccagcaagaagatcgatcagaacaagctgaaacctgagatggacgagaagggcaacctgaccaccgccggctttgcctgctctcagtgtggccagcccctgttcgtgtacaagctggagcaggtgtctgagaagggcaaggcttacaccaactacttcggacggtgcaatgtggccgagcacgaaaagctgatcctgctggcccagctgaagcccgagaaggatagcgacgaagccgtgacatatagcctgggaaagtttgggcagagggccctggatttctacagcattcatgtgaccaaggagtccacccaccccgtgaagcccctggcccagatcgccggaaacagatacgcctccggacctgtgggaaaggccctgagcgacgcatgtatgggcacaatcgcctccttcctgtctaagtaccaggacatcatcatcgaacaccagaaggtggtgaagggcaaccagaagagactggagagcctgcgggagctggccggcaaggaaaacctggaataccctagcgtgaccctgccacctcagcctcacaccaaggagggcgttgatgcctacaacgaagtgatcgcccgggtgcgaatgtgggtgaacctgaacctgtggcagaagctgaagctaagcagagatgatgccaagcctctgctgagactgaagggattcccttcctttcctctggtcgagagacaggccaacgaagtggactggtgggacatggtgtgtaacgtgaagaagctgatcaacgagaaaaaggaggatggcaaggtgttttggcagaatctggctggctacaagagacaggaagccctgagaccatacctgagcagcgaggaagatcggaagaagggaaagaaattcgctcggtaccagctgggcgacctgctgctgcacctggaaaagaagcacggcgaggactggggaaaggtgtacgacgaggcctgggagcggattgacaagaaagtggaaggcctgagcaagcacatcaagctggaagaggaacggagaagcgaggacgcccagagcaaggccgccctgaccgactggctgcgggctaaggccagcttcgtgatcgagggcctgaaggaggccgacaaggacgagttctgcagatgcgagctgaagctgcagaagtggtacggggacctgcggggaaagcccttcgccatcgaagccgagaacagcatcctggacatcagcggcttcagcaagcagtacaactgtgccttcatctggcagaaggacggcgtgaagaagctgaacctgtacctgatcatcaactacttcaagggcggcaagctgcggttcaagaagatcaaacctgaagccttcgaagccaacagattctacaccgtgatcaacaaaaagagcggcgagatcgtgcccatggaggtgaacttcaacttcgacgaccccaacctgatcatcctgcctctggcctttggcaagagacagggcagagaattcatctggaacgacctgctgtccctggaaaccggcagcctgaagctggccaacggaagagtgatcgagaagacactgtacaacagaagaacccggcaggatgagcctgccctgttcgtggccctgaccttcgagcggcgggaggtcctggactcctccaatatcaaaccaatgaacctgatcggcgtggcaagaggcgaaaacatccccgccgtgatcgccctgaccgaccccgagggctgcccactgagccggtttaaggatagcctgggaaacccaacccacatcctgagaatcggcgagagctataaggagaagcagcggaccatccaggccaagaaggaggtggagcagcggagagccggcggctacagccggaagtacgccagcaaagccaagaatctggcagacgatatggtgagaaacaccgctagagatctgctgtactacgccgtgacccaggatgccatgctgatcttcgccaacctgagccggggcttcggccggcagggcaagcggaccttcatggccgagagacagtacacacggatggaggactggctgaccgccaagctggcctacgagggcctgagcaagacctacctgtccaagacactggcccagtacacctccaagacatgcagcaactgtgggtttaccatcaccagcgccgactacgacagggtgctggagaagctgaagaagacagcaacaggctggatgaccacaattaacggcaaggagctgaaggtggagggccagattacctactacaacagatacaagagacagaacgtagtcaaggacctgtccgtcgagctggatagactgagcgaagaatctgtgaacaacgacatctcctcctggacaaagggcagaagcggagaagctctgagcctcctgaagaaaagattctcccatagacccgtgcaggagaagttcgtgtgcctgaactgcggcttcgagacacacgcagccgagcaagccgccctgaacatcgccagatcctggctgttcctgcggagccaggagtacaagaaataccagacaaacaagacaaccggcaacaccgataagagagccttcgtcgagacctggcagtccttttaccggaagaagcttaaggaggtgtggaaacctgccgtgcggtctggcggatctggcggaggctccacaagcatggacagcgtggccttcgaggacgtggccgtgaacttcacccaggaggagtgggccctgctgagccccagccagaagaacctgtacagggacgtgatgctggaggccttcaggaacctggccagcgtgggcatccagtggaaggaccaggacaccgagaacctgtaccagaacctgggcatcaagctgaggcacatgagggcccacgccggccacaccaggagcgagtgcggcggcgagtggaccagccccaagaaaaagagaaaagtctaagctgccttctgcggggcttgccttctggccatgcccttcttctctcccttgcacctgtacctcttggtctttgaataaagcctgagtaggaaggctagcaaaaaaaaaaaaaaaaaaaaaaaaaaaaaaaaaaaaaaaaaaaaaaaaaaaaaaaaaaaaaaaaaaaaaaaaaaaaaaaa

SEQ ID NO: 6559 - RNA, 5797 nt, synthetic construct
  source 1..5797: mol_type = other RNA
aggaaataagagagaaaagaagagtaagaagaaatataagagccaccatggcccctaagaagaagcgtaaagtgagccggatggaacgcctcgtctacgaggtgcggcagaagtgcagaaacatcgaggacatctgcatctcctgcggatctctgaacgtgaccctggagcacccactgttcatcggcggcatgtgccagaactgtaaaaactgttttctggagtgtgcctatcaatacgacgatgacggctaccagagctactgcaccatctgttgcggcggaagagaggtgctgatgtgtggaaataacaactgctgccggtgcttctgcgtggaatgcgtggacctgctggtgggccccggcgccgcccaggccgctattaaggaagatccttggaactgctacatgtgcggccacaagggcacatacggcctgctgagacggagagaggactggcctagcagactgcagatgttcttcgccaataaccacgaccaggagttcgacccccctaaggtgtaccctcccgtccccgccgagaagagaaagcccatccgggtcctgagcctgttcgatggcatcgccaccggtctgctggtgctgaaggacctgggcatccaggtggataggtacattgcctccgaggtgtgcgaggactccatcaccgtgggaatggtgcgtcatcagggcaagatcatgtacgtgggcgacgtgcggagcgtgacacagaagcatatccaggagtggggccctttcgacctggtgatcggcggcagcccttgcaatgacctgagcatcgtgaacccagcccggaagggcctgtacgagggaaccggcagactgttcttcgagttttacagactgctgcacgacgcccggcctaaggaaggcgacgaccggcccttcttttggctgttcgagaatgtggtggccatgggagtcagcgacaagcgggatattagccggttcctggagagcaaccccgtgatgatcgatgccaaggaagtgagcgccgcccaccgggccagatacttctggggcaatctgcctggcatgaacagacccctggccagcaccgtgaacgacaagctggagctgcaggagtgcctggagcacggccggatcgccaagttcagcaaggtgagaaccatcaccacccgaagcaacagcatcaaacaaggcaaggaccagcactttcctgtgttcatgaacgagaaggaggacatcctgtggtgtaccgagatggagagagtgttcgggttcccagtccactacacagatgtcagcaacatgtctagactggccagacagagactgctgggaagaagctggtccgtccctgtgatcagacacctgttcgcccctctgaaggagtacttcgcctgcgtgagcagcggcaacagcaacgccaacagccggggccccagcttctctagcggcctggtgccactgtccctgagagggagccacatgggccccatggagatctacaaaaccgtgagcgcctggaagcggcagcctgtgcgcgtgctgagcctgtttcggaatatcgataaagtcctgaaaagcctgggattcctggagagcggctctggctccggcggtggcaccctgaagtacgtggaggatgtgacaaacgtggtcagacgggatgtggagaagtggggccccttcgatctggtgtacggcagcacccaacccctgggcagctcttgtgaccggtgccctggctggtacatgtttcagttccaccggatcctgcagtacgccctgccgagacaggagtcccagcggccattcttttggattttcatggacaacttgctgctgaccgaggatgaccaggaaactaccactcggttcctgcagaccgaagccgtgaccctgcaggacgtgagaggccgggactaccagaacgccatgcgggtgtggtccaacatccctggactgaaaagcaagcacgcacctctgacccctaaagaagaggagtacctgcaggcccaggtgcggagcagaagcaagctggacgcccctaaggtggatctgctggtgaagaattgcctcctgcccctgagagagtacttcaagtatttcagccagaatagtctgcccctgggcggcccaagcagcggcgcccctcctcccagcggcggcagcccagccggctccccaacctctaccgaggagggcacctctgagtccgccacccccgagagcggccctggcacctccaccgagcccagcgagggcagcgcacccggcagccctgccggcagccccacctccacagaggagggaaccagcaccgagcccagcgaaggcagcgccccaggcaccagcaccgagcctagtgagggcggctctggcggcggcagcgcccaggagattaaacggatcaacaagatcagaagaagacttgtgaaagacagcaacaccaagaaggccggcaagacaggccccatgaaaaccctgctggttagagtgatgacacccgatctgagagagcggctggaaaacctgagaaagaagcctgaaaatatcccccagcccatcagcaatacatctagagccaacctgaataagctgctgaccgattacaccgaaatgaagaaggcgatcctgcatgtgtactgggaagagttccagaaggaccctgtgggcctgatgagccgggtggcccagcctgccagcaagaagatcgatcagaacaagctgaaacctgagatggacgagaagggcaacctgaccaccgccggctttgcctgctctcagtgtggccagcccctgttcgtgtacaagctggagcaggtgtctgagaagggcaaggcttacaccaactacttcggacggtgcaatgtggccgagcacgaaaagctgatcctgctggcccagctgaagcccgagaaggatagcgacgaagccgtgacatatagcctgggaaagtttgggcagagggccctggatttctacagcattcatgtgaccaaggagtccacccaccccgtgaagcccctggcccagatcgccggaaacagatacgcctccggacctgtgggaaaggccctgagcgacgcatgtatgggcacaatcgcctccttcctgtctaagtaccaggacatcatcatcgaacaccagaaggtggtgaagggcaaccagaagagactggagagcctgcgggagctggccggcaaggaaaacctggaataccctagcgtgaccctgccacctcagcctcacaccaaggagggcgttgatgcctacaacgaagtgatcgcccgggtgcgaatgtgggtgaacctgaacctgtggcagaagctgaagctaagcagagatgatgccaagcctctgctgagactgaagggattcccttcctttcctctggtcgagagacaggccaacgaagtggactggtgggacatggtgtgtaacgtgaagaagctgatcaacgagaaaaaggaggatggcaaggtgttttggcagaatctggctggctacaagagacaggaagccctgagaccatacctgagcagcgaggaagatcggaagaagggaaagaaattcgctcggtaccagctgggcgacctgctgctgcacctggaaaagaagcacggcgaggactggggaaaggtgtacgacgaggcctgggagcggattgacaagaaagtggaaggcctgagcaagcacatcaagctggaagaggaacggagaagcgaggacgcccagagcaaggccgccctgaccgactggctgcgggctaaggccagcttcgtgatcgagggcctgaaggaggccgacaaggacgagttctgcagatgcgagctgaagctgcagaagtggtacggggacctgcggggaaagcccttcgccatcgaagccgagaacagcatcctggacatcagcggcttcagcaagcagtacaactgtgccttcatctggcagaaggacggcgtgaagaagctgaacctgtacctgatcatcaactacttcaagggcggcaagctgcggttcaagaagatcaaacctgaagccttcgaagccaacagattctacaccgtgatcaacaaaaagagcggcgagatcgtgcccatggaggtgaacttcaacttcgacgaccccaacctgatcatcctgcctctggcctttggcaagagacagggcagagaattcatctggaacgacctgctgtccctggaaaccggcagcctgaagctggccaacggaagagtgatcgagaagacactgtacaacagaagaacccggcaggatgagcctgccctgttcgtggccctgaccttcgagcggcgggaggtcctggactcctccaatatcaaaccaatgaacctgatcggcgtggcaagaggcgaaaacatccccgccgtgatcgccctgaccgaccccgagggctgcccactgagccggtttaaggatagcctgggaaacccaacccacatcctgagaatcggcgagagctataaggagaagcagcggaccatccaggccaagaaggaggtggagcagcggagagccggcggctacagccggaagtacgccagcaaagccaagaatctggcagacgatatggtgagaaacaccgctagagatctgctgtactacgccgtgacccaggatgccatgctgatcttcgccaacctgagccggggcttcggccggcagggcaagcggaccttcatggccgagagacagtacacacggatggaggactggctgaccgccaagctggcctacgagggcctgagcaagacctacctgtccaagacactggcccagtacacctccaagacatgcagcaactgtgggtttaccatcaccagcgccgactacgacagggtgctggagaagctgaagaagacagcaacaggctggatgaccacaattaacggcaaggagctgaaggtggagggccagattacctactacaacagatacaagagacagaacgtagtcaaggacctgtccgtcgagctggatagactgagcgaagaatctgtgaacaacgacatctcctcctggacaaagggcagaagcggagaagctctgagcctcctgaagaaaagattctcccatagacccgtgcaggagaagttcgtgtgcctgaactgcggcttcgagacacacgcagccgagcaagccgccctgaacatcgccagatcctggctgttcctgcggagccaggagtacaagaaataccagacaaacaagacaaccggcaacaccgataagagagccttcgtcgagacctggcagtccttttaccggaagaagcttaaggaggtgtggaaacctgccgtgcggtctggcggatctggcggaggctccacaagcatggtgcacggcagcgtgaccttcagggacgtggccatcgacttcagccaggaggagtgggagtgcctgcagcccgaccagaggaccctgtacagggacgtgatgctggagaactacagccacctgatcagcctgggcagcagcatcagcaagcccgacgtgatcaccctgctggagcaggagaaggagccctggatggtggtgaggaaggagaccagcaggaggtaccccgacctggagagcaccagccccaagaaaaagagaaaagtctaagctgccttctgcggggcttgccttctggccatgcccttcttctctcccttgcacctgtacctcttggtctttgaataaagcctgagtaggaaggctagcaaaaaaaaaaaaaaaaaaaaaaaaaaaaaaaaaaaaaaaaaaaaaaaaaaaaaaaaaaaaaaaaaaaaaaaaaaaaaaaa

SEQ ID NO: 6560 - RNA, 5797 nt, synthetic construct
  source 1..5797: mol_type = other RNA
aggaaataagagagaaaagaagagtaagaagaaatataagagccaccatggcccctaagaagaagcgtaaagtgagccggatggaacgcctcgtctacgaggtgcggcagaagtgcagaaacatcgaggacatctgcatctcctgcggatctctgaacgtgaccctggagcacccactgttcatcggcggcatgtgccagaactgtaaaaactgttttctggagtgtgcctatcaatacgacgatgacggctaccagagctactgcaccatctgttgcggcggaagagaggtgctgatgtgtggaaataacaactgctgccggtgcttctgcgtggaatgcgtggacctgctggtgggccccggcgccgcccaggccgctattaaggaagatccttggaactgctacatgtgcggccacaagggcacatacggcctgctgagacggagagaggactggcctagcagactgcagatgttcttcgccaataaccacgaccaggagttcgacccccctaaggtgtaccctcccgtccccgccgagaagagaaagcccatccgggtcctgagcctgttcgatggcatcgccaccggtctgctggtgctgaaggacctgggcatccaggtggataggtacattgcctccgaggtgtgcgaggactccatcaccgtgggaatggtgcgtcatcagggcaagatcatgtacgtgggcgacgtgcggagcgtgacacagaagcatatccaggagtggggccctttcgacctggtgatcggcggcagcccttgcaatgacctgagcatcgtgaacccagcccggaagggcctgtacgagggaaccggcagactgttcttcgagttttacagactgctgcacgacgcccggcctaaggaaggcgacgaccggcccttcttttggctgttcgagaatgtggtggccatgggagtcagcgacaagcgggatattagccggttcctggagagcaaccccgtgatgatcgatgccaaggaagtgagcgccgcccaccgggccagatacttctggggcaatctgcctggcatgaacagacccctggccagcaccgtgaacgacaagctggagctgcaggagtgcctggagcacggccggatcgccaagttcagcaaggtgagaaccatcaccacccgaagcaacagcatcaaacaaggcaaggaccagcactttcctgtgttcatgaacgagaaggaggacatcctgtggtgtaccgagatggagagagtgttcgggttcccagtccactacacagatgtcagcaacatgtctagactggccagacagagactgctgggaagaagctggtccgtccctgtgatcagacacctgttcgcccctctgaaggagtacttcgcctgcgtgagcagcggcaacagcaacgccaacagccggggccccagcttctctagcggcctggtgccactgtccctgagagggagccacatgggccccatggagatctacaaaaccgtgagcgcctggaagcggcagcctgtgcgcgtgctgagcctgtttcggaatatcgataaagtcctgaaaagcctgggattcctggagagcggctctggctccggcggtggcaccctgaagtacgtggaggatgtgacaaacgtggtcagacgggatgtggagaagtggggccccttcgatctggtgtacggcagcacccaacccctgggcagctcttgtgaccggtgccctggctggtacatgtttcagttccaccggatcctgcagtacgccctgccgagacaggagtcccagcggccattcttttggattttcatggacaacttgctgctgaccgaggatgaccaggaaactaccactcggttcctgcagaccgaagccgtgaccctgcaggacgtgagaggccgggactaccagaacgccatgcgggtgtggtccaacatccctggactgaaaagcaagcacgcacctctgacccctaaagaagaggagtacctgcaggcccaggtgcggagcagaagcaagctggacgcccctaaggtggatctgctggtgaagaattgcctcctgcccctgagagagtacttcaagtatttcagccagaatagtctgcccctgggcggcccaagcagcggcgcccctcctcccagcggcggcagcccagccggctccccaacctctaccgaggagggcacctctgagtccgccacccccgagagcggccctggcacctccaccgagcccagcgagggcagcgcacccggcagccctgccggcagccccacctccacagaggagggaaccagcaccgagcccagcgaaggcagcgccccaggcaccagcaccgagcctagtgagggcggctctggcggcggcagcgcccaggagattaaacggatcaacaagatcagaagaagacttgtgaaagacagcaacaccaagaaggccggcaagacaggccccatgaaaaccctgctggttagagtgatgacacccgatctgagagagcggctggaaaacctgagaaagaagcctgaaaatatcccccagcccatcagcaatacatctagagccaacctgaataagctgctgaccgattacaccgaaatgaagaaggcgatcctgcatgtgtactgggaagagttccagaaggaccctgtgggcctgatgagccgggtggcccagcctgccagcaagaagatcgatcagaacaagctgaaacctgagatggacgagaagggcaacctgaccaccgccggctttgcctgctctcagtgtggccagcccctgttcgtgtacaagctggagcaggtgtctgagaagggcaaggcttacaccaactacttcggacggtgcaatgtggccgagcacgaaaagctgatcctgctggcccagctgaagcccgagaaggatagcgacgaagccgtgacatatagcctgggaaagtttgggcagagggccctggatttctacagcattcatgtgaccaaggagtccacccaccccgtgaagcccctggcccagatcgccggaaacagatacgcctccggacctgtgggaaaggccctgagcgacgcatgtatgggcacaatcgcctccttcctgtctaagtaccaggacatcatcatcgaacaccagaaggtggtgaagggcaaccagaagagactggagagcctgcgggagctggccggcaaggaaaacctggaataccctagcgtgaccctgccacctcagcctcacaccaaggagggcgttgatgcctacaacgaagtgatcgcccgggtgcgaatgtgggtgaacctgaacctgtggcagaagctgaagctaagcagagatgatgccaagcctctgctgagactgaagggattcccttcctttcctctggtcgagagacaggccaacgaagtggactggtgggacatggtgtgtaacgtgaagaagctgatcaacgagaaaaaggaggatggcaaggtgttttggcagaatctggctggctacaagagacaggaagccctgagaccatacctgagcagcgaggaagatcggaagaagggaaagaaattcgctcggtaccagctgggcgacctgctgctgcacctggaaaagaagcacggcgaggactggggaaaggtgtacgacgaggcctgggagcggattgacaagaaagtggaaggcctgagcaagcacatcaagctggaagaggaacggagaagcgaggacgcccagagcaaggccgccctgaccgactggctgcgggctaaggccagcttcgtgatcgagggcctgaaggaggccgacaaggacgagttctgcagatgcgagctgaagctgcagaagtggtacggggacctgcggggaaagcccttcgccatcgaagccgagaacagcatcctggacatcagcggcttcagcaagcagtacaactgtgccttcatctggcagaaggacggcgtgaagaagctgaacctgtacctgatcatcaactacttcaagggcggcaagctgcggttcaagaagatcaaacctgaagccttcgaagccaacagattctacaccgtgatcaacaaaaagagcggcgagatcgtgcccatggaggtgaacttcaacttcgacgaccccaacctgatcatcctgcctctggcctttggcaagagacagggcagagaattcatctggaacgacctgctgtccctggaaaccggcagcctgaagctggccaacggaagagtgatcgagaagacactgtacaacagaagaacccggcaggatgagcctgccctgttcgtggccctgaccttcgagcggcgggaggtcctggactcctccaatatcaaaccaatgaacctgatcggcgtggcaagaggcgaaaacatccccgccgtgatcgccctgaccgaccccgagggctgcccactgagccggtttaaggatagcctgggaaacccaacccacatcctgagaatcggcgagagctataaggagaagcagcggaccatccaggccaagaaggaggtggagcagcggagagccggcggctacagccggaagtacgccagcaaagccaagaatctggcagacgatatggtgagaaacaccgctagagatctgctgtactacgccgtgacccaggatgccatgctgatcttcgccaacctgagccggggcttcggccggcagggcaagcggaccttcatggccgagagacagtacacacggatggaggactggctgaccgccaagctggcctacgagggcctgagcaagacctacctgtccaagacactggcccagtacacctccaagacatgcagcaactgtgggtttaccatcaccagcgccgactacgacagggtgctggagaagctgaagaagacagcaacaggctggatgaccacaattaacggcaaggagctgaaggtggagggccagattacctactacaacagatacaagagacagaacgtagtcaaggacctgtccgtcgagctggatagactgagcgaagaatctgtgaacaacgacatctcctcctggacaaagggcagaagcggagaagctctgagcctcctgaagaaaagattctcccatagacccgtgcaggagaagttcgtgtgcctgaactgcggcttcgagacacacgcagccgagcaagccgccctgaacatcgccagatcctggctgttcctgcggagccaggagtacaagaaataccagacaaacaagacaaccggcaacaccgataagagagccttcgtcgagacctggcagtccttttaccggaagaagcttaaggaggtgtggaaacctgccgtgcggtctggcggatctggcggaggctccacaagcacccaggtgagcgtgaccttcgacgacgtggccgtgaccttcacccaggaggagtggggccacctggaccccgcccagaggaccctgtacagggaggtgatgctggagacctgcaggctgctgatgagcctgggctgccccgtgcccaggcccgagctgatctaccagcaggagcacggccaggagctgtggaccgtgaagagggacctgagcaggagcacctgcgccggctacagcagcgagaccagccccaagaaaaagagaaaagtctaagctgccttctgcggggcttgccttctggccatgcccttcttctctcccttgcacctgtacctcttggtctttgaataaagcctgagtaggaaggctagcaaaaaaaaaaaaaaaaaaaaaaaaaaaaaaaaaaaaaaaaaaaaaaaaaaaaaaaaaaaaaaaaaaaaaaaaaaaaaaaa

SEQ ID NO: 6561 - RNA, 5797 nt, synthetic construct
  source 1..5797: mol_type = other RNA
aggaaataagagagaaaagaagagtaagaagaaatataagagccaccatggcccctaagaagaagcgtaaagtgagccggatggaacgcctcgtctacgaggtgcggcagaagtgcagaaacatcgaggacatctgcatctcctgcggatctctgaacgtgaccctggagcacccactgttcatcggcggcatgtgccagaactgtaaaaactgttttctggagtgtgcctatcaatacgacgatgacggctaccagagctactgcaccatctgttgcggcggaagagaggtgctgatgtgtggaaataacaactgctgccggtgcttctgcgtggaatgcgtggacctgctggtgggccccggcgccgcccaggccgctattaaggaagatccttggaactgctacatgtgcggccacaagggcacatacggcctgctgagacggagagaggactggcctagcagactgcagatgttcttcgccaataaccacgaccaggagttcgacccccctaaggtgtaccctcccgtccccgccgagaagagaaagcccatccgggtcctgagcctgttcgatggcatcgccaccggtctgctggtgctgaaggacctgggcatccaggtggataggtacattgcctccgaggtgtgcgaggactccatcaccgtgggaatggtgcgtcatcagggcaagatcatgtacgtgggcgacgtgcggagcgtgacacagaagcatatccaggagtggggccctttcgacctggtgatcggcggcagcccttgcaatgacctgagcatcgtgaacccagcccggaagggcctgtacgagggaaccggcagactgttcttcgagttttacagactgctgcacgacgcccggcctaaggaaggcgacgaccggcccttcttttggctgttcgagaatgtggtggccatgggagtcagcgacaagcgggatattagccggttcctggagagcaaccccgtgatgatcgatgccaaggaagtgagcgccgcccaccgggccagatacttctggggcaatctgcctggcatgaacagacccctggccagcaccgtgaacgacaagctggagctgcaggagtgcctggagcacggccggatcgccaagttcagcaaggtgagaaccatcaccacccgaagcaacagcatcaaacaaggcaaggaccagcactttcctgtgttcatgaacgagaaggaggacatcctgtggtgtaccgagatggagagagtgttcgggttcccagtccactacacagatgtcagcaacatgtctagactggccagacagagactgctgggaagaagctggtccgtccctgtgatcagacacctgttcgcccctctgaaggagtacttcgcctgcgtgagcagcggcaacagcaacgccaacagccggggccccagcttctctagcggcctggtgccactgtccctgagagggagccacatgggccccatggagatctacaaaaccgtgagcgcctggaagcggcagcctgtgcgcgtgctgagcctgtttcggaatatcgataaagtcctgaaaagcctgggattcctggagagcggctctggctccggcggtggcaccctgaagtacgtggaggatgtgacaaacgtggtcagacgggatgtggagaagtggggccccttcgatctggtgtacggcagcacccaacccctgggcagctcttgtgaccggtgccctggctggtacatgtttcagttccaccggatcctgcagtacgccctgccgagacaggagtcccagcggccattcttttggattttcatggacaacttgctgctgaccgaggatgaccaggaaactaccactcggttcctgcagaccgaagccgtgaccctgcaggacgtgagaggccgggactaccagaacgccatgcgggtgtggtccaacatccctggactgaaaagcaagcacgcacctctgacccctaaagaagaggagtacctgcaggcccaggtgcggagcagaagcaagctggacgcccctaaggtggatctgctggtgaagaattgcctcctgcccctgagagagtacttcaagtatttcagccagaatagtctgcccctgggcggcccaagcagcggcgcccctcctcccagcggcggcagcccagccggctccccaacctctaccgaggagggcacctctgagtccgccacccccgagagcggccctggcacctccaccgagcccagcgagggcagcgcacccggcagccctgccggcagccccacctccacagaggagggaaccagcaccgagcccagcgaaggcagcgccccaggcaccagcaccgagcctagtgagggcggctctggcggcggcagcgcccaggagattaaacggatcaacaagatcagaagaagacttgtgaaagacagcaacaccaagaaggccggcaagacaggccccatgaaaaccctgctggttagagtgatgacacccgatctgagagagcggctggaaaacctgagaaagaagcctgaaaatatcccccagcccatcagcaatacatctagagccaacctgaataagctgctgaccgattacaccgaaatgaagaaggcgatcctgcatgtgtactgggaagagttccagaaggaccctgtgggcctgatgagccgggtggcccagcctgccagcaagaagatcgatcagaacaagctgaaacctgagatggacgagaagggcaacctgaccaccgccggctttgcctgctctcagtgtggccagcccctgttcgtgtacaagctggagcaggtgtctgagaagggcaaggcttacaccaactacttcggacggtgcaatgtggccgagcacgaaaagctgatcctgctggcccagctgaagcccgagaaggatagcgacgaagccgtgacatatagcctgggaaagtttgggcagagggccctggatttctacagcattcatgtgaccaaggagtccacccaccccgtgaagcccctggcccagatcgccggaaacagatacgcctccggacctgtgggaaaggccctgagcgacgcatgtatgggcacaatcgcctccttcctgtctaagtaccaggacatcatcatcgaacaccagaaggtggtgaagggcaaccagaagagactggagagcctgcgggagctggccggcaaggaaaacctggaataccctagcgtgaccctgccacctcagcctcacaccaaggagggcgttgatgcctacaacgaagtgatcgcccgggtgcgaatgtgggtgaacctgaacctgtggcagaagctgaagctaagcagagatgatgccaagcctctgctgagactgaagggattcccttcctttcctctggtcgagagacaggccaacgaagtggactggtgggacatggtgtgtaacgtgaagaagctgatcaacgagaaaaaggaggatggcaaggtgttttggcagaatctggctggctacaagagacaggaagccctgagaccatacctgagcagcgaggaagatcggaagaagggaaagaaattcgctcggtaccagctgggcgacctgctgctgcacctggaaaagaagcacggcgaggactggggaaaggtgtacgacgaggcctgggagcggattgacaagaaagtggaaggcctgagcaagcacatcaagctggaagaggaacggagaagcgaggacgcccagagcaaggccgccctgaccgactggctgcgggctaaggccagcttcgtgatcgagggcctgaaggaggccgacaaggacgagttctgcagatgcgagctgaagctgcagaagtggtacggggacctgcggggaaagcccttcgccatcgaagccgagaacagcatcctggacatcagcggcttcagcaagcagtacaactgtgccttcatctggcagaaggacggcgtgaagaagctgaacctgtacctgatcatcaactacttcaagggcggcaagctgcggttcaagaagatcaaacctgaagccttcgaagccaacagattctacaccgtgatcaacaaaaagagcggcgagatcgtgcccatggaggtgaacttcaacttcgacgaccccaacctgatcatcctgcctctggcctttggcaagagacagggcagagaattcatctggaacgacctgctgtccctggaaaccggcagcctgaagctggccaacggaagagtgatcgagaagacactgtacaacagaagaacccggcaggatgagcctgccctgttcgtggccctgaccttcgagcggcgggaggtcctggactcctccaatatcaaaccaatgaacctgatcggcgtggcaagaggcgaaaacatccccgccgtgatcgccctgaccgaccccgagggctgcccactgagccggtttaaggatagcctgggaaacccaacccacatcctgagaatcggcgagagctataaggagaagcagcggaccatccaggccaagaaggaggtggagcagcggagagccggcggctacagccggaagtacgccagcaaagccaagaatctggcagacgatatggtgagaaacaccgctagagatctgctgtactacgccgtgacccaggatgccatgctgatcttcgccaacctgagccggggcttcggccggcagggcaagcggaccttcatggccgagagacagtacacacggatggaggactggctgaccgccaagctggcctacgagggcctgagcaagacctacctgtccaagacactggcccagtacacctccaagacatgcagcaactgtgggtttaccatcaccagcgccgactacgacagggtgctggagaagctgaagaagacagcaacaggctggatgaccacaattaacggcaaggagctgaaggtggagggccagattacctactacaacagatacaagagacagaacgtagtcaaggacctgtccgtcgagctggatagactgagcgaagaatctgtgaacaacgacatctcctcctggacaaagggcagaagcggagaagctctgagcctcctgaagaaaagattctcccatagacccgtgcaggagaagttcgtgtgcctgaactgcggcttcgagacacacgcagccgagcaagccgccctgaacatcgccagatcctggctgttcctgcggagccaggagtacaagaaataccagacaaacaagacaaccggcaacaccgataagagagccttcgtcgagacctggcagtccttttaccggaagaagcttaaggaggtgtggaaacctgccgtgcggtctggcggatctggcggaggctccacaagcatggccttcgaggacgtggccgtgtacttcagcgaggaggagtggggcctgctggacaccgcccagagggccctgtacaggcacgtgatgctggagaacttcaccctggtgaccagcctgggcctgagcaccagcaggcccctggtggtgatccagctggagaggggcgaggacccctgggtgcccagcgtgaaggacatgaccctggccaggaacgcctacggcaggaggaccaccggcagcaccagccccaagaaaaagagaaaagtctaagctgccttctgcggggcttgccttctggccatgcccttcttctctcccttgcacctgtacctcttggtctttgaataaagcctgagtaggaaggctagcaaaaaaaaaaaaaaaaaaaaaaaaaaaaaaaaaaaaaaaaaaaaaaaaaaaaaaaaaaaaaaaaaaaaaaaaaaaaaaaa

SEQ ID NO: 6562 - RNA, 5797 nt, synthetic construct
  source 1..5797: mol_type = other RNA
aggaaataagagagaaaagaagagtaagaagaaatataagagccaccatggcccctaagaagaagcgtaaagtgagccggatggaacgcctcgtctacgaggtgcggcagaagtgcagaaacatcgaggacatctgcatctcctgcggatctctgaacgtgaccctggagcacccactgttcatcggcggcatgtgccagaactgtaaaaactgttttctggagtgtgcctatcaatacgacgatgacggctaccagagctactgcaccatctgttgcggcggaagagaggtgctgatgtgtggaaataacaactgctgccggtgcttctgcgtggaatgcgtggacctgctggtgggccccggcgccgcccaggccgctattaaggaagatccttggaactgctacatgtgcggccacaagggcacatacggcctgctgagacggagagaggactggcctagcagactgcagatgttcttcgccaataaccacgaccaggagttcgacccccctaaggtgtaccctcccgtccccgccgagaagagaaagcccatccgggtcctgagcctgttcgatggcatcgccaccggtctgctggtgctgaaggacctgggcatccaggtggataggtacattgcctccgaggtgtgcgaggactccatcaccgtgggaatggtgcgtcatcagggcaagatcatgtacgtgggcgacgtgcggagcgtgacacagaagcatatccaggagtggggccctttcgacctggtgatcggcggcagcccttgcaatgacctgagcatcgtgaacccagcccggaagggcctgtacgagggaaccggcagactgttcttcgagttttacagactgctgcacgacgcccggcctaaggaaggcgacgaccggcccttcttttggctgttcgagaatgtggtggccatgggagtcagcgacaagcgggatattagccggttcctggagagcaaccccgtgatgatcgatgccaaggaagtgagcgccgcccaccgggccagatacttctggggcaatctgcctggcatgaacagacccctggccagcaccgtgaacgacaagctggagctgcaggagtgcctggagcacggccggatcgccaagttcagcaaggtgagaaccatcaccacccgaagcaacagcatcaaacaaggcaaggaccagcactttcctgtgttcatgaacgagaaggaggacatcctgtggtgtaccgagatggagagagtgttcgggttcccagtccactacacagatgtcagcaacatgtctagactggccagacagagactgctgggaagaagctggtccgtccctgtgatcagacacctgttcgcccctctgaaggagtacttcgcctgcgtgagcagcggcaacagcaacgccaacagccggggccccagcttctctagcggcctggtgccactgtccctgagagggagccacatgggccccatggagatctacaaaaccgtgagcgcctggaagcggcagcctgtgcgcgtgctgagcctgtttcggaatatcgataaagtcctgaaaagcctgggattcctggagagcggctctggctccggcggtggcaccctgaagtacgtggaggatgtgacaaacgtggtcagacgggatgtggagaagtggggccccttcgatctggtgtacggcagcacccaacccctgggcagctcttgtgaccggtgccctggctggtacatgtttcagttccaccggatcctgcagtacgccctgccgagacaggagtcccagcggccattcttttggattttcatggacaacttgctgctgaccgaggatgaccaggaaactaccactcggttcctgcagaccgaagccgtgaccctgcaggacgtgagaggccgggactaccagaacgccatgcgggtgtggtccaacatccctggactgaaaagcaagcacgcacctctgacccctaaagaagaggagtacctgcaggcccaggtgcggagcagaagcaagctggacgcccctaaggtggatctgctggtgaagaattgcctcctgcccctgagagagtacttcaagtatttcagccagaatagtctgcccctgggcggcccaagcagcggcgcccctcctcccagcggcggcagcccagccggctccccaacctctaccgaggagggcacctctgagtccgccacccccgagagcggccctggcacctccaccgagcccagcgagggcagcgcacccggcagccctgccggcagccccacctccacagaggagggaaccagcaccgagcccagcgaaggcagcgccccaggcaccagcaccgagcctagtgagggcggctctggcggcggcagcgcccaggagattaaacggatcaacaagatcagaagaagacttgtgaaagacagcaacaccaagaaggccggcaagacaggccccatgaaaaccctgctggttagagtgatgacacccgatctgagagagcggctggaaaacctgagaaagaagcctgaaaatatcccccagcccatcagcaatacatctagagccaacctgaataagctgctgaccgattacaccgaaatgaagaaggcgatcctgcatgtgtactgggaagagttccagaaggaccctgtgggcctgatgagccgggtggcccagcctgccagcaagaagatcgatcagaacaagctgaaacctgagatggacgagaagggcaacctgaccaccgccggctttgcctgctctcagtgtggccagcccctgttcgtgtacaagctggagcaggtgtctgagaagggcaaggcttacaccaactacttcggacggtgcaatgtggccgagcacgaaaagctgatcctgctggcccagctgaagcccgagaaggatagcgacgaagccgtgacatatagcctgggaaagtttgggcagagggccctggatttctacagcattcatgtgaccaaggagtccacccaccccgtgaagcccctggcccagatcgccggaaacagatacgcctccggacctgtgggaaaggccctgagcgacgcatgtatgggcacaatcgcctccttcctgtctaagtaccaggacatcatcatcgaacaccagaaggtggtgaagggcaaccagaagagactggagagcctgcgggagctggccggcaaggaaaacctggaataccctagcgtgaccctgccacctcagcctcacaccaaggagggcgttgatgcctacaacgaagtgatcgcccgggtgcgaatgtgggtgaacctgaacctgtggcagaagctgaagctaagcagagatgatgccaagcctctgctgagactgaagggattcccttcctttcctctggtcgagagacaggccaacgaagtggactggtgggacatggtgtgtaacgtgaagaagctgatcaacgagaaaaaggaggatggcaaggtgttttggcagaatctggctggctacaagagacaggaagccctgagaccatacctgagcagcgaggaagatcggaagaagggaaagaaattcgctcggtaccagctgggcgacctgctgctgcacctggaaaagaagcacggcgaggactggggaaaggtgtacgacgaggcctgggagcggattgacaagaaagtggaaggcctgagcaagcacatcaagctggaagaggaacggagaagcgaggacgcccagagcaaggccgccctgaccgactggctgcgggctaaggccagcttcgtgatcgagggcctgaaggaggccgacaaggacgagttctgcagatgcgagctgaagctgcagaagtggtacggggacctgcggggaaagcccttcgccatcgaagccgagaacagcatcctggacatcagcggcttcagcaagcagtacaactgtgccttcatctggcagaaggacggcgtgaagaagctgaacctgtacctgatcatcaactacttcaagggcggcaagctgcggttcaagaagatcaaacctgaagccttcgaagccaacagattctacaccgtgatcaacaaaaagagcggcgagatcgtgcccatggaggtgaacttcaacttcgacgaccccaacctgatcatcctgcctctggcctttggcaagagacagggcagagaattcatctggaacgacctgctgtccctggaaaccggcagcctgaagctggccaacggaagagtgatcgagaagacactgtacaacagaagaacccggcaggatgagcctgccctgttcgtggccctgaccttcgagcggcgggaggtcctggactcctccaatatcaaaccaatgaacctgatcggcgtggcaagaggcgaaaacatccccgccgtgatcgccctgaccgaccccgagggctgcccactgagccggtttaaggatagcctgggaaacccaacccacatcctgagaatcggcgagagctataaggagaagcagcggaccatccaggccaagaaggaggtggagcagcggagagccggcggctacagccggaagtacgccagcaaagccaagaatctggcagacgatatggtgagaaacaccgctagagatctgctgtactacgccgtgacccaggatgccatgctgatcttcgccaacctgagccggggcttcggccggcagggcaagcggaccttcatggccgagagacagtacacacggatggaggactggctgaccgccaagctggcctacgagggcctgagcaagacctacctgtccaagacactggcccagtacacctccaagacatgcagcaactgtgggtttaccatcaccagcgccgactacgacagggtgctggagaagctgaagaagacagcaacaggctggatgaccacaattaacggcaaggagctgaaggtggagggccagattacctactacaacagatacaagagacagaacgtagtcaaggacctgtccgtcgagctggatagactgagcgaagaatctgtgaacaacgacatctcctcctggacaaagggcagaagcggagaagctctgagcctcctgaagaaaagattctcccatagacccgtgcaggagaagttcgtgtgcctgaactgcggcttcgagacacacgcagccgagcaagccgccctgaacatcgccagatcctggctgttcctgcggagccaggagtacaagaaataccagacaaacaagacaaccggcaacaccgataagagagccttcgtcgagacctggcagtccttttaccggaagaagcttaaggaggtgtggaaacctgccgtgcggtctggcggatctggcggaggctccacaagcatggccgccagccaggagagcctgaccttcaaggacgtgagcgtggacttcagcctggaggagtgggagtgcctggaccccgcccagaggaagctgtacagcgacgtgatgctggagaactacagcaacctggtgagcctgggcctggtggtgagcaagcccggcctggtgaccttcctggagcagatgcaggaggtgtgggacgtgagcaggaagaagagcatcagcaccccccccggcaggaccagccccaagaaaaagagaaaagtctaagctgccttctgcggggcttgccttctggccatgcccttcttctctcccttgcacctgtacctcttggtctttgaataaagcctgagtaggaaggctagcaaaaaaaaaaaaaaaaaaaaaaaaaaaaaaaaaaaaaaaaaaaaaaaaaaaaaaaaaaaaaaaaaaaaaaaaaaaaaaaa

SEQ ID NO: 6563 - RNA, 5797 nt, synthetic construct
  source 1..5797: mol_type = other RNA
aggaaataagagagaaaagaagagtaagaagaaatataagagccaccatggcccctaagaagaagcgtaaagtgagccggatggaacgcctcgtctacgaggtgcggcagaagtgcagaaacatcgaggacatctgcatctcctgcggatctctgaacgtgaccctggagcacccactgttcatcggcggcatgtgccagaactgtaaaaactgttttctggagtgtgcctatcaatacgacgatgacggctaccagagctactgcaccatctgttgcggcggaagagaggtgctgatgtgtggaaataacaactgctgccggtgcttctgcgtggaatgcgtggacctgctggtgggccccggcgccgcccaggccgctattaaggaagatccttggaactgctacatgtgcggccacaagggcacatacggcctgctgagacggagagaggactggcctagcagactgcagatgttcttcgccaataaccacgaccaggagttcgacccccctaaggtgtaccctcccgtccccgccgagaagagaaagcccatccgggtcctgagcctgttcgatggcatcgccaccggtctgctggtgctgaaggacctgggcatccaggtggataggtacattgcctccgaggtgtgcgaggactccatcaccgtgggaatggtgcgtcatcagggcaagatcatgtacgtgggcgacgtgcggagcgtgacacagaagcatatccaggagtggggccctttcgacctggtgatcggcggcagcccttgcaatgacctgagcatcgtgaacccagcccggaagggcctgtacgagggaaccggcagactgttcttcgagttttacagactgctgcacgacgcccggcctaaggaaggcgacgaccggcccttcttttggctgttcgagaatgtggtggccatgggagtcagcgacaagcgggatattagccggttcctggagagcaaccccgtgatgatcgatgccaaggaagtgagcgccgcccaccgggccagatacttctggggcaatctgcctggcatgaacagacccctggccagcaccgtgaacgacaagctggagctgcaggagtgcctggagcacggccggatcgccaagttcagcaaggtgagaaccatcaccacccgaagcaacagcatcaaacaaggcaaggaccagcactttcctgtgttcatgaacgagaaggaggacatcctgtggtgtaccgagatggagagagtgttcgggttcccagtccactacacagatgtcagcaacatgtctagactggccagacagagactgctgggaagaagctggtccgtccctgtgatcagacacctgttcgcccctctgaaggagtacttcgcctgcgtgagcagcggcaacagcaacgccaacagccggggccccagcttctctagcggcctggtgccactgtccctgagagggagccacatgggccccatggagatctacaaaaccgtgagcgcctggaagcggcagcctgtgcgcgtgctgagcctgtttcggaatatcgataaagtcctgaaaagcctgggattcctggagagcggctctggctccggcggtggcaccctgaagtacgtggaggatgtgacaaacgtggtcagacgggatgtggagaagtggggccccttcgatctggtgtacggcagcacccaacccctgggcagctcttgtgaccggtgccctggctggtacatgtttcagttccaccggatcctgcagtacgccctgccgagacaggagtcccagcggccattcttttggattttcatggacaacttgctgctgaccgaggatgaccaggaaactaccactcggttcctgcagaccgaagccgtgaccctgcaggacgtgagaggccgggactaccagaacgccatgcgggtgtggtccaacatccctggactgaaaagcaagcacgcacctctgacccctaaagaagaggagtacctgcaggcccaggtgcggagcagaagcaagctggacgcccctaaggtggatctgctggtgaagaattgcctcctgcccctgagagagtacttcaagtatttcagccagaatagtctgcccctgggcggcccaagcagcggcgcccctcctcccagcggcggcagcccagccggctccccaacctctaccgaggagggcacctctgagtccgccacccccgagagcggccctggcacctccaccgagcccagcgagggcagcgcacccggcagccctgccggcagccccacctccacagaggagggaaccagcaccgagcccagcgaaggcagcgccccaggcaccagcaccgagcctagtgagggcggctctggcggcggcagcgcccaggagattaaacggatcaacaagatcagaagaagacttgtgaaagacagcaacaccaagaaggccggcaagacaggccccatgaaaaccctgctggttagagtgatgacacccgatctgagagagcggctggaaaacctgagaaagaagcctgaaaatatcccccagcccatcagcaatacatctagagccaacctgaataagctgctgaccgattacaccgaaatgaagaaggcgatcctgcatgtgtactgggaagagttccagaaggaccctgtgggcctgatgagccgggtggcccagcctgccagcaagaagatcgatcagaacaagctgaaacctgagatggacgagaagggcaacctgaccaccgccggctttgcctgctctcagtgtggccagcccctgttcgtgtacaagctggagcaggtgtctgagaagggcaaggcttacaccaactacttcggacggtgcaatgtggccgagcacgaaaagctgatcctgctggcccagctgaagcccgagaaggatagcgacgaagccgtgacatatagcctgggaaagtttgggcagagggccctggatttctacagcattcatgtgaccaaggagtccacccaccccgtgaagcccctggcccagatcgccggaaacagatacgcctccggacctgtgggaaaggccctgagcgacgcatgtatgggcacaatcgcctccttcctgtctaagtaccaggacatcatcatcgaacaccagaaggtggtgaagggcaaccagaagagactggagagcctgcgggagctggccggcaaggaaaacctggaataccctagcgtgaccctgccacctcagcctcacaccaaggagggcgttgatgcctacaacgaagtgatcgcccgggtgcgaatgtgggtgaacctgaacctgtggcagaagctgaagctaagcagagatgatgccaagcctctgctgagactgaagggattcccttcctttcctctggtcgagagacaggccaacgaagtggactggtgggacatggtgtgtaacgtgaagaagctgatcaacgagaaaaaggaggatggcaaggtgttttggcagaatctggctggctacaagagacaggaagccctgagaccatacctgagcagcgaggaagatcggaagaagggaaagaaattcgctcggtaccagctgggcgacctgctgctgcacctggaaaagaagcacggcgaggactggggaaaggtgtacgacgaggcctgggagcggattgacaagaaagtggaaggcctgagcaagcacatcaagctggaagaggaacggagaagcgaggacgcccagagcaaggccgccctgaccgactggctgcgggctaaggccagcttcgtgatcgagggcctgaaggaggccgacaaggacgagttctgcagatgcgagctgaagctgcagaagtggtacggggacctgcggggaaagcccttcgccatcgaagccgagaacagcatcctggacatcagcggcttcagcaagcagtacaactgtgccttcatctggcagaaggacggcgtgaagaagctgaacctgtacctgatcatcaactacttcaagggcggcaagctgcggttcaagaagatcaaacctgaagccttcgaagccaacagattctacaccgtgatcaacaaaaagagcggcgagatcgtgcccatggaggtgaacttcaacttcgacgaccccaacctgatcatcctgcctctggcctttggcaagagacagggcagagaattcatctggaacgacctgctgtccctggaaaccggcagcctgaagctggccaacggaagagtgatcgagaagacactgtacaacagaagaacccggcaggatgagcctgccctgttcgtggccctgaccttcgagcggcgggaggtcctggactcctccaatatcaaaccaatgaacctgatcggcgtggcaagaggcgaaaacatccccgccgtgatcgccctgaccgaccccgagggctgcccactgagccggtttaaggatagcctgggaaacccaacccacatcctgagaatcggcgagagctataaggagaagcagcggaccatccaggccaagaaggaggtggagcagcggagagccggcggctacagccggaagtacgccagcaaagccaagaatctggcagacgatatggtgagaaacaccgctagagatctgctgtactacgccgtgacccaggatgccatgctgatcttcgccaacctgagccggggcttcggccggcagggcaagcggaccttcatggccgagagacagtacacacggatggaggactggctgaccgccaagctggcctacgagggcctgagcaagacctacctgtccaagacactggcccagtacacctccaagacatgcagcaactgtgggtttaccatcaccagcgccgactacgacagggtgctggagaagctgaagaagacagcaacaggctggatgaccacaattaacggcaaggagctgaaggtggagggccagattacctactacaacagatacaagagacagaacgtagtcaaggacctgtccgtcgagctggatagactgagcgaagaatctgtgaacaacgacatctcctcctggacaaagggcagaagcggagaagctctgagcctcctgaagaaaagattctcccatagacccgtgcaggagaagttcgtgtgcctgaactgcggcttcgagacacacgcagccgagcaagccgccctgaacatcgccagatcctggctgttcctgcggagccaggagtacaagaaataccagacaaacaagacaaccggcaacaccgataagagagccttcgtcgagacctggcagtccttttaccggaagaagcttaaggaggtgtggaaacctgccgtgcggtctggcggatctggcggaggctccacaagcagccagggcctggtgaccttcggcgacgtggccctggacttcagccaggaggagtgggagtggctgaaccccagccagaaggacctgtacagggacgtgatgctggagaactacaggaacctggtgtggctgggcctgagcatcagcaagcccaacatgatcagcctgctggagcagggcaaggagccctggatggtggagagggagatgagccacggccagtgcgccgactgggagagctggaccagccccaagaaaaagagaaaagtctaagctgccttctgcggggcttgccttctggccatgcccttcttctctcccttgcacctgtacctcttggtctttgaataaagcctgagtaggaaggctagcaaaaaaaaaaaaaaaaaaaaaaaaaaaaaaaaaaaaaaaaaaaaaaaaaaaaaaaaaaaaaaaaaaaaaaaaaaaaaaaa

SEQ ID NO: 6564 - RNA, 5797 nt, synthetic construct
  source 1..5797: mol_type = other RNA
aggaaataagagagaaaagaagagtaagaagaaatataagagccaccatggcccctaagaagaagcgtaaagtgagccggatggaacgcctcgtctacgaggtgcggcagaagtgcagaaacatcgaggacatctgcatctcctgcggatctctgaacgtgaccctggagcacccactgttcatcggcggcatgtgccagaactgtaaaaactgttttctggagtgtgcctatcaatacgacgatgacggctaccagagctactgcaccatctgttgcggcggaagagaggtgctgatgtgtggaaataacaactgctgccggtgcttctgcgtggaatgcgtggacctgctggtgggccccggcgccgcccaggccgctattaaggaagatccttggaactgctacatgtgcggccacaagggcacatacggcctgctgagacggagagaggactggcctagcagactgcagatgttcttcgccaataaccacgaccaggagttcgacccccctaaggtgtaccctcccgtccccgccgagaagagaaagcccatccgggtcctgagcctgttcgatggcatcgccaccggtctgctggtgctgaaggacctgggcatccaggtggataggtacattgcctccgaggtgtgcgaggactccatcaccgtgggaatggtgcgtcatcagggcaagatcatgtacgtgggcgacgtgcggagcgtgacacagaagcatatccaggagtggggccctttcgacctggtgatcggcggcagcccttgcaatgacctgagcatcgtgaacccagcccggaagggcctgtacgagggaaccggcagactgttcttcgagttttacagactgctgcacgacgcccggcctaaggaaggcgacgaccggcccttcttttggctgttcgagaatgtggtggccatgggagtcagcgacaagcgggatattagccggttcctggagagcaaccccgtgatgatcgatgccaaggaagtgagcgccgcccaccgggccagatacttctggggcaatctgcctggcatgaacagacccctggccagcaccgtgaacgacaagctggagctgcaggagtgcctggagcacggccggatcgccaagttcagcaaggtgagaaccatcaccacccgaagcaacagcatcaaacaaggcaaggaccagcactttcctgtgttcatgaacgagaaggaggacatcctgtggtgtaccgagatggagagagtgttcgggttcccagtccactacacagatgtcagcaacatgtctagactggccagacagagactgctgggaagaagctggtccgtccctgtgatcagacacctgttcgcccctctgaaggagtacttcgcctgcgtgagcagcggcaacagcaacgccaacagccggggccccagcttctctagcggcctggtgccactgtccctgagagggagccacatgggccccatggagatctacaaaaccgtgagcgcctggaagcggcagcctgtgcgcgtgctgagcctgtttcggaatatcgataaagtcctgaaaagcctgggattcctggagagcggctctggctccggcggtggcaccctgaagtacgtggaggatgtgacaaacgtggtcagacgggatgtggagaagtggggccccttcgatctggtgtacggcagcacccaacccctgggcagctcttgtgaccggtgccctggctggtacatgtttcagttccaccggatcctgcagtacgccctgccgagacaggagtcccagcggccattcttttggattttcatggacaacttgctgctgaccgaggatgaccaggaaactaccactcggttcctgcagaccgaagccgtgaccctgcaggacgtgagaggccgggactaccagaacgccatgcgggtgtggtccaacatccctggactgaaaagcaagcacgcacctctgacccctaaagaagaggagtacctgcaggcccaggtgcggagcagaagcaagctggacgcccctaaggtggatctgctggtgaagaattgcctcctgcccctgagagagtacttcaagtatttcagccagaatagtctgcccctgggcggcccaagcagcggcgcccctcctcccagcggcggcagcccagccggctccccaacctctaccgaggagggcacctctgagtccgccacccccgagagcggccctggcacctccaccgagcccagcgagggcagcgcacccggcagccctgccggcagccccacctccacagaggagggaaccagcaccgagcccagcgaaggcagcgccccaggcaccagcaccgagcctagtgagggcggctctggcggcggcagcgcccaggagattaaacggatcaacaagatcagaagaagacttgtgaaagacagcaacaccaagaaggccggcaagacaggccccatgaaaaccctgctggttagagtgatgacacccgatctgagagagcggctggaaaacctgagaaagaagcctgaaaatatcccccagcccatcagcaatacatctagagccaacctgaataagctgctgaccgattacaccgaaatgaagaaggcgatcctgcatgtgtactgggaagagttccagaaggaccctgtgggcctgatgagccgggtggcccagcctgccagcaagaagatcgatcagaacaagctgaaacctgagatggacgagaagggcaacctgaccaccgccggctttgcctgctctcagtgtggccagcccctgttcgtgtacaagctggagcaggtgtctgagaagggcaaggcttacaccaactacttcggacggtgcaatgtggccgagcacgaaaagctgatcctgctggcccagctgaagcccgagaaggatagcgacgaagccgtgacatatagcctgggaaagtttgggcagagggccctggatttctacagcattcatgtgaccaaggagtccacccaccccgtgaagcccctggcccagatcgccggaaacagatacgcctccggacctgtgggaaaggccctgagcgacgcatgtatgggcacaatcgcctccttcctgtctaagtaccaggacatcatcatcgaacaccagaaggtggtgaagggcaaccagaagagactggagagcctgcgggagctggccggcaaggaaaacctggaataccctagcgtgaccctgccacctcagcctcacaccaaggagggcgttgatgcctacaacgaagtgatcgcccgggtgcgaatgtgggtgaacctgaacctgtggcagaagctgaagctaagcagagatgatgccaagcctctgctgagactgaagggattcccttcctttcctctggtcgagagacaggccaacgaagtggactggtgggacatggtgtgtaacgtgaagaagctgatcaacgagaaaaaggaggatggcaaggtgttttggcagaatctggctggctacaagagacaggaagccctgagaccatacctgagcagcgaggaagatcggaagaagggaaagaaattcgctcggtaccagctgggcgacctgctgctgcacctggaaaagaagcacggcgaggactggggaaaggtgtacgacgaggcctgggagcggattgacaagaaagtggaaggcctgagcaagcacatcaagctggaagaggaacggagaagcgaggacgcccagagcaaggccgccctgaccgactggctgcgggctaaggccagcttcgtgatcgagggcctgaaggaggccgacaaggacgagttctgcagatgcgagctgaagctgcagaagtggtacggggacctgcggggaaagcccttcgccatcgaagccgagaacagcatcctggacatcagcggcttcagcaagcagtacaactgtgccttcatctggcagaaggacggcgtgaagaagctgaacctgtacctgatcatcaactacttcaagggcggcaagctgcggttcaagaagatcaaacctgaagccttcgaagccaacagattctacaccgtgatcaacaaaaagagcggcgagatcgtgcccatggaggtgaacttcaacttcgacgaccccaacctgatcatcctgcctctggcctttggcaagagacagggcagagaattcatctggaacgacctgctgtccctggaaaccggcagcctgaagctggccaacggaagagtgatcgagaagacactgtacaacagaagaacccggcaggatgagcctgccctgttcgtggccctgaccttcgagcggcgggaggtcctggactcctccaatatcaaaccaatgaacctgatcggcgtggcaagaggcgaaaacatccccgccgtgatcgccctgaccgaccccgagggctgcccactgagccggtttaaggatagcctgggaaacccaacccacatcctgagaatcggcgagagctataaggagaagcagcggaccatccaggccaagaaggaggtggagcagcggagagccggcggctacagccggaagtacgccagcaaagccaagaatctggcagacgatatggtgagaaacaccgctagagatctgctgtactacgccgtgacccaggatgccatgctgatcttcgccaacctgagccggggcttcggccggcagggcaagcggaccttcatggccgagagacagtacacacggatggaggactggctgaccgccaagctggcctacgagggcctgagcaagacctacctgtccaagacactggcccagtacacctccaagacatgcagcaactgtgggtttaccatcaccagcgccgactacgacagggtgctggagaagctgaagaagacagcaacaggctggatgaccacaattaacggcaaggagctgaaggtggagggccagattacctactacaacagatacaagagacagaacgtagtcaaggacctgtccgtcgagctggatagactgagcgaagaatctgtgaacaacgacatctcctcctggacaaagggcagaagcggagaagctctgagcctcctgaagaaaagattctcccatagacccgtgcaggagaagttcgtgtgcctgaactgcggcttcgagacacacgcagccgagcaagccgccctgaacatcgccagatcctggctgttcctgcggagccaggagtacaagaaataccagacaaacaagacaaccggcaacaccgataagagagccttcgtcgagacctggcagtccttttaccggaagaagcttaaggaggtgtggaaacctgccgtgcggtctggcggatctggcggaggctccacaagcgagaagggccccctgaccttcagggacgtggccatcgagttcagcctggaggagtggcagtgcctggacaccgcccagcaggacctgtacaggagggtgatgctggagaactacaggaacctggtgttcctgggcatcgccgtgagcaaccccgacctgatcacctgcctggagcagggcaaggagccctggaacatgaagaggcacgccatggccgacgagccccccgtgatgtacagccacaccagccccaagaaaaagagaaaagtctaagctgccttctgcggggcttgccttctggccatgcccttcttctctcccttgcacctgtacctcttggtctttgaataaagcctgagtaggaaggctagcaaaaaaaaaaaaaaaaaaaaaaaaaaaaaaaaaaaaaaaaaaaaaaaaaaaaaaaaaaaaaaaaaaaaaaaaaaaaaaaa

SEQ ID NO: 6565 - RNA, 5797 nt, synthetic construct
  source 1..5797: mol_type = other RNA
aggaaataagagagaaaagaagagtaagaagaaatataagagccaccatggcccctaagaagaagcgtaaagtgagccggatggaacgcctcgtctacgaggtgcggcagaagtgcagaaacatcgaggacatctgcatctcctgcggatctctgaacgtgaccctggagcacccactgttcatcggcggcatgtgccagaactgtaaaaactgttttctggagtgtgcctatcaatacgacgatgacggctaccagagctactgcaccatctgttgcggcggaagagaggtgctgatgtgtggaaataacaactgctgccggtgcttctgcgtggaatgcgtggacctgctggtgggccccggcgccgcccaggccgctattaaggaagatccttggaactgctacatgtgcggccacaagggcacatacggcctgctgagacggagagaggactggcctagcagactgcagatgttcttcgccaataaccacgaccaggagttcgacccccctaaggtgtaccctcccgtccccgccgagaagagaaagcccatccgggtcctgagcctgttcgatggcatcgccaccggtctgctggtgctgaaggacctgggcatccaggtggataggtacattgcctccgaggtgtgcgaggactccatcaccgtgggaatggtgcgtcatcagggcaagatcatgtacgtgggcgacgtgcggagcgtgacacagaagcatatccaggagtggggccctttcgacctggtgatcggcggcagcccttgcaatgacctgagcatcgtgaacccagcccggaagggcctgtacgagggaaccggcagactgttcttcgagttttacagactgctgcacgacgcccggcctaaggaaggcgacgaccggcccttcttttggctgttcgagaatgtggtggccatgggagtcagcgacaagcgggatattagccggttcctggagagcaaccccgtgatgatcgatgccaaggaagtgagcgccgcccaccgggccagatacttctggggcaatctgcctggcatgaacagacccctggccagcaccgtgaacgacaagctggagctgcaggagtgcctggagcacggccggatcgccaagttcagcaaggtgagaaccatcaccacccgaagcaacagcatcaaacaaggcaaggaccagcactttcctgtgttcatgaacgagaaggaggacatcctgtggtgtaccgagatggagagagtgttcgggttcccagtccactacacagatgtcagcaacatgtctagactggccagacagagactgctgggaagaagctggtccgtccctgtgatcagacacctgttcgcccctctgaaggagtacttcgcctgcgtgagcagcggcaacagcaacgccaacagccggggccccagcttctctagcggcctggtgccactgtccctgagagggagccacatgggccccatggagatctacaaaaccgtgagcgcctggaagcggcagcctgtgcgcgtgctgagcctgtttcggaatatcgataaagtcctgaaaagcctgggattcctggagagcggctctggctccggcggtggcaccctgaagtacgtggaggatgtgacaaacgtggtcagacgggatgtggagaagtggggccccttcgatctggtgtacggcagcacccaacccctgggcagctcttgtgaccggtgccctggctggtacatgtttcagttccaccggatcctgcagtacgccctgccgagacaggagtcccagcggccattcttttggattttcatggacaacttgctgctgaccgaggatgaccaggaaactaccactcggttcctgcagaccgaagccgtgaccctgcaggacgtgagaggccgggactaccagaacgccatgcgggtgtggtccaacatccctggactgaaaagcaagcacgcacctctgacccctaaagaagaggagtacctgcaggcccaggtgcggagcagaagcaagctggacgcccctaaggtggatctgctggtgaagaattgcctcctgcccctgagagagtacttcaagtatttcagccagaatagtctgcccctgggcggcccaagcagcggcgcccctcctcccagcggcggcagcccagccggctccccaacctctaccgaggagggcacctctgagtccgccacccccgagagcggccctggcacctccaccgagcccagcgagggcagcgcacccggcagccctgccggcagccccacctccacagaggagggaaccagcaccgagcccagcgaaggcagcgccccaggcaccagcaccgagcctagtgagggcggctctggcggcggcagcgcccaggagattaaacggatcaacaagatcagaagaagacttgtgaaagacagcaacaccaagaaggccggcaagacaggccccatgaaaaccctgctggttagagtgatgacacccgatctgagagagcggctggaaaacctgagaaagaagcctgaaaatatcccccagcccatcagcaatacatctagagccaacctgaataagctgctgaccgattacaccgaaatgaagaaggcgatcctgcatgtgtactgggaagagttccagaaggaccctgtgggcctgatgagccgggtggcccagcctgccagcaagaagatcgatcagaacaagctgaaacctgagatggacgagaagggcaacctgaccaccgccggctttgcctgctctcagtgtggccagcccctgttcgtgtacaagctggagcaggtgtctgagaagggcaaggcttacaccaactacttcggacggtgcaatgtggccgagcacgaaaagctgatcctgctggcccagctgaagcccgagaaggatagcgacgaagccgtgacatatagcctgggaaagtttgggcagagggccctggatttctacagcattcatgtgaccaaggagtccacccaccccgtgaagcccctggcccagatcgccggaaacagatacgcctccggacctgtgggaaaggccctgagcgacgcatgtatgggcacaatcgcctccttcctgtctaagtaccaggacatcatcatcgaacaccagaaggtggtgaagggcaaccagaagagactggagagcctgcgggagctggccggcaaggaaaacctggaataccctagcgtgaccctgccacctcagcctcacaccaaggagggcgttgatgcctacaacgaagtgatcgcccgggtgcgaatgtgggtgaacctgaacctgtggcagaagctgaagctaagcagagatgatgccaagcctctgctgagactgaagggattcccttcctttcctctggtcgagagacaggccaacgaagtggactggtgggacatggtgtgtaacgtgaagaagctgatcaacgagaaaaaggaggatggcaaggtgttttggcagaatctggctggctacaagagacaggaagccctgagaccatacctgagcagcgaggaagatcggaagaagggaaagaaattcgctcggtaccagctgggcgacctgctgctgcacctggaaaagaagcacggcgaggactggggaaaggtgtacgacgaggcctgggagcggattgacaagaaagtggaaggcctgagcaagcacatcaagctggaagaggaacggagaagcgaggacgcccagagcaaggccgccctgaccgactggctgcgggctaaggccagcttcgtgatcgagggcctgaaggaggccgacaaggacgagttctgcagatgcgagctgaagctgcagaagtggtacggggacctgcggggaaagcccttcgccatcgaagccgagaacagcatcctggacatcagcggcttcagcaagcagtacaactgtgccttcatctggcagaaggacggcgtgaagaagctgaacctgtacctgatcatcaactacttcaagggcggcaagctgcggttcaagaagatcaaacctgaagccttcgaagccaacagattctacaccgtgatcaacaaaaagagcggcgagatcgtgcccatggaggtgaacttcaacttcgacgaccccaacctgatcatcctgcctctggcctttggcaagagacagggcagagaattcatctggaacgacctgctgtccctggaaaccggcagcctgaagctggccaacggaagagtgatcgagaagacactgtacaacagaagaacccggcaggatgagcctgccctgttcgtggccctgaccttcgagcggcgggaggtcctggactcctccaatatcaaaccaatgaacctgatcggcgtggcaagaggcgaaaacatccccgccgtgatcgccctgaccgaccccgagggctgcccactgagccggtttaaggatagcctgggaaacccaacccacatcctgagaatcggcgagagctataaggagaagcagcggaccatccaggccaagaaggaggtggagcagcggagagccggcggctacagccggaagtacgccagcaaagccaagaatctggcagacgatatggtgagaaacaccgctagagatctgctgtactacgccgtgacccaggatgccatgctgatcttcgccaacctgagccggggcttcggccggcagggcaagcggaccttcatggccgagagacagtacacacggatggaggactggctgaccgccaagctggcctacgagggcctgagcaagacctacctgtccaagacactggcccagtacacctccaagacatgcagcaactgtgggtttaccatcaccagcgccgactacgacagggtgctggagaagctgaagaagacagcaacaggctggatgaccacaattaacggcaaggagctgaaggtggagggccagattacctactacaacagatacaagagacagaacgtagtcaaggacctgtccgtcgagctggatagactgagcgaagaatctgtgaacaacgacatctcctcctggacaaagggcagaagcggagaagctctgagcctcctgaagaaaagattctcccatagacccgtgcaggagaagttcgtgtgcctgaactgcggcttcgagacacacgcagccgagcaagccgccctgaacatcgccagatcctggctgttcctgcggagccaggagtacaagaaataccagacaaacaagacaaccggcaacaccgataagagagccttcgtcgagacctggcagtccttttaccggaagaagcttaaggaggtgtggaaacctgccgtgcggtctggcggatctggcggaggctccacaagcctgagcacccagctgaccgtggaggacgtggacatcaagttcacccccgaggagtgggagtgcctggaccccgcccagaggaccctgtacagggacgtgatggaggagacctacaggaacctgctgagcgtgggcatcggccccaggctgcccgactgcagcagctgcatccacatgaccaagaagctgcaggccaaggagaacagcggcaagggcgagatcctgcagagggtgatgtgcggcaccagccccaagaaaaagagaaaagtctaagctgccttctgcggggcttgccttctggccatgcccttcttctctcccttgcacctgtacctcttggtctttgaataaagcctgagtaggaaggctagcaaaaaaaaaaaaaaaaaaaaaaaaaaaaaaaaaaaaaaaaaaaaaaaaaaaaaaaaaaaaaaaaaaaaaaaaaaaaaaaa

SEQ ID NO: 6566 - RNA, 5797 nt, synthetic construct
  source 1..5797: mol_type = other RNA
aggaaataagagagaaaagaagagtaagaagaaatataagagccaccatggcccctaagaagaagcgtaaagtgagccggatggaacgcctcgtctacgaggtgcggcagaagtgcagaaacatcgaggacatctgcatctcctgcggatctctgaacgtgaccctggagcacccactgttcatcggcggcatgtgccagaactgtaaaaactgttttctggagtgtgcctatcaatacgacgatgacggctaccagagctactgcaccatctgttgcggcggaagagaggtgctgatgtgtggaaataacaactgctgccggtgcttctgcgtggaatgcgtggacctgctggtgggccccggcgccgcccaggccgctattaaggaagatccttggaactgctacatgtgcggccacaagggcacatacggcctgctgagacggagagaggactggcctagcagactgcagatgttcttcgccaataaccacgaccaggagttcgacccccctaaggtgtaccctcccgtccccgccgagaagagaaagcccatccgggtcctgagcctgttcgatggcatcgccaccggtctgctggtgctgaaggacctgggcatccaggtggataggtacattgcctccgaggtgtgcgaggactccatcaccgtgggaatggtgcgtcatcagggcaagatcatgtacgtgggcgacgtgcggagcgtgacacagaagcatatccaggagtggggccctttcgacctggtgatcggcggcagcccttgcaatgacctgagcatcgtgaacccagcccggaagggcctgtacgagggaaccggcagactgttcttcgagttttacagactgctgcacgacgcccggcctaaggaaggcgacgaccggcccttcttttggctgttcgagaatgtggtggccatgggagtcagcgacaagcgggatattagccggttcctggagagcaaccccgtgatgatcgatgccaaggaagtgagcgccgcccaccgggccagatacttctggggcaatctgcctggcatgaacagacccctggccagcaccgtgaacgacaagctggagctgcaggagtgcctggagcacggccggatcgccaagttcagcaaggtgagaaccatcaccacccgaagcaacagcatcaaacaaggcaaggaccagcactttcctgtgttcatgaacgagaaggaggacatcctgtggtgtaccgagatggagagagtgttcgggttcccagtccactacacagatgtcagcaacatgtctagactggccagacagagactgctgggaagaagctggtccgtccctgtgatcagacacctgttcgcccctctgaaggagtacttcgcctgcgtgagcagcggcaacagcaacgccaacagccggggccccagcttctctagcggcctggtgccactgtccctgagagggagccacatgggccccatggagatctacaaaaccgtgagcgcctggaagcggcagcctgtgcgcgtgctgagcctgtttcggaatatcgataaagtcctgaaaagcctgggattcctggagagcggctctggctccggcggtggcaccctgaagtacgtggaggatgtgacaaacgtggtcagacgggatgtggagaagtggggccccttcgatctggtgtacggcagcacccaacccctgggcagctcttgtgaccggtgccctggctggtacatgtttcagttccaccggatcctgcagtacgccctgccgagacaggagtcccagcggccattcttttggattttcatggacaacttgctgctgaccgaggatgaccaggaaactaccactcggttcctgcagaccgaagccgtgaccctgcaggacgtgagaggccgggactaccagaacgccatgcgggtgtggtccaacatccctggactgaaaagcaagcacgcacctctgacccctaaagaagaggagtacctgcaggcccaggtgcggagcagaagcaagctggacgcccctaaggtggatctgctggtgaagaattgcctcctgcccctgagagagtacttcaagtatttcagccagaatagtctgcccctgggcggcccaagcagcggcgcccctcctcccagcggcggcagcccagccggctccccaacctctaccgaggagggcacctctgagtccgccacccccgagagcggccctggcacctccaccgagcccagcgagggcagcgcacccggcagccctgccggcagccccacctccacagaggagggaaccagcaccgagcccagcgaaggcagcgccccaggcaccagcaccgagcctagtgagggcggctctggcggcggcagcgcccaggagattaaacggatcaacaagatcagaagaagacttgtgaaagacagcaacaccaagaaggccggcaagacaggccccatgaaaaccctgctggttagagtgatgacacccgatctgagagagcggctggaaaacctgagaaagaagcctgaaaatatcccccagcccatcagcaatacatctagagccaacctgaataagctgctgaccgattacaccgaaatgaagaaggcgatcctgcatgtgtactgggaagagttccagaaggaccctgtgggcctgatgagccgggtggcccagcctgccagcaagaagatcgatcagaacaagctgaaacctgagatggacgagaagggcaacctgaccaccgccggctttgcctgctctcagtgtggccagcccctgttcgtgtacaagctggagcaggtgtctgagaagggcaaggcttacaccaactacttcggacggtgcaatgtggccgagcacgaaaagctgatcctgctggcccagctgaagcccgagaaggatagcgacgaagccgtgacatatagcctgggaaagtttgggcagagggccctggatttctacagcattcatgtgaccaaggagtccacccaccccgtgaagcccctggcccagatcgccggaaacagatacgcctccggacctgtgggaaaggccctgagcgacgcatgtatgggcacaatcgcctccttcctgtctaagtaccaggacatcatcatcgaacaccagaaggtggtgaagggcaaccagaagagactggagagcctgcgggagctggccggcaaggaaaacctggaataccctagcgtgaccctgccacctcagcctcacaccaaggagggcgttgatgcctacaacgaagtgatcgcccgggtgcgaatgtgggtgaacctgaacctgtggcagaagctgaagctaagcagagatgatgccaagcctctgctgagactgaagggattcccttcctttcctctggtcgagagacaggccaacgaagtggactggtgggacatggtgtgtaacgtgaagaagctgatcaacgagaaaaaggaggatggcaaggtgttttggcagaatctggctggctacaagagacaggaagccctgagaccatacctgagcagcgaggaagatcggaagaagggaaagaaattcgctcggtaccagctgggcgacctgctgctgcacctggaaaagaagcacggcgaggactggggaaaggtgtacgacgaggcctgggagcggattgacaagaaagtggaaggcctgagcaagcacatcaagctggaagaggaacggagaagcgaggacgcccagagcaaggccgccctgaccgactggctgcgggctaaggccagcttcgtgatcgagggcctgaaggaggccgacaaggacgagttctgcagatgcgagctgaagctgcagaagtggtacggggacctgcggggaaagcccttcgccatcgaagccgagaacagcatcctggacatcagcggcttcagcaagcagtacaactgtgccttcatctggcagaaggacggcgtgaagaagctgaacctgtacctgatcatcaactacttcaagggcggcaagctgcggttcaagaagatcaaacctgaagccttcgaagccaacagattctacaccgtgatcaacaaaaagagcggcgagatcgtgcccatggaggtgaacttcaacttcgacgaccccaacctgatcatcctgcctctggcctttggcaagagacagggcagagaattcatctggaacgacctgctgtccctggaaaccggcagcctgaagctggccaacggaagagtgatcgagaagacactgtacaacagaagaacccggcaggatgagcctgccctgttcgtggccctgaccttcgagcggcgggaggtcctggactcctccaatatcaaaccaatgaacctgatcggcgtggcaagaggcgaaaacatccccgccgtgatcgccctgaccgaccccgagggctgcccactgagccggtttaaggatagcctgggaaacccaacccacatcctgagaatcggcgagagctataaggagaagcagcggaccatccaggccaagaaggaggtggagcagcggagagccggcggctacagccggaagtacgccagcaaagccaagaatctggcagacgatatggtgagaaacaccgctagagatctgctgtactacgccgtgacccaggatgccatgctgatcttcgccaacctgagccggggcttcggccggcagggcaagcggaccttcatggccgagagacagtacacacggatggaggactggctgaccgccaagctggcctacgagggcctgagcaagacctacctgtccaagacactggcccagtacacctccaagacatgcagcaactgtgggtttaccatcaccagcgccgactacgacagggtgctggagaagctgaagaagacagcaacaggctggatgaccacaattaacggcaaggagctgaaggtggagggccagattacctactacaacagatacaagagacagaacgtagtcaaggacctgtccgtcgagctggatagactgagcgaagaatctgtgaacaacgacatctcctcctggacaaagggcagaagcggagaagctctgagcctcctgaagaaaagattctcccatagacccgtgcaggagaagttcgtgtgcctgaactgcggcttcgagacacacgcagccgagcaagccgccctgaacatcgccagatcctggctgttcctgcggagccaggagtacaagaaataccagacaaacaagacaaccggcaacaccgataagagagccttcgtcgagacctggcagtccttttaccggaagaagcttaaggaggtgtggaaacctgccgtgcggtctggcggatctggcggaggctccacaagcgcccaggaggtggtgaccttccaggacgtggccgtggacttcaccagggaggagtggaggctgctgagccccccccagaaggagctgtacaaggaggtgatgctggagaacgccaggaacctgctgagcgtgggcctgcccgccccccccgacgacgtggtgagctacctggagcagagggagggccccagcatgctggaccaggaggacctgaggacctgcggccccgagggcgagatcaggaccagccccaagaaaaagagaaaagtctaagctgccttctgcggggcttgccttctggccatgcccttcttctctcccttgcacctgtacctcttggtctttgaataaagcctgagtaggaaggctagcaaaaaaaaaaaaaaaaaaaaaaaaaaaaaaaaaaaaaaaaaaaaaaaaaaaaaaaaaaaaaaaaaaaaaaaaaaaaaaaa

SEQ ID NO: 6567 - RNA, 5797 nt, synthetic construct
  source 1..5797: mol_type = other RNA
aggaaataagagagaaaagaagagtaagaagaaatataagagccaccatggcccctaagaagaagcgtaaagtgagccggatggaacgcctcgtctacgaggtgcggcagaagtgcagaaacatcgaggacatctgcatctcctgcggatctctgaacgtgaccctggagcacccactgttcatcggcggcatgtgccagaactgtaaaaactgttttctggagtgtgcctatcaatacgacgatgacggctaccagagctactgcaccatctgttgcggcggaagagaggtgctgatgtgtggaaataacaactgctgccggtgcttctgcgtggaatgcgtggacctgctggtgggccccggcgccgcccaggccgctattaaggaagatccttggaactgctacatgtgcggccacaagggcacatacggcctgctgagacggagagaggactggcctagcagactgcagatgttcttcgccaataaccacgaccaggagttcgacccccctaaggtgtaccctcccgtccccgccgagaagagaaagcccatccgggtcctgagcctgttcgatggcatcgccaccggtctgctggtgctgaaggacctgggcatccaggtggataggtacattgcctccgaggtgtgcgaggactccatcaccgtgggaatggtgcgtcatcagggcaagatcatgtacgtgggcgacgtgcggagcgtgacacagaagcatatccaggagtggggccctttcgacctggtgatcggcggcagcccttgcaatgacctgagcatcgtgaacccagcccggaagggcctgtacgagggaaccggcagactgttcttcgagttttacagactgctgcacgacgcccggcctaaggaaggcgacgaccggcccttcttttggctgttcgagaatgtggtggccatgggagtcagcgacaagcgggatattagccggttcctggagagcaaccccgtgatgatcgatgccaaggaagtgagcgccgcccaccgggccagatacttctggggcaatctgcctggcatgaacagacccctggccagcaccgtgaacgacaagctggagctgcaggagtgcctggagcacggccggatcgccaagttcagcaaggtgagaaccatcaccacccgaagcaacagcatcaaacaaggcaaggaccagcactttcctgtgttcatgaacgagaaggaggacatcctgtggtgtaccgagatggagagagtgttcgggttcccagtccactacacagatgtcagcaacatgtctagactggccagacagagactgctgggaagaagctggtccgtccctgtgatcagacacctgttcgcccctctgaaggagtacttcgcctgcgtgagcagcggcaacagcaacgccaacagccggggccccagcttctctagcggcctggtgccactgtccctgagagggagccacatgggccccatggagatctacaaaaccgtgagcgcctggaagcggcagcctgtgcgcgtgctgagcctgtttcggaatatcgataaagtcctgaaaagcctgggattcctggagagcggctctggctccggcggtggcaccctgaagtacgtggaggatgtgacaaacgtggtcagacgggatgtggagaagtggggccccttcgatctggtgtacggcagcacccaacccctgggcagctcttgtgaccggtgccctggctggtacatgtttcagttccaccggatcctgcagtacgccctgccgagacaggagtcccagcggccattcttttggattttcatggacaacttgctgctgaccgaggatgaccaggaaactaccactcggttcctgcagaccgaagccgtgaccctgcaggacgtgagaggccgggactaccagaacgccatgcgggtgtggtccaacatccctggactgaaaagcaagcacgcacctctgacccctaaagaagaggagtacctgcaggcccaggtgcggagcagaagcaagctggacgcccctaaggtggatctgctggtgaagaattgcctcctgcccctgagagagtacttcaagtatttcagccagaatagtctgcccctgggcggcccaagcagcggcgcccctcctcccagcggcggcagcccagccggctccccaacctctaccgaggagggcacctctgagtccgccacccccgagagcggccctggcacctccaccgagcccagcgagggcagcgcacccggcagccctgccggcagccccacctccacagaggagggaaccagcaccgagcccagcgaaggcagcgccccaggcaccagcaccgagcctagtgagggcggctctggcggcggcagcgcccaggagattaaacggatcaacaagatcagaagaagacttgtgaaagacagcaacaccaagaaggccggcaagacaggccccatgaaaaccctgctggttagagtgatgacacccgatctgagagagcggctggaaaacctgagaaagaagcctgaaaatatcccccagcccatcagcaatacatctagagccaacctgaataagctgctgaccgattacaccgaaatgaagaaggcgatcctgcatgtgtactgggaagagttccagaaggaccctgtgggcctgatgagccgggtggcccagcctgccagcaagaagatcgatcagaacaagctgaaacctgagatggacgagaagggcaacctgaccaccgccggctttgcctgctctcagtgtggccagcccctgttcgtgtacaagctggagcaggtgtctgagaagggcaaggcttacaccaactacttcggacggtgcaatgtggccgagcacgaaaagctgatcctgctggcccagctgaagcccgagaaggatagcgacgaagccgtgacatatagcctgggaaagtttgggcagagggccctggatttctacagcattcatgtgaccaaggagtccacccaccccgtgaagcccctggcccagatcgccggaaacagatacgcctccggacctgtgggaaaggccctgagcgacgcatgtatgggcacaatcgcctccttcctgtctaagtaccaggacatcatcatcgaacaccagaaggtggtgaagggcaaccagaagagactggagagcctgcgggagctggccggcaaggaaaacctggaataccctagcgtgaccctgccacctcagcctcacaccaaggagggcgttgatgcctacaacgaagtgatcgcccgggtgcgaatgtgggtgaacctgaacctgtggcagaagctgaagctaagcagagatgatgccaagcctctgctgagactgaagggattcccttcctttcctctggtcgagagacaggccaacgaagtggactggtgggacatggtgtgtaacgtgaagaagctgatcaacgagaaaaaggaggatggcaaggtgttttggcagaatctggctggctacaagagacaggaagccctgagaccatacctgagcagcgaggaagatcggaagaagggaaagaaattcgctcggtaccagctgggcgacctgctgctgcacctggaaaagaagcacggcgaggactggggaaaggtgtacgacgaggcctgggagcggattgacaagaaagtggaaggcctgagcaagcacatcaagctggaagaggaacggagaagcgaggacgcccagagcaaggccgccctgaccgactggctgcgggctaaggccagcttcgtgatcgagggcctgaaggaggccgacaaggacgagttctgcagatgcgagctgaagctgcagaagtggtacggggacctgcggggaaagcccttcgccatcgaagccgagaacagcatcctggacatcagcggcttcagcaagcagtacaactgtgccttcatctggcagaaggacggcgtgaagaagctgaacctgtacctgatcatcaactacttcaagggcggcaagctgcggttcaagaagatcaaacctgaagccttcgaagccaacagattctacaccgtgatcaacaaaaagagcggcgagatcgtgcccatggaggtgaacttcaacttcgacgaccccaacctgatcatcctgcctctggcctttggcaagagacagggcagagaattcatctggaacgacctgctgtccctggaaaccggcagcctgaagctggccaacggaagagtgatcgagaagacactgtacaacagaagaacccggcaggatgagcctgccctgttcgtggccctgaccttcgagcggcgggaggtcctggactcctccaatatcaaaccaatgaacctgatcggcgtggcaagaggcgaaaacatccccgccgtgatcgccctgaccgaccccgagggctgcccactgagccggtttaaggatagcctgggaaacccaacccacatcctgagaatcggcgagagctataaggagaagcagcggaccatccaggccaagaaggaggtggagcagcggagagccggcggctacagccggaagtacgccagcaaagccaagaatctggcagacgatatggtgagaaacaccgctagagatctgctgtactacgccgtgacccaggatgccatgctgatcttcgccaacctgagccggggcttcggccggcagggcaagcggaccttcatggccgagagacagtacacacggatggaggactggctgaccgccaagctggcctacgagggcctgagcaagacctacctgtccaagacactggcccagtacacctccaagacatgcagcaactgtgggtttaccatcaccagcgccgactacgacagggtgctggagaagctgaagaagacagcaacaggctggatgaccacaattaacggcaaggagctgaaggtggagggccagattacctactacaacagatacaagagacagaacgtagtcaaggacctgtccgtcgagctggatagactgagcgaagaatctgtgaacaacgacatctcctcctggacaaagggcagaagcggagaagctctgagcctcctgaagaaaagattctcccatagacccgtgcaggagaagttcgtgtgcctgaactgcggcttcgagacacacgcagccgagcaagccgccctgaacatcgccagatcctggctgttcctgcggagccaggagtacaagaaataccagacaaacaagacaaccggcaacaccgataagagagccttcgtcgagacctggcagtccttttaccggaagaagcttaaggaggtgtggaaacctgccgtgcggtctggcggatctggcggaggctccacaagcttccaggaggccgtgaccttcaaggacgtggccgtggtgttcagcgaggaggagctgggcctgctgggccccgcccagaggaagctgtacagggacgtgatgctggagaacttcaggaacctggtgagcgtgggccacagcagcagcaagcccgacgtgatcagccagctggagagggaggagaagctgtgcaccaaggagttccacacccagggcggcggcaggaaccagaaggagatggagaccagccccaagaaaaagagaaaagtctaagctgccttctgcggggcttgccttctggccatgcccttcttctctcccttgcacctgtacctcttggtctttgaataaagcctgagtaggaaggctagcaaaaaaaaaaaaaaaaaaaaaaaaaaaaaaaaaaaaaaaaaaaaaaaaaaaaaaaaaaaaaaaaaaaaaaaaaaaaaaaa

SEQ ID NO: 6568 - RNA, 5797 nt, synthetic construct
  source 1..5797: mol_type = other RNA
aggaaataagagagaaaagaagagtaagaagaaatataagagccaccatggcccctaagaagaagcgtaaagtgagccggatggaacgcctcgtctacgaggtgcggcagaagtgcagaaacatcgaggacatctgcatctcctgcggatctctgaacgtgaccctggagcacccactgttcatcggcggcatgtgccagaactgtaaaaactgttttctggagtgtgcctatcaatacgacgatgacggctaccagagctactgcaccatctgttgcggcggaagagaggtgctgatgtgtggaaataacaactgctgccggtgcttctgcgtggaatgcgtggacctgctggtgggccccggcgccgcccaggccgctattaaggaagatccttggaactgctacatgtgcggccacaagggcacatacggcctgctgagacggagagaggactggcctagcagactgcagatgttcttcgccaataaccacgaccaggagttcgacccccctaaggtgtaccctcccgtccccgccgagaagagaaagcccatccgggtcctgagcctgttcgatggcatcgccaccggtctgctggtgctgaaggacctgggcatccaggtggataggtacattgcctccgaggtgtgcgaggactccatcaccgtgggaatggtgcgtcatcagggcaagatcatgtacgtgggcgacgtgcggagcgtgacacagaagcatatccaggagtggggccctttcgacctggtgatcggcggcagcccttgcaatgacctgagcatcgtgaacccagcccggaagggcctgtacgagggaaccggcagactgttcttcgagttttacagactgctgcacgacgcccggcctaaggaaggcgacgaccggcccttcttttggctgttcgagaatgtggtggccatgggagtcagcgacaagcgggatattagccggttcctggagagcaaccccgtgatgatcgatgccaaggaagtgagcgccgcccaccgggccagatacttctggggcaatctgcctggcatgaacagacccctggccagcaccgtgaacgacaagctggagctgcaggagtgcctggagcacggccggatcgccaagttcagcaaggtgagaaccatcaccacccgaagcaacagcatcaaacaaggcaaggaccagcactttcctgtgttcatgaacgagaaggaggacatcctgtggtgtaccgagatggagagagtgttcgggttcccagtccactacacagatgtcagcaacatgtctagactggccagacagagactgctgggaagaagctggtccgtccctgtgatcagacacctgttcgcccctctgaaggagtacttcgcctgcgtgagcagcggcaacagcaacgccaacagccggggccccagcttctctagcggcctggtgccactgtccctgagagggagccacatgggccccatggagatctacaaaaccgtgagcgcctggaagcggcagcctgtgcgcgtgctgagcctgtttcggaatatcgataaagtcctgaaaagcctgggattcctggagagcggctctggctccggcggtggcaccctgaagtacgtggaggatgtgacaaacgtggtcagacgggatgtggagaagtggggccccttcgatctggtgtacggcagcacccaacccctgggcagctcttgtgaccggtgccctggctggtacatgtttcagttccaccggatcctgcagtacgccctgccgagacaggagtcccagcggccattcttttggattttcatggacaacttgctgctgaccgaggatgaccaggaaactaccactcggttcctgcagaccgaagccgtgaccctgcaggacgtgagaggccgggactaccagaacgccatgcgggtgtggtccaacatccctggactgaaaagcaagcacgcacctctgacccctaaagaagaggagtacctgcaggcccaggtgcggagcagaagcaagctggacgcccctaaggtggatctgctggtgaagaattgcctcctgcccctgagagagtacttcaagtatttcagccagaatagtctgcccctgggcggcccaagcagcggcgcccctcctcccagcggcggcagcccagccggctccccaacctctaccgaggagggcacctctgagtccgccacccccgagagcggccctggcacctccaccgagcccagcgagggcagcgcacccggcagccctgccggcagccccacctccacagaggagggaaccagcaccgagcccagcgaaggcagcgccccaggcaccagcaccgagcctagtgagggcggctctggcggcggcagcgcccaggagattaaacggatcaacaagatcagaagaagacttgtgaaagacagcaacaccaagaaggccggcaagacaggccccatgaaaaccctgctggttagagtgatgacacccgatctgagagagcggctggaaaacctgagaaagaagcctgaaaatatcccccagcccatcagcaatacatctagagccaacctgaataagctgctgaccgattacaccgaaatgaagaaggcgatcctgcatgtgtactgggaagagttccagaaggaccctgtgggcctgatgagccgggtggcccagcctgccagcaagaagatcgatcagaacaagctgaaacctgagatggacgagaagggcaacctgaccaccgccggctttgcctgctctcagtgtggccagcccctgttcgtgtacaagctggagcaggtgtctgagaagggcaaggcttacaccaactacttcggacggtgcaatgtggccgagcacgaaaagctgatcctgctggcccagctgaagcccgagaaggatagcgacgaagccgtgacatatagcctgggaaagtttgggcagagggccctggatttctacagcattcatgtgaccaaggagtccacccaccccgtgaagcccctggcccagatcgccggaaacagatacgcctccggacctgtgggaaaggccctgagcgacgcatgtatgggcacaatcgcctccttcctgtctaagtaccaggacatcatcatcgaacaccagaaggtggtgaagggcaaccagaagagactggagagcctgcgggagctggccggcaaggaaaacctggaataccctagcgtgaccctgccacctcagcctcacaccaaggagggcgttgatgcctacaacgaagtgatcgcccgggtgcgaatgtgggtgaacctgaacctgtggcagaagctgaagctaagcagagatgatgccaagcctctgctgagactgaagggattcccttcctttcctctggtcgagagacaggccaacgaagtggactggtgggacatggtgtgtaacgtgaagaagctgatcaacgagaaaaaggaggatggcaaggtgttttggcagaatctggctggctacaagagacaggaagccctgagaccatacctgagcagcgaggaagatcggaagaagggaaagaaattcgctcggtaccagctgggcgacctgctgctgcacctggaaaagaagcacggcgaggactggggaaaggtgtacgacgaggcctgggagcggattgacaagaaagtggaaggcctgagcaagcacatcaagctggaagaggaacggagaagcgaggacgcccagagcaaggccgccctgaccgactggctgcgggctaaggccagcttcgtgatcgagggcctgaaggaggccgacaaggacgagttctgcagatgcgagctgaagctgcagaagtggtacggggacctgcggggaaagcccttcgccatcgaagccgagaacagcatcctggacatcagcggcttcagcaagcagtacaactgtgccttcatctggcagaaggacggcgtgaagaagctgaacctgtacctgatcatcaactacttcaagggcggcaagctgcggttcaagaagatcaaacctgaagccttcgaagccaacagattctacaccgtgatcaacaaaaagagcggcgagatcgtgcccatggaggtgaacttcaacttcgacgaccccaacctgatcatcctgcctctggcctttggcaagagacagggcagagaattcatctggaacgacctgctgtccctggaaaccggcagcctgaagctggccaacggaagagtgatcgagaagacactgtacaacagaagaacccggcaggatgagcctgccctgttcgtggccctgaccttcgagcggcgggaggtcctggactcctccaatatcaaaccaatgaacctgatcggcgtggcaagaggcgaaaacatccccgccgtgatcgccctgaccgaccccgagggctgcccactgagccggtttaaggatagcctgggaaacccaacccacatcctgagaatcggcgagagctataaggagaagcagcggaccatccaggccaagaaggaggtggagcagcggagagccggcggctacagccggaagtacgccagcaaagccaagaatctggcagacgatatggtgagaaacaccgctagagatctgctgtactacgccgtgacccaggatgccatgctgatcttcgccaacctgagccggggcttcggccggcagggcaagcggaccttcatggccgagagacagtacacacggatggaggactggctgaccgccaagctggcctacgagggcctgagcaagacctacctgtccaagacactggcccagtacacctccaagacatgcagcaactgtgggtttaccatcaccagcgccgactacgacagggtgctggagaagctgaagaagacagcaacaggctggatgaccacaattaacggcaaggagctgaaggtggagggccagattacctactacaacagatacaagagacagaacgtagtcaaggacctgtccgtcgagctggatagactgagcgaagaatctgtgaacaacgacatctcctcctggacaaagggcagaagcggagaagctctgagcctcctgaagaaaagattctcccatagacccgtgcaggagaagttcgtgtgcctgaactgcggcttcgagacacacgcagccgagcaagccgccctgaacatcgccagatcctggctgttcctgcggagccaggagtacaagaaataccagacaaacaagacaaccggcaacaccgataagagagccttcgtcgagacctggcagtccttttaccggaagaagcttaaggaggtgtggaaacctgccgtgcggtctggcggatctggcggaggctccacaagcatgatcaagttccagatggtgaccttcaaggacgtggccgtggtgttcaccgaggaggagctgggcctgctggacagcgtgcagaggaagctgtacagggacgtgatgctggagaacttcaggaacctgctgctggtggcccaccagcccttcaagcccgacctgatcagccagctggagagggaggagaagctgctgatggtggagaccgagacccccggcgacggctgcagcggcaggaagaccagccccaagaaaaagagaaaagtctaagctgccttctgcggggcttgccttctggccatgcccttcttctctcccttgcacctgtacctcttggtctttgaataaagcctgagtaggaaggctagcaaaaaaaaaaaaaaaaaaaaaaaaaaaaaaaaaaaaaaaaaaaaaaaaaaaaaaaaaaaaaaaaaaaaaaaaaaaaaaaa

SEQ ID NO: 6569 - RNA, 5797 nt, synthetic construct
  source 1..5797: mol_type = other RNA
aggaaataagagagaaaagaagagtaagaagaaatataagagccaccatggcccctaagaagaagcgtaaagtgagccggatggaacgcctcgtctacgaggtgcggcagaagtgcagaaacatcgaggacatctgcatctcctgcggatctctgaacgtgaccctggagcacccactgttcatcggcggcatgtgccagaactgtaaaaactgttttctggagtgtgcctatcaatacgacgatgacggctaccagagctactgcaccatctgttgcggcggaagagaggtgctgatgtgtggaaataacaactgctgccggtgcttctgcgtggaatgcgtggacctgctggtgggccccggcgccgcccaggccgctattaaggaagatccttggaactgctacatgtgcggccacaagggcacatacggcctgctgagacggagagaggactggcctagcagactgcagatgttcttcgccaataaccacgaccaggagttcgacccccctaaggtgtaccctcccgtccccgccgagaagagaaagcccatccgggtcctgagcctgttcgatggcatcgccaccggtctgctggtgctgaaggacctgggcatccaggtggataggtacattgcctccgaggtgtgcgaggactccatcaccgtgggaatggtgcgtcatcagggcaagatcatgtacgtgggcgacgtgcggagcgtgacacagaagcatatccaggagtggggccctttcgacctggtgatcggcggcagcccttgcaatgacctgagcatcgtgaacccagcccggaagggcctgtacgagggaaccggcagactgttcttcgagttttacagactgctgcacgacgcccggcctaaggaaggcgacgaccggcccttcttttggctgttcgagaatgtggtggccatgggagtcagcgacaagcgggatattagccggttcctggagagcaaccccgtgatgatcgatgccaaggaagtgagcgccgcccaccgggccagatacttctggggcaatctgcctggcatgaacagacccctggccagcaccgtgaacgacaagctggagctgcaggagtgcctggagcacggccggatcgccaagttcagcaaggtgagaaccatcaccacccgaagcaacagcatcaaacaaggcaaggaccagcactttcctgtgttcatgaacgagaaggaggacatcctgtggtgtaccgagatggagagagtgttcgggttcccagtccactacacagatgtcagcaacatgtctagactggccagacagagactgctgggaagaagctggtccgtccctgtgatcagacacctgttcgcccctctgaaggagtacttcgcctgcgtgagcagcggcaacagcaacgccaacagccggggccccagcttctctagcggcctggtgccactgtccctgagagggagccacatgggccccatggagatctacaaaaccgtgagcgcctggaagcggcagcctgtgcgcgtgctgagcctgtttcggaatatcgataaagtcctgaaaagcctgggattcctggagagcggctctggctccggcggtggcaccctgaagtacgtggaggatgtgacaaacgtggtcagacgggatgtggagaagtggggccccttcgatctggtgtacggcagcacccaacccctgggcagctcttgtgaccggtgccctggctggtacatgtttcagttccaccggatcctgcagtacgccctgccgagacaggagtcccagcggccattcttttggattttcatggacaacttgctgctgaccgaggatgaccaggaaactaccactcggttcctgcagaccgaagccgtgaccctgcaggacgtgagaggccgggactaccagaacgccatgcgggtgtggtccaacatccctggactgaaaagcaagcacgcacctctgacccctaaagaagaggagtacctgcaggcccaggtgcggagcagaagcaagctggacgcccctaaggtggatctgctggtgaagaattgcctcctgcccctgagagagtacttcaagtatttcagccagaatagtctgcccctgggcggcccaagcagcggcgcccctcctcccagcggcggcagcccagccggctccccaacctctaccgaggagggcacctctgagtccgccacccccgagagcggccctggcacctccaccgagcccagcgagggcagcgcacccggcagccctgccggcagccccacctccacagaggagggaaccagcaccgagcccagcgaaggcagcgccccaggcaccagcaccgagcctagtgagggcggctctggcggcggcagcgcccaggagattaaacggatcaacaagatcagaagaagacttgtgaaagacagcaacaccaagaaggccggcaagacaggccccatgaaaaccctgctggttagagtgatgacacccgatctgagagagcggctggaaaacctgagaaagaagcctgaaaatatcccccagcccatcagcaatacatctagagccaacctgaataagctgctgaccgattacaccgaaatgaagaaggcgatcctgcatgtgtactgggaagagttccagaaggaccctgtgggcctgatgagccgggtggcccagcctgccagcaagaagatcgatcagaacaagctgaaacctgagatggacgagaagggcaacctgaccaccgccggctttgcctgctctcagtgtggccagcccctgttcgtgtacaagctggagcaggtgtctgagaagggcaaggcttacaccaactacttcggacggtgcaatgtggccgagcacgaaaagctgatcctgctggcccagctgaagcccgagaaggatagcgacgaagccgtgacatatagcctgggaaagtttgggcagagggccctggatttctacagcattcatgtgaccaaggagtccacccaccccgtgaagcccctggcccagatcgccggaaacagatacgcctccggacctgtgggaaaggccctgagcgacgcatgtatgggcacaatcgcctccttcctgtctaagtaccaggacatcatcatcgaacaccagaaggtggtgaagggcaaccagaagagactggagagcctgcgggagctggccggcaaggaaaacctggaataccctagcgtgaccctgccacctcagcctcacaccaaggagggcgttgatgcctacaacgaagtgatcgcccgggtgcgaatgtgggtgaacctgaacctgtggcagaagctgaagctaagcagagatgatgccaagcctctgctgagactgaagggattcccttcctttcctctggtcgagagacaggccaacgaagtggactggtgggacatggtgtgtaacgtgaagaagctgatcaacgagaaaaaggaggatggcaaggtgttttggcagaatctggctggctacaagagacaggaagccctgagaccatacctgagcagcgaggaagatcggaagaagggaaagaaattcgctcggtaccagctgggcgacctgctgctgcacctggaaaagaagcacggcgaggactggggaaaggtgtacgacgaggcctgggagcggattgacaagaaagtggaaggcctgagcaagcacatcaagctggaagaggaacggagaagcgaggacgcccagagcaaggccgccctgaccgactggctgcgggctaaggccagcttcgtgatcgagggcctgaaggaggccgacaaggacgagttctgcagatgcgagctgaagctgcagaagtggtacggggacctgcggggaaagcccttcgccatcgaagccgagaacagcatcctggacatcagcggcttcagcaagcagtacaactgtgccttcatctggcagaaggacggcgtgaagaagctgaacctgtacctgatcatcaactacttcaagggcggcaagctgcggttcaagaagatcaaacctgaagccttcgaagccaacagattctacaccgtgatcaacaaaaagagcggcgagatcgtgcccatggaggtgaacttcaacttcgacgaccccaacctgatcatcctgcctctggcctttggcaagagacagggcagagaattcatctggaacgacctgctgtccctggaaaccggcagcctgaagctggccaacggaagagtgatcgagaagacactgtacaacagaagaacccggcaggatgagcctgccctgttcgtggccctgaccttcgagcggcgggaggtcctggactcctccaatatcaaaccaatgaacctgatcggcgtggcaagaggcgaaaacatccccgccgtgatcgccctgaccgaccccgagggctgcccactgagccggtttaaggatagcctgggaaacccaacccacatcctgagaatcggcgagagctataaggagaagcagcggaccatccaggccaagaaggaggtggagcagcggagagccggcggctacagccggaagtacgccagcaaagccaagaatctggcagacgatatggtgagaaacaccgctagagatctgctgtactacgccgtgacccaggatgccatgctgatcttcgccaacctgagccggggcttcggccggcagggcaagcggaccttcatggccgagagacagtacacacggatggaggactggctgaccgccaagctggcctacgagggcctgagcaagacctacctgtccaagacactggcccagtacacctccaagacatgcagcaactgtgggtttaccatcaccagcgccgactacgacagggtgctggagaagctgaagaagacagcaacaggctggatgaccacaattaacggcaaggagctgaaggtggagggccagattacctactacaacagatacaagagacagaacgtagtcaaggacctgtccgtcgagctggatagactgagcgaagaatctgtgaacaacgacatctcctcctggacaaagggcagaagcggagaagctctgagcctcctgaagaaaagattctcccatagacccgtgcaggagaagttcgtgtgcctgaactgcggcttcgagacacacgcagccgagcaagccgccctgaacatcgccagatcctggctgttcctgcggagccaggagtacaagaaataccagacaaacaagacaaccggcaacaccgataagagagccttcgtcgagacctggcagtccttttaccggaagaagcttaaggaggtgtggaaacctgccgtgcggtctggcggatctggcggaggctccacaagcagccagggcctgctgaccttcaaggacatcagcgtggacttcacccaggaggagtggggccagctggcccccgcccacaggaacctgtacagggaggtgatgctggagaactacggcaacctggtgagcgtggccggctaccagctgagcaagcccagcgtgatcagccagctggagaagggccaggagccctggatgaccgagaaggagggccccggcgacagcagcagcgacctgaagaacaccagccccaagaaaaagagaaaagtctaagctgccttctgcggggcttgccttctggccatgcccttcttctctcccttgcacctgtacctcttggtctttgaataaagcctgagtaggaaggctagcaaaaaaaaaaaaaaaaaaaaaaaaaaaaaaaaaaaaaaaaaaaaaaaaaaaaaaaaaaaaaaaaaaaaaaaaaaaaaaaa

SEQ ID NO: 6570 - RNA, 5797 nt, synthetic construct
  source 1..5797: mol_type = other RNA
aggaaataagagagaaaagaagagtaagaagaaatataagagccaccatggcccctaagaagaagcgtaaagtgagccggatggaacgcctcgtctacgaggtgcggcagaagtgcagaaacatcgaggacatctgcatctcctgcggatctctgaacgtgaccctggagcacccactgttcatcggcggcatgtgccagaactgtaaaaactgttttctggagtgtgcctatcaatacgacgatgacggctaccagagctactgcaccatctgttgcggcggaagagaggtgctgatgtgtggaaataacaactgctgccggtgcttctgcgtggaatgcgtggacctgctggtgggccccggcgccgcccaggccgctattaaggaagatccttggaactgctacatgtgcggccacaagggcacatacggcctgctgagacggagagaggactggcctagcagactgcagatgttcttcgccaataaccacgaccaggagttcgacccccctaaggtgtaccctcccgtccccgccgagaagagaaagcccatccgggtcctgagcctgttcgatggcatcgccaccggtctgctggtgctgaaggacctgggcatccaggtggataggtacattgcctccgaggtgtgcgaggactccatcaccgtgggaatggtgcgtcatcagggcaagatcatgtacgtgggcgacgtgcggagcgtgacacagaagcatatccaggagtggggccctttcgacctggtgatcggcggcagcccttgcaatgacctgagcatcgtgaacccagcccggaagggcctgtacgagggaaccggcagactgttcttcgagttttacagactgctgcacgacgcccggcctaaggaaggcgacgaccggcccttcttttggctgttcgagaatgtggtggccatgggagtcagcgacaagcgggatattagccggttcctggagagcaaccccgtgatgatcgatgccaaggaagtgagcgccgcccaccgggccagatacttctggggcaatctgcctggcatgaacagacccctggccagcaccgtgaacgacaagctggagctgcaggagtgcctggagcacggccggatcgccaagttcagcaaggtgagaaccatcaccacccgaagcaacagcatcaaacaaggcaaggaccagcactttcctgtgttcatgaacgagaaggaggacatcctgtggtgtaccgagatggagagagtgttcgggttcccagtccactacacagatgtcagcaacatgtctagactggccagacagagactgctgggaagaagctggtccgtccctgtgatcagacacctgttcgcccctctgaaggagtacttcgcctgcgtgagcagcggcaacagcaacgccaacagccggggccccagcttctctagcggcctggtgccactgtccctgagagggagccacatgggccccatggagatctacaaaaccgtgagcgcctggaagcggcagcctgtgcgcgtgctgagcctgtttcggaatatcgataaagtcctgaaaagcctgggattcctggagagcggctctggctccggcggtggcaccctgaagtacgtggaggatgtgacaaacgtggtcagacgggatgtggagaagtggggccccttcgatctggtgtacggcagcacccaacccctgggcagctcttgtgaccggtgccctggctggtacatgtttcagttccaccggatcctgcagtacgccctgccgagacaggagtcccagcggccattcttttggattttcatggacaacttgctgctgaccgaggatgaccaggaaactaccactcggttcctgcagaccgaagccgtgaccctgcaggacgtgagaggccgggactaccagaacgccatgcgggtgtggtccaacatccctggactgaaaagcaagcacgcacctctgacccctaaagaagaggagtacctgcaggcccaggtgcggagcagaagcaagctggacgcccctaaggtggatctgctggtgaagaattgcctcctgcccctgagagagtacttcaagtatttcagccagaatagtctgcccctgggcggcccaagcagcggcgcccctcctcccagcggcggcagcccagccggctccccaacctctaccgaggagggcacctctgagtccgccacccccgagagcggccctggcacctccaccgagcccagcgagggcagcgcacccggcagccctgccggcagccccacctccacagaggagggaaccagcaccgagcccagcgaaggcagcgccccaggcaccagcaccgagcctagtgagggcggctctggcggcggcagcgcccaggagattaaacggatcaacaagatcagaagaagacttgtgaaagacagcaacaccaagaaggccggcaagacaggccccatgaaaaccctgctggttagagtgatgacacccgatctgagagagcggctggaaaacctgagaaagaagcctgaaaatatcccccagcccatcagcaatacatctagagccaacctgaataagctgctgaccgattacaccgaaatgaagaaggcgatcctgcatgtgtactgggaagagttccagaaggaccctgtgggcctgatgagccgggtggcccagcctgccagcaagaagatcgatcagaacaagctgaaacctgagatggacgagaagggcaacctgaccaccgccggctttgcctgctctcagtgtggccagcccctgttcgtgtacaagctggagcaggtgtctgagaagggcaaggcttacaccaactacttcggacggtgcaatgtggccgagcacgaaaagctgatcctgctggcccagctgaagcccgagaaggatagcgacgaagccgtgacatatagcctgggaaagtttgggcagagggccctggatttctacagcattcatgtgaccaaggagtccacccaccccgtgaagcccctggcccagatcgccggaaacagatacgcctccggacctgtgggaaaggccctgagcgacgcatgtatgggcacaatcgcctccttcctgtctaagtaccaggacatcatcatcgaacaccagaaggtggtgaagggcaaccagaagagactggagagcctgcgggagctggccggcaaggaaaacctggaataccctagcgtgaccctgccacctcagcctcacaccaaggagggcgttgatgcctacaacgaagtgatcgcccgggtgcgaatgtgggtgaacctgaacctgtggcagaagctgaagctaagcagagatgatgccaagcctctgctgagactgaagggattcccttcctttcctctggtcgagagacaggccaacgaagtggactggtgggacatggtgtgtaacgtgaagaagctgatcaacgagaaaaaggaggatggcaaggtgttttggcagaatctggctggctacaagagacaggaagccctgagaccatacctgagcagcgaggaagatcggaagaagggaaagaaattcgctcggtaccagctgggcgacctgctgctgcacctggaaaagaagcacggcgaggactggggaaaggtgtacgacgaggcctgggagcggattgacaagaaagtggaaggcctgagcaagcacatcaagctggaagaggaacggagaagcgaggacgcccagagcaaggccgccctgaccgactggctgcgggctaaggccagcttcgtgatcgagggcctgaaggaggccgacaaggacgagttctgcagatgcgagctgaagctgcagaagtggtacggggacctgcggggaaagcccttcgccatcgaagccgagaacagcatcctggacatcagcggcttcagcaagcagtacaactgtgccttcatctggcagaaggacggcgtgaagaagctgaacctgtacctgatcatcaactacttcaagggcggcaagctgcggttcaagaagatcaaacctgaagccttcgaagccaacagattctacaccgtgatcaacaaaaagagcggcgagatcgtgcccatggaggtgaacttcaacttcgacgaccccaacctgatcatcctgcctctggcctttggcaagagacagggcagagaattcatctggaacgacctgctgtccctggaaaccggcagcctgaagctggccaacggaagagtgatcgagaagacactgtacaacagaagaacccggcaggatgagcctgccctgttcgtggccctgaccttcgagcggcgggaggtcctggactcctccaatatcaaaccaatgaacctgatcggcgtggcaagaggcgaaaacatccccgccgtgatcgccctgaccgaccccgagggctgcccactgagccggtttaaggatagcctgggaaacccaacccacatcctgagaatcggcgagagctataaggagaagcagcggaccatccaggccaagaaggaggtggagcagcggagagccggcggctacagccggaagtacgccagcaaagccaagaatctggcagacgatatggtgagaaacaccgctagagatctgctgtactacgccgtgacccaggatgccatgctgatcttcgccaacctgagccggggcttcggccggcagggcaagcggaccttcatggccgagagacagtacacacggatggaggactggctgaccgccaagctggcctacgagggcctgagcaagacctacctgtccaagacactggcccagtacacctccaagacatgcagcaactgtgggtttaccatcaccagcgccgactacgacagggtgctggagaagctgaagaagacagcaacaggctggatgaccacaattaacggcaaggagctgaaggtggagggccagattacctactacaacagatacaagagacagaacgtagtcaaggacctgtccgtcgagctggatagactgagcgaagaatctgtgaacaacgacatctcctcctggacaaagggcagaagcggagaagctctgagcctcctgaagaaaagattctcccatagacccgtgcaggagaagttcgtgtgcctgaactgcggcttcgagacacacgcagccgagcaagccgccctgaacatcgccagatcctggctgttcctgcggagccaggagtacaagaaataccagacaaacaagacaaccggcaacaccgataagagagccttcgtcgagacctggcagtccttttaccggaagaagcttaaggaggtgtggaaacctgccgtgcggtctggcggatctggcggaggctccacaagcatgctgttccaggagctggtgaccttcaaggacgtggccgtggacttcacccaggaggagtggaagtgcctggcccccagccagaaggagctgtacagggaggtgatgctggagaactacaggaacctggtgagcctgggcagggccgtgagcaagcccgagctgatccaccagctggagaggggcgagaccccctggaggcccaagggcgacggctggaggaacagcctgaggcccggcgagaccagccccaagaaaaagagaaaagtctaagctgccttctgcggggcttgccttctggccatgcccttcttctctcccttgcacctgtacctcttggtctttgaataaagcctgagtaggaaggctagcaaaaaaaaaaaaaaaaaaaaaaaaaaaaaaaaaaaaaaaaaaaaaaaaaaaaaaaaaaaaaaaaaaaaaaaaaaaaaaaa

SEQ ID NO: 6571 - RNA, 5797 nt, synthetic construct
  source 1..5797: mol_type = other RNA
aggaaataagagagaaaagaagagtaagaagaaatataagagccaccatggcccctaagaagaagcgtaaagtgagccggatggaacgcctcgtctacgaggtgcggcagaagtgcagaaacatcgaggacatctgcatctcctgcggatctctgaacgtgaccctggagcacccactgttcatcggcggcatgtgccagaactgtaaaaactgttttctggagtgtgcctatcaatacgacgatgacggctaccagagctactgcaccatctgttgcggcggaagagaggtgctgatgtgtggaaataacaactgctgccggtgcttctgcgtggaatgcgtggacctgctggtgggccccggcgccgcccaggccgctattaaggaagatccttggaactgctacatgtgcggccacaagggcacatacggcctgctgagacggagagaggactggcctagcagactgcagatgttcttcgccaataaccacgaccaggagttcgacccccctaaggtgtaccctcccgtccccgccgagaagagaaagcccatccgggtcctgagcctgttcgatggcatcgccaccggtctgctggtgctgaaggacctgggcatccaggtggataggtacattgcctccgaggtgtgcgaggactccatcaccgtgggaatggtgcgtcatcagggcaagatcatgtacgtgggcgacgtgcggagcgtgacacagaagcatatccaggagtggggccctttcgacctggtgatcggcggcagcccttgcaatgacctgagcatcgtgaacccagcccggaagggcctgtacgagggaaccggcagactgttcttcgagttttacagactgctgcacgacgcccggcctaaggaaggcgacgaccggcccttcttttggctgttcgagaatgtggtggccatgggagtcagcgacaagcgggatattagccggttcctggagagcaaccccgtgatgatcgatgccaaggaagtgagcgccgcccaccgggccagatacttctggggcaatctgcctggcatgaacagacccctggccagcaccgtgaacgacaagctggagctgcaggagtgcctggagcacggccggatcgccaagttcagcaaggtgagaaccatcaccacccgaagcaacagcatcaaacaaggcaaggaccagcactttcctgtgttcatgaacgagaaggaggacatcctgtggtgtaccgagatggagagagtgttcgggttcccagtccactacacagatgtcagcaacatgtctagactggccagacagagactgctgggaagaagctggtccgtccctgtgatcagacacctgttcgcccctctgaaggagtacttcgcctgcgtgagcagcggcaacagcaacgccaacagccggggccccagcttctctagcggcctggtgccactgtccctgagagggagccacatgggccccatggagatctacaaaaccgtgagcgcctggaagcggcagcctgtgcgcgtgctgagcctgtttcggaatatcgataaagtcctgaaaagcctgggattcctggagagcggctctggctccggcggtggcaccctgaagtacgtggaggatgtgacaaacgtggtcagacgggatgtggagaagtggggccccttcgatctggtgtacggcagcacccaacccctgggcagctcttgtgaccggtgccctggctggtacatgtttcagttccaccggatcctgcagtacgccctgccgagacaggagtcccagcggccattcttttggattttcatggacaacttgctgctgaccgaggatgaccaggaaactaccactcggttcctgcagaccgaagccgtgaccctgcaggacgtgagaggccgggactaccagaacgccatgcgggtgtggtccaacatccctggactgaaaagcaagcacgcacctctgacccctaaagaagaggagtacctgcaggcccaggtgcggagcagaagcaagctggacgcccctaaggtggatctgctggtgaagaattgcctcctgcccctgagagagtacttcaagtatttcagccagaatagtctgcccctgggcggcccaagcagcggcgcccctcctcccagcggcggcagcccagccggctccccaacctctaccgaggagggcacctctgagtccgccacccccgagagcggccctggcacctccaccgagcccagcgagggcagcgcacccggcagccctgccggcagccccacctccacagaggagggaaccagcaccgagcccagcgaaggcagcgccccaggcaccagcaccgagcctagtgagggcggctctggcggcggcagcgcccaggagattaaacggatcaacaagatcagaagaagacttgtgaaagacagcaacaccaagaaggccggcaagacaggccccatgaaaaccctgctggttagagtgatgacacccgatctgagagagcggctggaaaacctgagaaagaagcctgaaaatatcccccagcccatcagcaatacatctagagccaacctgaataagctgctgaccgattacaccgaaatgaagaaggcgatcctgcatgtgtactgggaagagttccagaaggaccctgtgggcctgatgagccgggtggcccagcctgccagcaagaagatcgatcagaacaagctgaaacctgagatggacgagaagggcaacctgaccaccgccggctttgcctgctctcagtgtggccagcccctgttcgtgtacaagctggagcaggtgtctgagaagggcaaggcttacaccaactacttcggacggtgcaatgtggccgagcacgaaaagctgatcctgctggcccagctgaagcccgagaaggatagcgacgaagccgtgacatatagcctgggaaagtttgggcagagggccctggatttctacagcattcatgtgaccaaggagtccacccaccccgtgaagcccctggcccagatcgccggaaacagatacgcctccggacctgtgggaaaggccctgagcgacgcatgtatgggcacaatcgcctccttcctgtctaagtaccaggacatcatcatcgaacaccagaaggtggtgaagggcaaccagaagagactggagagcctgcgggagctggccggcaaggaaaacctggaataccctagcgtgaccctgccacctcagcctcacaccaaggagggcgttgatgcctacaacgaagtgatcgcccgggtgcgaatgtgggtgaacctgaacctgtggcagaagctgaagctaagcagagatgatgccaagcctctgctgagactgaagggattcccttcctttcctctggtcgagagacaggccaacgaagtggactggtgggacatggtgtgtaacgtgaagaagctgatcaacgagaaaaaggaggatggcaaggtgttttggcagaatctggctggctacaagagacaggaagccctgagaccatacctgagcagcgaggaagatcggaagaagggaaagaaattcgctcggtaccagctgggcgacctgctgctgcacctggaaaagaagcacggcgaggactggggaaaggtgtacgacgaggcctgggagcggattgacaagaaagtggaaggcctgagcaagcacatcaagctggaagaggaacggagaagcgaggacgcccagagcaaggccgccctgaccgactggctgcgggctaaggccagcttcgtgatcgagggcctgaaggaggccgacaaggacgagttctgcagatgcgagctgaagctgcagaagtggtacggggacctgcggggaaagcccttcgccatcgaagccgagaacagcatcctggacatcagcggcttcagcaagcagtacaactgtgccttcatctggcagaaggacggcgtgaagaagctgaacctgtacctgatcatcaactacttcaagggcggcaagctgcggttcaagaagatcaaacctgaagccttcgaagccaacagattctacaccgtgatcaacaaaaagagcggcgagatcgtgcccatggaggtgaacttcaacttcgacgaccccaacctgatcatcctgcctctggcctttggcaagagacagggcagagaattcatctggaacgacctgctgtccctggaaaccggcagcctgaagctggccaacggaagagtgatcgagaagacactgtacaacagaagaacccggcaggatgagcctgccctgttcgtggccctgaccttcgagcggcgggaggtcctggactcctccaatatcaaaccaatgaacctgatcggcgtggcaagaggcgaaaacatccccgccgtgatcgccctgaccgaccccgagggctgcccactgagccggtttaaggatagcctgggaaacccaacccacatcctgagaatcggcgagagctataaggagaagcagcggaccatccaggccaagaaggaggtggagcagcggagagccggcggctacagccggaagtacgccagcaaagccaagaatctggcagacgatatggtgagaaacaccgctagagatctgctgtactacgccgtgacccaggatgccatgctgatcttcgccaacctgagccggggcttcggccggcagggcaagcggaccttcatggccgagagacagtacacacggatggaggactggctgaccgccaagctggcctacgagggcctgagcaagacctacctgtccaagacactggcccagtacacctccaagacatgcagcaactgtgggtttaccatcaccagcgccgactacgacagggtgctggagaagctgaagaagacagcaacaggctggatgaccacaattaacggcaaggagctgaaggtggagggccagattacctactacaacagatacaagagacagaacgtagtcaaggacctgtccgtcgagctggatagactgagcgaagaatctgtgaacaacgacatctcctcctggacaaagggcagaagcggagaagctctgagcctcctgaagaaaagattctcccatagacccgtgcaggagaagttcgtgtgcctgaactgcggcttcgagacacacgcagccgagcaagccgccctgaacatcgccagatcctggctgttcctgcggagccaggagtacaagaaataccagacaaacaagacaaccggcaacaccgataagagagccttcgtcgagacctggcagtccttttaccggaagaagcttaaggaggtgtggaaacctgccgtgcggtctggcggatctggcggaggctccacaagcatggagcccagggacgccttcgaggacgtggccgtgtacttcaccagggaggagtgggccctgctggacgacggcgacaagggcctgtacagggaccagatgctgaggaactaccaggccctggtgagcctgggctacaggggccccacccccgacctgatctgctgcatccagaggggcaaggtggagctgtgggtgagggacggcgaggaccacggcgagatcagcggcagcgaggacctgaccagccccaagaaaaagagaaaagtctaagctgccttctgcggggcttgccttctggccatgcccttcttctctcccttgcacctgtacctcttggtctttgaataaagcctgagtaggaaggctagcaaaaaaaaaaaaaaaaaaaaaaaaaaaaaaaaaaaaaaaaaaaaaaaaaaaaaaaaaaaaaaaaaaaaaaaaaaaaaaaa

SEQ ID NO: 6572 - RNA, 5797 nt, synthetic construct
  source 1..5797: mol_type = other RNA
aggaaataagagagaaaagaagagtaagaagaaatataagagccaccatggcccctaagaagaagcgtaaagtgagccggatggaacgcctcgtctacgaggtgcggcagaagtgcagaaacatcgaggacatctgcatctcctgcggatctctgaacgtgaccctggagcacccactgttcatcggcggcatgtgccagaactgtaaaaactgttttctggagtgtgcctatcaatacgacgatgacggctaccagagctactgcaccatctgttgcggcggaagagaggtgctgatgtgtggaaataacaactgctgccggtgcttctgcgtggaatgcgtggacctgctggtgggccccggcgccgcccaggccgctattaaggaagatccttggaactgctacatgtgcggccacaagggcacatacggcctgctgagacggagagaggactggcctagcagactgcagatgttcttcgccaataaccacgaccaggagttcgacccccctaaggtgtaccctcccgtccccgccgagaagagaaagcccatccgggtcctgagcctgttcgatggcatcgccaccggtctgctggtgctgaaggacctgggcatccaggtggataggtacattgcctccgaggtgtgcgaggactccatcaccgtgggaatggtgcgtcatcagggcaagatcatgtacgtgggcgacgtgcggagcgtgacacagaagcatatccaggagtggggccctttcgacctggtgatcggcggcagcccttgcaatgacctgagcatcgtgaacccagcccggaagggcctgtacgagggaaccggcagactgttcttcgagttttacagactgctgcacgacgcccggcctaaggaaggcgacgaccggcccttcttttggctgttcgagaatgtggtggccatgggagtcagcgacaagcgggatattagccggttcctggagagcaaccccgtgatgatcgatgccaaggaagtgagcgccgcccaccgggccagatacttctggggcaatctgcctggcatgaacagacccctggccagcaccgtgaacgacaagctggagctgcaggagtgcctggagcacggccggatcgccaagttcagcaaggtgagaaccatcaccacccgaagcaacagcatcaaacaaggcaaggaccagcactttcctgtgttcatgaacgagaaggaggacatcctgtggtgtaccgagatggagagagtgttcgggttcccagtccactacacagatgtcagcaacatgtctagactggccagacagagactgctgggaagaagctggtccgtccctgtgatcagacacctgttcgcccctctgaaggagtacttcgcctgcgtgagcagcggcaacagcaacgccaacagccggggccccagcttctctagcggcctggtgccactgtccctgagagggagccacatgggccccatggagatctacaaaaccgtgagcgcctggaagcggcagcctgtgcgcgtgctgagcctgtttcggaatatcgataaagtcctgaaaagcctgggattcctggagagcggctctggctccggcggtggcaccctgaagtacgtggaggatgtgacaaacgtggtcagacgggatgtggagaagtggggccccttcgatctggtgtacggcagcacccaacccctgggcagctcttgtgaccggtgccctggctggtacatgtttcagttccaccggatcctgcagtacgccctgccgagacaggagtcccagcggccattcttttggattttcatggacaacttgctgctgaccgaggatgaccaggaaactaccactcggttcctgcagaccgaagccgtgaccctgcaggacgtgagaggccgggactaccagaacgccatgcgggtgtggtccaacatccctggactgaaaagcaagcacgcacctctgacccctaaagaagaggagtacctgcaggcccaggtgcggagcagaagcaagctggacgcccctaaggtggatctgctggtgaagaattgcctcctgcccctgagagagtacttcaagtatttcagccagaatagtctgcccctgggcggcccaagcagcggcgcccctcctcccagcggcggcagcccagccggctccccaacctctaccgaggagggcacctctgagtccgccacccccgagagcggccctggcacctccaccgagcccagcgagggcagcgcacccggcagccctgccggcagccccacctccacagaggagggaaccagcaccgagcccagcgaaggcagcgccccaggcaccagcaccgagcctagtgagggcggctctggcggcggcagcgcccaggagattaaacggatcaacaagatcagaagaagacttgtgaaagacagcaacaccaagaaggccggcaagacaggccccatgaaaaccctgctggttagagtgatgacacccgatctgagagagcggctggaaaacctgagaaagaagcctgaaaatatcccccagcccatcagcaatacatctagagccaacctgaataagctgctgaccgattacaccgaaatgaagaaggcgatcctgcatgtgtactgggaagagttccagaaggaccctgtgggcctgatgagccgggtggcccagcctgccagcaagaagatcgatcagaacaagctgaaacctgagatggacgagaagggcaacctgaccaccgccggctttgcctgctctcagtgtggccagcccctgttcgtgtacaagctggagcaggtgtctgagaagggcaaggcttacaccaactacttcggacggtgcaatgtggccgagcacgaaaagctgatcctgctggcccagctgaagcccgagaaggatagcgacgaagccgtgacatatagcctgggaaagtttgggcagagggccctggatttctacagcattcatgtgaccaaggagtccacccaccccgtgaagcccctggcccagatcgccggaaacagatacgcctccggacctgtgggaaaggccctgagcgacgcatgtatgggcacaatcgcctccttcctgtctaagtaccaggacatcatcatcgaacaccagaaggtggtgaagggcaaccagaagagactggagagcctgcgggagctggccggcaaggaaaacctggaataccctagcgtgaccctgccacctcagcctcacaccaaggagggcgttgatgcctacaacgaagtgatcgcccgggtgcgaatgtgggtgaacctgaacctgtggcagaagctgaagctaagcagagatgatgccaagcctctgctgagactgaagggattcccttcctttcctctggtcgagagacaggccaacgaagtggactggtgggacatggtgtgtaacgtgaagaagctgatcaacgagaaaaaggaggatggcaaggtgttttggcagaatctggctggctacaagagacaggaagccctgagaccatacctgagcagcgaggaagatcggaagaagggaaagaaattcgctcggtaccagctgggcgacctgctgctgcacctggaaaagaagcacggcgaggactggggaaaggtgtacgacgaggcctgggagcggattgacaagaaagtggaaggcctgagcaagcacatcaagctggaagaggaacggagaagcgaggacgcccagagcaaggccgccctgaccgactggctgcgggctaaggccagcttcgtgatcgagggcctgaaggaggccgacaaggacgagttctgcagatgcgagctgaagctgcagaagtggtacggggacctgcggggaaagcccttcgccatcgaagccgagaacagcatcctggacatcagcggcttcagcaagcagtacaactgtgccttcatctggcagaaggacggcgtgaagaagctgaacctgtacctgatcatcaactacttcaagggcggcaagctgcggttcaagaagatcaaacctgaagccttcgaagccaacagattctacaccgtgatcaacaaaaagagcggcgagatcgtgcccatggaggtgaacttcaacttcgacgaccccaacctgatcatcctgcctctggcctttggcaagagacagggcagagaattcatctggaacgacctgctgtccctggaaaccggcagcctgaagctggccaacggaagagtgatcgagaagacactgtacaacagaagaacccggcaggatgagcctgccctgttcgtggccctgaccttcgagcggcgggaggtcctggactcctccaatatcaaaccaatgaacctgatcggcgtggcaagaggcgaaaacatccccgccgtgatcgccctgaccgaccccgagggctgcccactgagccggtttaaggatagcctgggaaacccaacccacatcctgagaatcggcgagagctataaggagaagcagcggaccatccaggccaagaaggaggtggagcagcggagagccggcggctacagccggaagtacgccagcaaagccaagaatctggcagacgatatggtgagaaacaccgctagagatctgctgtactacgccgtgacccaggatgccatgctgatcttcgccaacctgagccggggcttcggccggcagggcaagcggaccttcatggccgagagacagtacacacggatggaggactggctgaccgccaagctggcctacgagggcctgagcaagacctacctgtccaagacactggcccagtacacctccaagacatgcagcaactgtgggtttaccatcaccagcgccgactacgacagggtgctggagaagctgaagaagacagcaacaggctggatgaccacaattaacggcaaggagctgaaggtggagggccagattacctactacaacagatacaagagacagaacgtagtcaaggacctgtccgtcgagctggatagactgagcgaagaatctgtgaacaacgacatctcctcctggacaaagggcagaagcggagaagctctgagcctcctgaagaaaagattctcccatagacccgtgcaggagaagttcgtgtgcctgaactgcggcttcgagacacacgcagccgagcaagccgccctgaacatcgccagatcctggctgttcctgcggagccaggagtacaagaaataccagacaaacaagacaaccggcaacaccgataagagagccttcgtcgagacctggcagtccttttaccggaagaagcttaaggaggtgtggaaacctgccgtgcggtctggcggatctggcggaggctccacaagcgcccaggcccccctgagcttcgaggacgtggccgtgagcttcagcagggaggagtggaggctgctggtgcccgcccagaaggacctgtacagggacgtgatgctggagaactacaggaacctggtgagcgtgggctaccaggccagcgagcccgacagcctgttcaggctggagcacggcggccccctgtgggtggtggagggcgccgcccccaggcccccctgccccggcgagtacgtggccaccagccccaagaaaaagagaaaagtctaagctgccttctgcggggcttgccttctggccatgcccttcttctctcccttgcacctgtacctcttggtctttgaataaagcctgagtaggaaggctagcaaaaaaaaaaaaaaaaaaaaaaaaaaaaaaaaaaaaaaaaaaaaaaaaaaaaaaaaaaaaaaaaaaaaaaaaaaaaaaaa

SEQ ID NO: 6573 - RNA, 5797 nt, synthetic construct
  source 1..5797: mol_type = other RNA
aggaaataagagagaaaagaagagtaagaagaaatataagagccaccatggcccctaagaagaagcgtaaagtgagccggatggaacgcctcgtctacgaggtgcggcagaagtgcagaaacatcgaggacatctgcatctcctgcggatctctgaacgtgaccctggagcacccactgttcatcggcggcatgtgccagaactgtaaaaactgttttctggagtgtgcctatcaatacgacgatgacggctaccagagctactgcaccatctgttgcggcggaagagaggtgctgatgtgtggaaataacaactgctgccggtgcttctgcgtggaatgcgtggacctgctggtgggccccggcgccgcccaggccgctattaaggaagatccttggaactgctacatgtgcggccacaagggcacatacggcctgctgagacggagagaggactggcctagcagactgcagatgttcttcgccaataaccacgaccaggagttcgacccccctaaggtgtaccctcccgtccccgccgagaagagaaagcccatccgggtcctgagcctgttcgatggcatcgccaccggtctgctggtgctgaaggacctgggcatccaggtggataggtacattgcctccgaggtgtgcgaggactccatcaccgtgggaatggtgcgtcatcagggcaagatcatgtacgtgggcgacgtgcggagcgtgacacagaagcatatccaggagtggggccctttcgacctggtgatcggcggcagcccttgcaatgacctgagcatcgtgaacccagcccggaagggcctgtacgagggaaccggcagactgttcttcgagttttacagactgctgcacgacgcccggcctaaggaaggcgacgaccggcccttcttttggctgttcgagaatgtggtggccatgggagtcagcgacaagcgggatattagccggttcctggagagcaaccccgtgatgatcgatgccaaggaagtgagcgccgcccaccgggccagatacttctggggcaatctgcctggcatgaacagacccctggccagcaccgtgaacgacaagctggagctgcaggagtgcctggagcacggccggatcgccaagttcagcaaggtgagaaccatcaccacccgaagcaacagcatcaaacaaggcaaggaccagcactttcctgtgttcatgaacgagaaggaggacatcctgtggtgtaccgagatggagagagtgttcgggttcccagtccactacacagatgtcagcaacatgtctagactggccagacagagactgctgggaagaagctggtccgtccctgtgatcagacacctgttcgcccctctgaaggagtacttcgcctgcgtgagcagcggcaacagcaacgccaacagccggggccccagcttctctagcggcctggtgccactgtccctgagagggagccacatgggccccatggagatctacaaaaccgtgagcgcctggaagcggcagcctgtgcgcgtgctgagcctgtttcggaatatcgataaagtcctgaaaagcctgggattcctggagagcggctctggctccggcggtggcaccctgaagtacgtggaggatgtgacaaacgtggtcagacgggatgtggagaagtggggccccttcgatctggtgtacggcagcacccaacccctgggcagctcttgtgaccggtgccctggctggtacatgtttcagttccaccggatcctgcagtacgccctgccgagacaggagtcccagcggccattcttttggattttcatggacaacttgctgctgaccgaggatgaccaggaaactaccactcggttcctgcagaccgaagccgtgaccctgcaggacgtgagaggccgggactaccagaacgccatgcgggtgtggtccaacatccctggactgaaaagcaagcacgcacctctgacccctaaagaagaggagtacctgcaggcccaggtgcggagcagaagcaagctggacgcccctaaggtggatctgctggtgaagaattgcctcctgcccctgagagagtacttcaagtatttcagccagaatagtctgcccctgggcggcccaagcagcggcgcccctcctcccagcggcggcagcccagccggctccccaacctctaccgaggagggcacctctgagtccgccacccccgagagcggccctggcacctccaccgagcccagcgagggcagcgcacccggcagccctgccggcagccccacctccacagaggagggaaccagcaccgagcccagcgaaggcagcgccccaggcaccagcaccgagcctagtgagggcggctctggcggcggcagcgcccaggagattaaacggatcaacaagatcagaagaagacttgtgaaagacagcaacaccaagaaggccggcaagacaggccccatgaaaaccctgctggttagagtgatgacacccgatctgagagagcggctggaaaacctgagaaagaagcctgaaaatatcccccagcccatcagcaatacatctagagccaacctgaataagctgctgaccgattacaccgaaatgaagaaggcgatcctgcatgtgtactgggaagagttccagaaggaccctgtgggcctgatgagccgggtggcccagcctgccagcaagaagatcgatcagaacaagctgaaacctgagatggacgagaagggcaacctgaccaccgccggctttgcctgctctcagtgtggccagcccctgttcgtgtacaagctggagcaggtgtctgagaagggcaaggcttacaccaactacttcggacggtgcaatgtggccgagcacgaaaagctgatcctgctggcccagctgaagcccgagaaggatagcgacgaagccgtgacatatagcctgggaaagtttgggcagagggccctggatttctacagcattcatgtgaccaaggagtccacccaccccgtgaagcccctggcccagatcgccggaaacagatacgcctccggacctgtgggaaaggccctgagcgacgcatgtatgggcacaatcgcctccttcctgtctaagtaccaggacatcatcatcgaacaccagaaggtggtgaagggcaaccagaagagactggagagcctgcgggagctggccggcaaggaaaacctggaataccctagcgtgaccctgccacctcagcctcacaccaaggagggcgttgatgcctacaacgaagtgatcgcccgggtgcgaatgtgggtgaacctgaacctgtggcagaagctgaagctaagcagagatgatgccaagcctctgctgagactgaagggattcccttcctttcctctggtcgagagacaggccaacgaagtggactggtgggacatggtgtgtaacgtgaagaagctgatcaacgagaaaaaggaggatggcaaggtgttttggcagaatctggctggctacaagagacaggaagccctgagaccatacctgagcagcgaggaagatcggaagaagggaaagaaattcgctcggtaccagctgggcgacctgctgctgcacctggaaaagaagcacggcgaggactggggaaaggtgtacgacgaggcctgggagcggattgacaagaaagtggaaggcctgagcaagcacatcaagctggaagaggaacggagaagcgaggacgcccagagcaaggccgccctgaccgactggctgcgggctaaggccagcttcgtgatcgagggcctgaaggaggccgacaaggacgagttctgcagatgcgagctgaagctgcagaagtggtacggggacctgcggggaaagcccttcgccatcgaagccgagaacagcatcctggacatcagcggcttcagcaagcagtacaactgtgccttcatctggcagaaggacggcgtgaagaagctgaacctgtacctgatcatcaactacttcaagggcggcaagctgcggttcaagaagatcaaacctgaagccttcgaagccaacagattctacaccgtgatcaacaaaaagagcggcgagatcgtgcccatggaggtgaacttcaacttcgacgaccccaacctgatcatcctgcctctggcctttggcaagagacagggcagagaattcatctggaacgacctgctgtccctggaaaccggcagcctgaagctggccaacggaagagtgatcgagaagacactgtacaacagaagaacccggcaggatgagcctgccctgttcgtggccctgaccttcgagcggcgggaggtcctggactcctccaatatcaaaccaatgaacctgatcggcgtggcaagaggcgaaaacatccccgccgtgatcgccctgaccgaccccgagggctgcccactgagccggtttaaggatagcctgggaaacccaacccacatcctgagaatcggcgagagctataaggagaagcagcggaccatccaggccaagaaggaggtggagcagcggagagccggcggctacagccggaagtacgccagcaaagccaagaatctggcagacgatatggtgagaaacaccgctagagatctgctgtactacgccgtgacccaggatgccatgctgatcttcgccaacctgagccggggcttcggccggcagggcaagcggaccttcatggccgagagacagtacacacggatggaggactggctgaccgccaagctggcctacgagggcctgagcaagacctacctgtccaagacactggcccagtacacctccaagacatgcagcaactgtgggtttaccatcaccagcgccgactacgacagggtgctggagaagctgaagaagacagcaacaggctggatgaccacaattaacggcaaggagctgaaggtggagggccagattacctactacaacagatacaagagacagaacgtagtcaaggacctgtccgtcgagctggatagactgagcgaagaatctgtgaacaacgacatctcctcctggacaaagggcagaagcggagaagctctgagcctcctgaagaaaagattctcccatagacccgtgcaggagaagttcgtgtgcctgaactgcggcttcgagacacacgcagccgagcaagccgccctgaacatcgccagatcctggctgttcctgcggagccaggagtacaagaaataccagacaaacaagacaaccggcaacaccgataagagagccttcgtcgagacctggcagtccttttaccggaagaagcttaaggaggtgtggaaacctgccgtgcggtctggcggatctggcggaggctccacaagccaccagggcagcgtgaccttcggcgacgtggccgtggacttcagccaggacgagtggggccacctggaccccgcccagaaggagctgtacagggaggtgatgctggagaactacggcaacctggtgtgcctgggcctggccgtgagcaggccccacgtgatcgagcagctggagaggggcgaggccccctggctgcccaggggcgccgtgcccaggagctgcgacctggactggatgaccaggaccagccccaagaaaaagagaaaagtctaagctgccttctgcggggcttgccttctggccatgcccttcttctctcccttgcacctgtacctcttggtctttgaataaagcctgagtaggaaggctagcaaaaaaaaaaaaaaaaaaaaaaaaaaaaaaaaaaaaaaaaaaaaaaaaaaaaaaaaaaaaaaaaaaaaaaaaaaaaaaaa

SEQ ID NO: 6574 - RNA, 5797 nt, synthetic construct
  source 1..5797: mol_type = other RNA
aggaaataagagagaaaagaagagtaagaagaaatataagagccaccatggcccctaagaagaagcgtaaagtgagccggatggaacgcctcgtctacgaggtgcggcagaagtgcagaaacatcgaggacatctgcatctcctgcggatctctgaacgtgaccctggagcacccactgttcatcggcggcatgtgccagaactgtaaaaactgttttctggagtgtgcctatcaatacgacgatgacggctaccagagctactgcaccatctgttgcggcggaagagaggtgctgatgtgtggaaataacaactgctgccggtgcttctgcgtggaatgcgtggacctgctggtgggccccggcgccgcccaggccgctattaaggaagatccttggaactgctacatgtgcggccacaagggcacatacggcctgctgagacggagagaggactggcctagcagactgcagatgttcttcgccaataaccacgaccaggagttcgacccccctaaggtgtaccctcccgtccccgccgagaagagaaagcccatccgggtcctgagcctgttcgatggcatcgccaccggtctgctggtgctgaaggacctgggcatccaggtggataggtacattgcctccgaggtgtgcgaggactccatcaccgtgggaatggtgcgtcatcagggcaagatcatgtacgtgggcgacgtgcggagcgtgacacagaagcatatccaggagtggggccctttcgacctggtgatcggcggcagcccttgcaatgacctgagcatcgtgaacccagcccggaagggcctgtacgagggaaccggcagactgttcttcgagttttacagactgctgcacgacgcccggcctaaggaaggcgacgaccggcccttcttttggctgttcgagaatgtggtggccatgggagtcagcgacaagcgggatattagccggttcctggagagcaaccccgtgatgatcgatgccaaggaagtgagcgccgcccaccgggccagatacttctggggcaatctgcctggcatgaacagacccctggccagcaccgtgaacgacaagctggagctgcaggagtgcctggagcacggccggatcgccaagttcagcaaggtgagaaccatcaccacccgaagcaacagcatcaaacaaggcaaggaccagcactttcctgtgttcatgaacgagaaggaggacatcctgtggtgtaccgagatggagagagtgttcgggttcccagtccactacacagatgtcagcaacatgtctagactggccagacagagactgctgggaagaagctggtccgtccctgtgatcagacacctgttcgcccctctgaaggagtacttcgcctgcgtgagcagcggcaacagcaacgccaacagccggggccccagcttctctagcggcctggtgccactgtccctgagagggagccacatgggccccatggagatctacaaaaccgtgagcgcctggaagcggcagcctgtgcgcgtgctgagcctgtttcggaatatcgataaagtcctgaaaagcctgggattcctggagagcggctctggctccggcggtggcaccctgaagtacgtggaggatgtgacaaacgtggtcagacgggatgtggagaagtggggccccttcgatctggtgtacggcagcacccaacccctgggcagctcttgtgaccggtgccctggctggtacatgtttcagttccaccggatcctgcagtacgccctgccgagacaggagtcccagcggccattcttttggattttcatggacaacttgctgctgaccgaggatgaccaggaaactaccactcggttcctgcagaccgaagccgtgaccctgcaggacgtgagaggccgggactaccagaacgccatgcgggtgtggtccaacatccctggactgaaaagcaagcacgcacctctgacccctaaagaagaggagtacctgcaggcccaggtgcggagcagaagcaagctggacgcccctaaggtggatctgctggtgaagaattgcctcctgcccctgagagagtacttcaagtatttcagccagaatagtctgcccctgggcggcccaagcagcggcgcccctcctcccagcggcggcagcccagccggctccccaacctctaccgaggagggcacctctgagtccgccacccccgagagcggccctggcacctccaccgagcccagcgagggcagcgcacccggcagccctgccggcagccccacctccacagaggagggaaccagcaccgagcccagcgaaggcagcgccccaggcaccagcaccgagcctagtgagggcggctctggcggcggcagcgcccaggagattaaacggatcaacaagatcagaagaagacttgtgaaagacagcaacaccaagaaggccggcaagacaggccccatgaaaaccctgctggttagagtgatgacacccgatctgagagagcggctggaaaacctgagaaagaagcctgaaaatatcccccagcccatcagcaatacatctagagccaacctgaataagctgctgaccgattacaccgaaatgaagaaggcgatcctgcatgtgtactgggaagagttccagaaggaccctgtgggcctgatgagccgggtggcccagcctgccagcaagaagatcgatcagaacaagctgaaacctgagatggacgagaagggcaacctgaccaccgccggctttgcctgctctcagtgtggccagcccctgttcgtgtacaagctggagcaggtgtctgagaagggcaaggcttacaccaactacttcggacggtgcaatgtggccgagcacgaaaagctgatcctgctggcccagctgaagcccgagaaggatagcgacgaagccgtgacatatagcctgggaaagtttgggcagagggccctggatttctacagcattcatgtgaccaaggagtccacccaccccgtgaagcccctggcccagatcgccggaaacagatacgcctccggacctgtgggaaaggccctgagcgacgcatgtatgggcacaatcgcctccttcctgtctaagtaccaggacatcatcatcgaacaccagaaggtggtgaagggcaaccagaagagactggagagcctgcgggagctggccggcaaggaaaacctggaataccctagcgtgaccctgccacctcagcctcacaccaaggagggcgttgatgcctacaacgaagtgatcgcccgggtgcgaatgtgggtgaacctgaacctgtggcagaagctgaagctaagcagagatgatgccaagcctctgctgagactgaagggattcccttcctttcctctggtcgagagacaggccaacgaagtggactggtgggacatggtgtgtaacgtgaagaagctgatcaacgagaaaaaggaggatggcaaggtgttttggcagaatctggctggctacaagagacaggaagccctgagaccatacctgagcagcgaggaagatcggaagaagggaaagaaattcgctcggtaccagctgggcgacctgctgctgcacctggaaaagaagcacggcgaggactggggaaaggtgtacgacgaggcctgggagcggattgacaagaaagtggaaggcctgagcaagcacatcaagctggaagaggaacggagaagcgaggacgcccagagcaaggccgccctgaccgactggctgcgggctaaggccagcttcgtgatcgagggcctgaaggaggccgacaaggacgagttctgcagatgcgagctgaagctgcagaagtggtacggggacctgcggggaaagcccttcgccatcgaagccgagaacagcatcctggacatcagcggcttcagcaagcagtacaactgtgccttcatctggcagaaggacggcgtgaagaagctgaacctgtacctgatcatcaactacttcaagggcggcaagctgcggttcaagaagatcaaacctgaagccttcgaagccaacagattctacaccgtgatcaacaaaaagagcggcgagatcgtgcccatggaggtgaacttcaacttcgacgaccccaacctgatcatcctgcctctggcctttggcaagagacagggcagagaattcatctggaacgacctgctgtccctggaaaccggcagcctgaagctggccaacggaagagtgatcgagaagacactgtacaacagaagaacccggcaggatgagcctgccctgttcgtggccctgaccttcgagcggcgggaggtcctggactcctccaatatcaaaccaatgaacctgatcggcgtggcaagaggcgaaaacatccccgccgtgatcgccctgaccgaccccgagggctgcccactgagccggtttaaggatagcctgggaaacccaacccacatcctgagaatcggcgagagctataaggagaagcagcggaccatccaggccaagaaggaggtggagcagcggagagccggcggctacagccggaagtacgccagcaaagccaagaatctggcagacgatatggtgagaaacaccgctagagatctgctgtactacgccgtgacccaggatgccatgctgatcttcgccaacctgagccggggcttcggccggcagggcaagcggaccttcatggccgagagacagtacacacggatggaggactggctgaccgccaagctggcctacgagggcctgagcaagacctacctgtccaagacactggcccagtacacctccaagacatgcagcaactgtgggtttaccatcaccagcgccgactacgacagggtgctggagaagctgaagaagacagcaacaggctggatgaccacaattaacggcaaggagctgaaggtggagggccagattacctactacaacagatacaagagacagaacgtagtcaaggacctgtccgtcgagctggatagactgagcgaagaatctgtgaacaacgacatctcctcctggacaaagggcagaagcggagaagctctgagcctcctgaagaaaagattctcccatagacccgtgcaggagaagttcgtgtgcctgaactgcggcttcgagacacacgcagccgagcaagccgccctgaacatcgccagatcctggctgttcctgcggagccaggagtacaagaaataccagacaaacaagacaaccggcaacaccgataagagagccttcgtcgagacctggcagtccttttaccggaagaagcttaaggaggtgtggaaacctgccgtgcggtctggcggatctggcggaggctccacaagcagccaggtgaccgtgaccttcgaggacgtggccgtgctgttcagcagggacgagtggaggaagctgggccccagccagaagaacctgtaccaggacgtgatgctggagaactacagcaacctggtgagcctgggcctgcccttcagcaagcccaaggtgatcagcctgctgcagcagggcgaggacccctggaaggtggagaaggagagccccggcagcttcagccccggctggaagagcagcaccagccccaagaaaaagagaaaagtctaagctgccttctgcggggcttgccttctggccatgcccttcttctctcccttgcacctgtacctcttggtctttgaataaagcctgagtaggaaggctagcaaaaaaaaaaaaaaaaaaaaaaaaaaaaaaaaaaaaaaaaaaaaaaaaaaaaaaaaaaaaaaaaaaaaaaaaaaaaaaaa

SEQ ID NO: 6575 - RNA, 5797 nt, synthetic construct
  source 1..5797: mol_type = other RNA
aggaaataagagagaaaagaagagtaagaagaaatataagagccaccatggcccctaagaagaagcgtaaagtgagccggatggaacgcctcgtctacgaggtgcggcagaagtgcagaaacatcgaggacatctgcatctcctgcggatctctgaacgtgaccctggagcacccactgttcatcggcggcatgtgccagaactgtaaaaactgttttctggagtgtgcctatcaatacgacgatgacggctaccagagctactgcaccatctgttgcggcggaagagaggtgctgatgtgtggaaataacaactgctgccggtgcttctgcgtggaatgcgtggacctgctggtgggccccggcgccgcccaggccgctattaaggaagatccttggaactgctacatgtgcggccacaagggcacatacggcctgctgagacggagagaggactggcctagcagactgcagatgttcttcgccaataaccacgaccaggagttcgacccccctaaggtgtaccctcccgtccccgccgagaagagaaagcccatccgggtcctgagcctgttcgatggcatcgccaccggtctgctggtgctgaaggacctgggcatccaggtggataggtacattgcctccgaggtgtgcgaggactccatcaccgtgggaatggtgcgtcatcagggcaagatcatgtacgtgggcgacgtgcggagcgtgacacagaagcatatccaggagtggggccctttcgacctggtgatcggcggcagcccttgcaatgacctgagcatcgtgaacccagcccggaagggcctgtacgagggaaccggcagactgttcttcgagttttacagactgctgcacgacgcccggcctaaggaaggcgacgaccggcccttcttttggctgttcgagaatgtggtggccatgggagtcagcgacaagcgggatattagccggttcctggagagcaaccccgtgatgatcgatgccaaggaagtgagcgccgcccaccgggccagatacttctggggcaatctgcctggcatgaacagacccctggccagcaccgtgaacgacaagctggagctgcaggagtgcctggagcacggccggatcgccaagttcagcaaggtgagaaccatcaccacccgaagcaacagcatcaaacaaggcaaggaccagcactttcctgtgttcatgaacgagaaggaggacatcctgtggtgtaccgagatggagagagtgttcgggttcccagtccactacacagatgtcagcaacatgtctagactggccagacagagactgctgggaagaagctggtccgtccctgtgatcagacacctgttcgcccctctgaaggagtacttcgcctgcgtgagcagcggcaacagcaacgccaacagccggggccccagcttctctagcggcctggtgccactgtccctgagagggagccacatgggccccatggagatctacaaaaccgtgagcgcctggaagcggcagcctgtgcgcgtgctgagcctgtttcggaatatcgataaagtcctgaaaagcctgggattcctggagagcggctctggctccggcggtggcaccctgaagtacgtggaggatgtgacaaacgtggtcagacgggatgtggagaagtggggccccttcgatctggtgtacggcagcacccaacccctgggcagctcttgtgaccggtgccctggctggtacatgtttcagttccaccggatcctgcagtacgccctgccgagacaggagtcccagcggccattcttttggattttcatggacaacttgctgctgaccgaggatgaccaggaaactaccactcggttcctgcagaccgaagccgtgaccctgcaggacgtgagaggccgggactaccagaacgccatgcgggtgtggtccaacatccctggactgaaaagcaagcacgcacctctgacccctaaagaagaggagtacctgcaggcccaggtgcggagcagaagcaagctggacgcccctaaggtggatctgctggtgaagaattgcctcctgcccctgagagagtacttcaagtatttcagccagaatagtctgcccctgggcggcccaagcagcggcgcccctcctcccagcggcggcagcccagccggctccccaacctctaccgaggagggcacctctgagtccgccacccccgagagcggccctggcacctccaccgagcccagcgagggcagcgcacccggcagccctgccggcagccccacctccacagaggagggaaccagcaccgagcccagcgaaggcagcgccccaggcaccagcaccgagcctagtgagggcggctctggcggcggcagcgcccaggagattaaacggatcaacaagatcagaagaagacttgtgaaagacagcaacaccaagaaggccggcaagacaggccccatgaaaaccctgctggttagagtgatgacacccgatctgagagagcggctggaaaacctgagaaagaagcctgaaaatatcccccagcccatcagcaatacatctagagccaacctgaataagctgctgaccgattacaccgaaatgaagaaggcgatcctgcatgtgtactgggaagagttccagaaggaccctgtgggcctgatgagccgggtggcccagcctgccagcaagaagatcgatcagaacaagctgaaacctgagatggacgagaagggcaacctgaccaccgccggctttgcctgctctcagtgtggccagcccctgttcgtgtacaagctggagcaggtgtctgagaagggcaaggcttacaccaactacttcggacggtgcaatgtggccgagcacgaaaagctgatcctgctggcccagctgaagcccgagaaggatagcgacgaagccgtgacatatagcctgggaaagtttgggcagagggccctggatttctacagcattcatgtgaccaaggagtccacccaccccgtgaagcccctggcccagatcgccggaaacagatacgcctccggacctgtgggaaaggccctgagcgacgcatgtatgggcacaatcgcctccttcctgtctaagtaccaggacatcatcatcgaacaccagaaggtggtgaagggcaaccagaagagactggagagcctgcgggagctggccggcaaggaaaacctggaataccctagcgtgaccctgccacctcagcctcacaccaaggagggcgttgatgcctacaacgaagtgatcgcccgggtgcgaatgtgggtgaacctgaacctgtggcagaagctgaagctaagcagagatgatgccaagcctctgctgagactgaagggattcccttcctttcctctggtcgagagacaggccaacgaagtggactggtgggacatggtgtgtaacgtgaagaagctgatcaacgagaaaaaggaggatggcaaggtgttttggcagaatctggctggctacaagagacaggaagccctgagaccatacctgagcagcgaggaagatcggaagaagggaaagaaattcgctcggtaccagctgggcgacctgctgctgcacctggaaaagaagcacggcgaggactggggaaaggtgtacgacgaggcctgggagcggattgacaagaaagtggaaggcctgagcaagcacatcaagctggaagaggaacggagaagcgaggacgcccagagcaaggccgccctgaccgactggctgcgggctaaggccagcttcgtgatcgagggcctgaaggaggccgacaaggacgagttctgcagatgcgagctgaagctgcagaagtggtacggggacctgcggggaaagcccttcgccatcgaagccgagaacagcatcctggacatcagcggcttcagcaagcagtacaactgtgccttcatctggcagaaggacggcgtgaagaagctgaacctgtacctgatcatcaactacttcaagggcggcaagctgcggttcaagaagatcaaacctgaagccttcgaagccaacagattctacaccgtgatcaacaaaaagagcggcgagatcgtgcccatggaggtgaacttcaacttcgacgaccccaacctgatcatcctgcctctggcctttggcaagagacagggcagagaattcatctggaacgacctgctgtccctggaaaccggcagcctgaagctggccaacggaagagtgatcgagaagacactgtacaacagaagaacccggcaggatgagcctgccctgttcgtggccctgaccttcgagcggcgggaggtcctggactcctccaatatcaaaccaatgaacctgatcggcgtggcaagaggcgaaaacatccccgccgtgatcgccctgaccgaccccgagggctgcccactgagccggtttaaggatagcctgggaaacccaacccacatcctgagaatcggcgagagctataaggagaagcagcggaccatccaggccaagaaggaggtggagcagcggagagccggcggctacagccggaagtacgccagcaaagccaagaatctggcagacgatatggtgagaaacaccgctagagatctgctgtactacgccgtgacccaggatgccatgctgatcttcgccaacctgagccggggcttcggccggcagggcaagcggaccttcatggccgagagacagtacacacggatggaggactggctgaccgccaagctggcctacgagggcctgagcaagacctacctgtccaagacactggcccagtacacctccaagacatgcagcaactgtgggtttaccatcaccagcgccgactacgacagggtgctggagaagctgaagaagacagcaacaggctggatgaccacaattaacggcaaggagctgaaggtggagggccagattacctactacaacagatacaagagacagaacgtagtcaaggacctgtccgtcgagctggatagactgagcgaagaatctgtgaacaacgacatctcctcctggacaaagggcagaagcggagaagctctgagcctcctgaagaaaagattctcccatagacccgtgcaggagaagttcgtgtgcctgaactgcggcttcgagacacacgcagccgagcaagccgccctgaacatcgccagatcctggctgttcctgcggagccaggagtacaagaaataccagacaaacaagacaaccggcaacaccgataagagagccttcgtcgagacctggcagtccttttaccggaagaagcttaaggaggtgtggaaacctgccgtgcggtctggcggatctggcggaggctccacaagctgcaaggagagcgtgaccttcaaggacgtggccgtggagttcacctgggaggagtgggtgcacctgaacagcagccagaagaccctgtacagggacgtgatgctggagaactacaggaacctggtgagcctgggcttcgccgtgagcaagcccgacgtgatctaccagctggagaggaaggaggccagctggatccccggcgccgacatccccaggagcagctgccccgagagcaaggagttcaccagccccaagaaaaagagaaaagtctaagctgccttctgcggggcttgccttctggccatgcccttcttctctcccttgcacctgtacctcttggtctttgaataaagcctgagtaggaaggctagcaaaaaaaaaaaaaaaaaaaaaaaaaaaaaaaaaaaaaaaaaaaaaaaaaaaaaaaaaaaaaaaaaaaaaaaaaaaaaaaa

SEQ ID NO: 6576 - RNA, 5797 nt, synthetic construct
  source 1..5797: mol_type = other RNA
aggaaataagagagaaaagaagagtaagaagaaatataagagccaccatggcccctaagaagaagcgtaaagtgagccggatggaacgcctcgtctacgaggtgcggcagaagtgcagaaacatcgaggacatctgcatctcctgcggatctctgaacgtgaccctggagcacccactgttcatcggcggcatgtgccagaactgtaaaaactgttttctggagtgtgcctatcaatacgacgatgacggctaccagagctactgcaccatctgttgcggcggaagagaggtgctgatgtgtggaaataacaactgctgccggtgcttctgcgtggaatgcgtggacctgctggtgggccccggcgccgcccaggccgctattaaggaagatccttggaactgctacatgtgcggccacaagggcacatacggcctgctgagacggagagaggactggcctagcagactgcagatgttcttcgccaataaccacgaccaggagttcgacccccctaaggtgtaccctcccgtccccgccgagaagagaaagcccatccgggtcctgagcctgttcgatggcatcgccaccggtctgctggtgctgaaggacctgggcatccaggtggataggtacattgcctccgaggtgtgcgaggactccatcaccgtgggaatggtgcgtcatcagggcaagatcatgtacgtgggcgacgtgcggagcgtgacacagaagcatatccaggagtggggccctttcgacctggtgatcggcggcagcccttgcaatgacctgagcatcgtgaacccagcccggaagggcctgtacgagggaaccggcagactgttcttcgagttttacagactgctgcacgacgcccggcctaaggaaggcgacgaccggcccttcttttggctgttcgagaatgtggtggccatgggagtcagcgacaagcgggatattagccggttcctggagagcaaccccgtgatgatcgatgccaaggaagtgagcgccgcccaccgggccagatacttctggggcaatctgcctggcatgaacagacccctggccagcaccgtgaacgacaagctggagctgcaggagtgcctggagcacggccggatcgccaagttcagcaaggtgagaaccatcaccacccgaagcaacagcatcaaacaaggcaaggaccagcactttcctgtgttcatgaacgagaaggaggacatcctgtggtgtaccgagatggagagagtgttcgggttcccagtccactacacagatgtcagcaacatgtctagactggccagacagagactgctgggaagaagctggtccgtccctgtgatcagacacctgttcgcccctctgaaggagtacttcgcctgcgtgagcagcggcaacagcaacgccaacagccggggccccagcttctctagcggcctggtgccactgtccctgagagggagccacatgggccccatggagatctacaaaaccgtgagcgcctggaagcggcagcctgtgcgcgtgctgagcctgtttcggaatatcgataaagtcctgaaaagcctgggattcctggagagcggctctggctccggcggtggcaccctgaagtacgtggaggatgtgacaaacgtggtcagacgggatgtggagaagtggggccccttcgatctggtgtacggcagcacccaacccctgggcagctcttgtgaccggtgccctggctggtacatgtttcagttccaccggatcctgcagtacgccctgccgagacaggagtcccagcggccattcttttggattttcatggacaacttgctgctgaccgaggatgaccaggaaactaccactcggttcctgcagaccgaagccgtgaccctgcaggacgtgagaggccgggactaccagaacgccatgcgggtgtggtccaacatccctggactgaaaagcaagcacgcacctctgacccctaaagaagaggagtacctgcaggcccaggtgcggagcagaagcaagctggacgcccctaaggtggatctgctggtgaagaattgcctcctgcccctgagagagtacttcaagtatttcagccagaatagtctgcccctgggcggcccaagcagcggcgcccctcctcccagcggcggcagcccagccggctccccaacctctaccgaggagggcacctctgagtccgccacccccgagagcggccctggcacctccaccgagcccagcgagggcagcgcacccggcagccctgccggcagccccacctccacagaggagggaaccagcaccgagcccagcgaaggcagcgccccaggcaccagcaccgagcctagtgagggcggctctggcggcggcagcgcccaggagattaaacggatcaacaagatcagaagaagacttgtgaaagacagcaacaccaagaaggccggcaagacaggccccatgaaaaccctgctggttagagtgatgacacccgatctgagagagcggctggaaaacctgagaaagaagcctgaaaatatcccccagcccatcagcaatacatctagagccaacctgaataagctgctgaccgattacaccgaaatgaagaaggcgatcctgcatgtgtactgggaagagttccagaaggaccctgtgggcctgatgagccgggtggcccagcctgccagcaagaagatcgatcagaacaagctgaaacctgagatggacgagaagggcaacctgaccaccgccggctttgcctgctctcagtgtggccagcccctgttcgtgtacaagctggagcaggtgtctgagaagggcaaggcttacaccaactacttcggacggtgcaatgtggccgagcacgaaaagctgatcctgctggcccagctgaagcccgagaaggatagcgacgaagccgtgacatatagcctgggaaagtttgggcagagggccctggatttctacagcattcatgtgaccaaggagtccacccaccccgtgaagcccctggcccagatcgccggaaacagatacgcctccggacctgtgggaaaggccctgagcgacgcatgtatgggcacaatcgcctccttcctgtctaagtaccaggacatcatcatcgaacaccagaaggtggtgaagggcaaccagaagagactggagagcctgcgggagctggccggcaaggaaaacctggaataccctagcgtgaccctgccacctcagcctcacaccaaggagggcgttgatgcctacaacgaagtgatcgcccgggtgcgaatgtgggtgaacctgaacctgtggcagaagctgaagctaagcagagatgatgccaagcctctgctgagactgaagggattcccttcctttcctctggtcgagagacaggccaacgaagtggactggtgggacatggtgtgtaacgtgaagaagctgatcaacgagaaaaaggaggatggcaaggtgttttggcagaatctggctggctacaagagacaggaagccctgagaccatacctgagcagcgaggaagatcggaagaagggaaagaaattcgctcggtaccagctgggcgacctgctgctgcacctggaaaagaagcacggcgaggactggggaaaggtgtacgacgaggcctgggagcggattgacaagaaagtggaaggcctgagcaagcacatcaagctggaagaggaacggagaagcgaggacgcccagagcaaggccgccctgaccgactggctgcgggctaaggccagcttcgtgatcgagggcctgaaggaggccgacaaggacgagttctgcagatgcgagctgaagctgcagaagtggtacggggacctgcggggaaagcccttcgccatcgaagccgagaacagcatcctggacatcagcggcttcagcaagcagtacaactgtgccttcatctggcagaaggacggcgtgaagaagctgaacctgtacctgatcatcaactacttcaagggcggcaagctgcggttcaagaagatcaaacctgaagccttcgaagccaacagattctacaccgtgatcaacaaaaagagcggcgagatcgtgcccatggaggtgaacttcaacttcgacgaccccaacctgatcatcctgcctctggcctttggcaagagacagggcagagaattcatctggaacgacctgctgtccctggaaaccggcagcctgaagctggccaacggaagagtgatcgagaagacactgtacaacagaagaacccggcaggatgagcctgccctgttcgtggccctgaccttcgagcggcgggaggtcctggactcctccaatatcaaaccaatgaacctgatcggcgtggcaagaggcgaaaacatccccgccgtgatcgccctgaccgaccccgagggctgcccactgagccggtttaaggatagcctgggaaacccaacccacatcctgagaatcggcgagagctataaggagaagcagcggaccatccaggccaagaaggaggtggagcagcggagagccggcggctacagccggaagtacgccagcaaagccaagaatctggcagacgatatggtgagaaacaccgctagagatctgctgtactacgccgtgacccaggatgccatgctgatcttcgccaacctgagccggggcttcggccggcagggcaagcggaccttcatggccgagagacagtacacacggatggaggactggctgaccgccaagctggcctacgagggcctgagcaagacctacctgtccaagacactggcccagtacacctccaagacatgcagcaactgtgggtttaccatcaccagcgccgactacgacagggtgctggagaagctgaagaagacagcaacaggctggatgaccacaattaacggcaaggagctgaaggtggagggccagattacctactacaacagatacaagagacagaacgtagtcaaggacctgtccgtcgagctggatagactgagcgaagaatctgtgaacaacgacatctcctcctggacaaagggcagaagcggagaagctctgagcctcctgaagaaaagattctcccatagacccgtgcaggagaagttcgtgtgcctgaactgcggcttcgagacacacgcagccgagcaagccgccctgaacatcgccagatcctggctgttcctgcggagccaggagtacaagaaataccagacaaacaagacaaccggcaacaccgataagagagccttcgtcgagacctggcagtccttttaccggaagaagcttaaggaggtgtggaaacctgccgtgcggtctggcggatctggcggaggctccacaagccaccaggaggtggtgaccttcgaggacgtggccgtgtacttcaccaggaccgagtgggccggcctgagccccgcccagagggccctgtacaggagcgtgatgctggagatctacggcagcctgaccagcctgggctaccccgtgcccaagcccgccctgatcagcctgctggagaggggcgacctgcccgtgggcctggagacccaggacaacccccccgcccagggcaccagggacatctacaccagccccaagaaaaagagaaaagtctaagctgccttctgcggggcttgccttctggccatgcccttcttctctcccttgcacctgtacctcttggtctttgaataaagcctgagtaggaaggctagcaaaaaaaaaaaaaaaaaaaaaaaaaaaaaaaaaaaaaaaaaaaaaaaaaaaaaaaaaaaaaaaaaaaaaaaaaaaaaaaa

SEQ ID NO: 6577 - RNA, 5797 nt, synthetic construct
  source 1..5797: mol_type = other RNA
aggaaataagagagaaaagaagagtaagaagaaatataagagccaccatggcccctaagaagaagcgtaaagtgagccggatggaacgcctcgtctacgaggtgcggcagaagtgcagaaacatcgaggacatctgcatctcctgcggatctctgaacgtgaccctggagcacccactgttcatcggcggcatgtgccagaactgtaaaaactgttttctggagtgtgcctatcaatacgacgatgacggctaccagagctactgcaccatctgttgcggcggaagagaggtgctgatgtgtggaaataacaactgctgccggtgcttctgcgtggaatgcgtggacctgctggtgggccccggcgccgcccaggccgctattaaggaagatccttggaactgctacatgtgcggccacaagggcacatacggcctgctgagacggagagaggactggcctagcagactgcagatgttcttcgccaataaccacgaccaggagttcgacccccctaaggtgtaccctcccgtccccgccgagaagagaaagcccatccgggtcctgagcctgttcgatggcatcgccaccggtctgctggtgctgaaggacctgggcatccaggtggataggtacattgcctccgaggtgtgcgaggactccatcaccgtgggaatggtgcgtcatcagggcaagatcatgtacgtgggcgacgtgcggagcgtgacacagaagcatatccaggagtggggccctttcgacctggtgatcggcggcagcccttgcaatgacctgagcatcgtgaacccagcccggaagggcctgtacgagggaaccggcagactgttcttcgagttttacagactgctgcacgacgcccggcctaaggaaggcgacgaccggcccttcttttggctgttcgagaatgtggtggccatgggagtcagcgacaagcgggatattagccggttcctggagagcaaccccgtgatgatcgatgccaaggaagtgagcgccgcccaccgggccagatacttctggggcaatctgcctggcatgaacagacccctggccagcaccgtgaacgacaagctggagctgcaggagtgcctggagcacggccggatcgccaagttcagcaaggtgagaaccatcaccacccgaagcaacagcatcaaacaaggcaaggaccagcactttcctgtgttcatgaacgagaaggaggacatcctgtggtgtaccgagatggagagagtgttcgggttcccagtccactacacagatgtcagcaacatgtctagactggccagacagagactgctgggaagaagctggtccgtccctgtgatcagacacctgttcgcccctctgaaggagtacttcgcctgcgtgagcagcggcaacagcaacgccaacagccggggccccagcttctctagcggcctggtgccactgtccctgagagggagccacatgggccccatggagatctacaaaaccgtgagcgcctggaagcggcagcctgtgcgcgtgctgagcctgtttcggaatatcgataaagtcctgaaaagcctgggattcctggagagcggctctggctccggcggtggcaccctgaagtacgtggaggatgtgacaaacgtggtcagacgggatgtggagaagtggggccccttcgatctggtgtacggcagcacccaacccctgggcagctcttgtgaccggtgccctggctggtacatgtttcagttccaccggatcctgcagtacgccctgccgagacaggagtcccagcggccattcttttggattttcatggacaacttgctgctgaccgaggatgaccaggaaactaccactcggttcctgcagaccgaagccgtgaccctgcaggacgtgagaggccgggactaccagaacgccatgcgggtgtggtccaacatccctggactgaaaagcaagcacgcacctctgacccctaaagaagaggagtacctgcaggcccaggtgcggagcagaagcaagctggacgcccctaaggtggatctgctggtgaagaattgcctcctgcccctgagagagtacttcaagtatttcagccagaatagtctgcccctgggcggcccaagcagcggcgcccctcctcccagcggcggcagcccagccggctccccaacctctaccgaggagggcacctctgagtccgccacccccgagagcggccctggcacctccaccgagcccagcgagggcagcgcacccggcagccctgccggcagccccacctccacagaggagggaaccagcaccgagcccagcgaaggcagcgccccaggcaccagcaccgagcctagtgagggcggctctggcggcggcagcgcccaggagattaaacggatcaacaagatcagaagaagacttgtgaaagacagcaacaccaagaaggccggcaagacaggccccatgaaaaccctgctggttagagtgatgacacccgatctgagagagcggctggaaaacctgagaaagaagcctgaaaatatcccccagcccatcagcaatacatctagagccaacctgaataagctgctgaccgattacaccgaaatgaagaaggcgatcctgcatgtgtactgggaagagttccagaaggaccctgtgggcctgatgagccgggtggcccagcctgccagcaagaagatcgatcagaacaagctgaaacctgagatggacgagaagggcaacctgaccaccgccggctttgcctgctctcagtgtggccagcccctgttcgtgtacaagctggagcaggtgtctgagaagggcaaggcttacaccaactacttcggacggtgcaatgtggccgagcacgaaaagctgatcctgctggcccagctgaagcccgagaaggatagcgacgaagccgtgacatatagcctgggaaagtttgggcagagggccctggatttctacagcattcatgtgaccaaggagtccacccaccccgtgaagcccctggcccagatcgccggaaacagatacgcctccggacctgtgggaaaggccctgagcgacgcatgtatgggcacaatcgcctccttcctgtctaagtaccaggacatcatcatcgaacaccagaaggtggtgaagggcaaccagaagagactggagagcctgcgggagctggccggcaaggaaaacctggaataccctagcgtgaccctgccacctcagcctcacaccaaggagggcgttgatgcctacaacgaagtgatcgcccgggtgcgaatgtgggtgaacctgaacctgtggcagaagctgaagctaagcagagatgatgccaagcctctgctgagactgaagggattcccttcctttcctctggtcgagagacaggccaacgaagtggactggtgggacatggtgtgtaacgtgaagaagctgatcaacgagaaaaaggaggatggcaaggtgttttggcagaatctggctggctacaagagacaggaagccctgagaccatacctgagcagcgaggaagatcggaagaagggaaagaaattcgctcggtaccagctgggcgacctgctgctgcacctggaaaagaagcacggcgaggactggggaaaggtgtacgacgaggcctgggagcggattgacaagaaagtggaaggcctgagcaagcacatcaagctggaagaggaacggagaagcgaggacgcccagagcaaggccgccctgaccgactggctgcgggctaaggccagcttcgtgatcgagggcctgaaggaggccgacaaggacgagttctgcagatgcgagctgaagctgcagaagtggtacggggacctgcggggaaagcccttcgccatcgaagccgagaacagcatcctggacatcagcggcttcagcaagcagtacaactgtgccttcatctggcagaaggacggcgtgaagaagctgaacctgtacctgatcatcaactacttcaagggcggcaagctgcggttcaagaagatcaaacctgaagccttcgaagccaacagattctacaccgtgatcaacaaaaagagcggcgagatcgtgcccatggaggtgaacttcaacttcgacgaccccaacctgatcatcctgcctctggcctttggcaagagacagggcagagaattcatctggaacgacctgctgtccctggaaaccggcagcctgaagctggccaacggaagagtgatcgagaagacactgtacaacagaagaacccggcaggatgagcctgccctgttcgtggccctgaccttcgagcggcgggaggtcctggactcctccaatatcaaaccaatgaacctgatcggcgtggcaagaggcgaaaacatccccgccgtgatcgccctgaccgaccccgagggctgcccactgagccggtttaaggatagcctgggaaacccaacccacatcctgagaatcggcgagagctataaggagaagcagcggaccatccaggccaagaaggaggtggagcagcggagagccggcggctacagccggaagtacgccagcaaagccaagaatctggcagacgatatggtgagaaacaccgctagagatctgctgtactacgccgtgacccaggatgccatgctgatcttcgccaacctgagccggggcttcggccggcagggcaagcggaccttcatggccgagagacagtacacacggatggaggactggctgaccgccaagctggcctacgagggcctgagcaagacctacctgtccaagacactggcccagtacacctccaagacatgcagcaactgtgggtttaccatcaccagcgccgactacgacagggtgctggagaagctgaagaagacagcaacaggctggatgaccacaattaacggcaaggagctgaaggtggagggccagattacctactacaacagatacaagagacagaacgtagtcaaggacctgtccgtcgagctggatagactgagcgaagaatctgtgaacaacgacatctcctcctggacaaagggcagaagcggagaagctctgagcctcctgaagaaaagattctcccatagacccgtgcaggagaagttcgtgtgcctgaactgcggcttcgagacacacgcagccgagcaagccgccctgaacatcgccagatcctggctgttcctgcggagccaggagtacaagaaataccagacaaacaagacaaccggcaacaccgataagagagccttcgtcgagacctggcagtccttttaccggaagaagcttaaggaggtgtggaaacctgccgtgcggtctggcggatctggcggaggctccacaagcccccaggagcccgtgaccttcgaggacgtggccgtgtacttcacccagaaccagtgggccagcctggaccccatgcagagggccctgtacagggaggtgatgctggagaactacaccaacatggccagcctggccttccccttccccaagcccgtgctggtgagccacctggagaggggcgaggccccctggggccccgacccctgggaggccgaggtgctgaggggcatctgccccggcggcaccagccccaagaaaaagagaaaagtctaagctgccttctgcggggcttgccttctggccatgcccttcttctctcccttgcacctgtacctcttggtctttgaataaagcctgagtaggaaggctagcaaaaaaaaaaaaaaaaaaaaaaaaaaaaaaaaaaaaaaaaaaaaaaaaaaaaaaaaaaaaaaaaaaaaaaaaaaaaaaaa

SEQ ID NO: 6578 - RNA, 5797 nt, synthetic construct
  source 1..5797: mol_type = other RNA
aggaaataagagagaaaagaagagtaagaagaaatataagagccaccatggcccctaagaagaagcgtaaagtgagccggatggaacgcctcgtctacgaggtgcggcagaagtgcagaaacatcgaggacatctgcatctcctgcggatctctgaacgtgaccctggagcacccactgttcatcggcggcatgtgccagaactgtaaaaactgttttctggagtgtgcctatcaatacgacgatgacggctaccagagctactgcaccatctgttgcggcggaagagaggtgctgatgtgtggaaataacaactgctgccggtgcttctgcgtggaatgcgtggacctgctggtgggccccggcgccgcccaggccgctattaaggaagatccttggaactgctacatgtgcggccacaagggcacatacggcctgctgagacggagagaggactggcctagcagactgcagatgttcttcgccaataaccacgaccaggagttcgacccccctaaggtgtaccctcccgtccccgccgagaagagaaagcccatccgggtcctgagcctgttcgatggcatcgccaccggtctgctggtgctgaaggacctgggcatccaggtggataggtacattgcctccgaggtgtgcgaggactccatcaccgtgggaatggtgcgtcatcagggcaagatcatgtacgtgggcgacgtgcggagcgtgacacagaagcatatccaggagtggggccctttcgacctggtgatcggcggcagcccttgcaatgacctgagcatcgtgaacccagcccggaagggcctgtacgagggaaccggcagactgttcttcgagttttacagactgctgcacgacgcccggcctaaggaaggcgacgaccggcccttcttttggctgttcgagaatgtggtggccatgggagtcagcgacaagcgggatattagccggttcctggagagcaaccccgtgatgatcgatgccaaggaagtgagcgccgcccaccgggccagatacttctggggcaatctgcctggcatgaacagacccctggccagcaccgtgaacgacaagctggagctgcaggagtgcctggagcacggccggatcgccaagttcagcaaggtgagaaccatcaccacccgaagcaacagcatcaaacaaggcaaggaccagcactttcctgtgttcatgaacgagaaggaggacatcctgtggtgtaccgagatggagagagtgttcgggttcccagtccactacacagatgtcagcaacatgtctagactggccagacagagactgctgggaagaagctggtccgtccctgtgatcagacacctgttcgcccctctgaaggagtacttcgcctgcgtgagcagcggcaacagcaacgccaacagccggggccccagcttctctagcggcctggtgccactgtccctgagagggagccacatgggccccatggagatctacaaaaccgtgagcgcctggaagcggcagcctgtgcgcgtgctgagcctgtttcggaatatcgataaagtcctgaaaagcctgggattcctggagagcggctctggctccggcggtggcaccctgaagtacgtggaggatgtgacaaacgtggtcagacgggatgtggagaagtggggccccttcgatctggtgtacggcagcacccaacccctgggcagctcttgtgaccggtgccctggctggtacatgtttcagttccaccggatcctgcagtacgccctgccgagacaggagtcccagcggccattcttttggattttcatggacaacttgctgctgaccgaggatgaccaggaaactaccactcggttcctgcagaccgaagccgtgaccctgcaggacgtgagaggccgggactaccagaacgccatgcgggtgtggtccaacatccctggactgaaaagcaagcacgcacctctgacccctaaagaagaggagtacctgcaggcccaggtgcggagcagaagcaagctggacgcccctaaggtggatctgctggtgaagaattgcctcctgcccctgagagagtacttcaagtatttcagccagaatagtctgcccctgggcggcccaagcagcggcgcccctcctcccagcggcggcagcccagccggctccccaacctctaccgaggagggcacctctgagtccgccacccccgagagcggccctggcacctccaccgagcccagcgagggcagcgcacccggcagccctgccggcagccccacctccacagaggagggaaccagcaccgagcccagcgaaggcagcgccccaggcaccagcaccgagcctagtgagggcggctctggcggcggcagcgcccaggagattaaacggatcaacaagatcagaagaagacttgtgaaagacagcaacaccaagaaggccggcaagacaggccccatgaaaaccctgctggttagagtgatgacacccgatctgagagagcggctggaaaacctgagaaagaagcctgaaaatatcccccagcccatcagcaatacatctagagccaacctgaataagctgctgaccgattacaccgaaatgaagaaggcgatcctgcatgtgtactgggaagagttccagaaggaccctgtgggcctgatgagccgggtggcccagcctgccagcaagaagatcgatcagaacaagctgaaacctgagatggacgagaagggcaacctgaccaccgccggctttgcctgctctcagtgtggccagcccctgttcgtgtacaagctggagcaggtgtctgagaagggcaaggcttacaccaactacttcggacggtgcaatgtggccgagcacgaaaagctgatcctgctggcccagctgaagcccgagaaggatagcgacgaagccgtgacatatagcctgggaaagtttgggcagagggccctggatttctacagcattcatgtgaccaaggagtccacccaccccgtgaagcccctggcccagatcgccggaaacagatacgcctccggacctgtgggaaaggccctgagcgacgcatgtatgggcacaatcgcctccttcctgtctaagtaccaggacatcatcatcgaacaccagaaggtggtgaagggcaaccagaagagactggagagcctgcgggagctggccggcaaggaaaacctggaataccctagcgtgaccctgccacctcagcctcacaccaaggagggcgttgatgcctacaacgaagtgatcgcccgggtgcgaatgtgggtgaacctgaacctgtggcagaagctgaagctaagcagagatgatgccaagcctctgctgagactgaagggattcccttcctttcctctggtcgagagacaggccaacgaagtggactggtgggacatggtgtgtaacgtgaagaagctgatcaacgagaaaaaggaggatggcaaggtgttttggcagaatctggctggctacaagagacaggaagccctgagaccatacctgagcagcgaggaagatcggaagaagggaaagaaattcgctcggtaccagctgggcgacctgctgctgcacctggaaaagaagcacggcgaggactggggaaaggtgtacgacgaggcctgggagcggattgacaagaaagtggaaggcctgagcaagcacatcaagctggaagaggaacggagaagcgaggacgcccagagcaaggccgccctgaccgactggctgcgggctaaggccagcttcgtgatcgagggcctgaaggaggccgacaaggacgagttctgcagatgcgagctgaagctgcagaagtggtacggggacctgcggggaaagcccttcgccatcgaagccgagaacagcatcctggacatcagcggcttcagcaagcagtacaactgtgccttcatctggcagaaggacggcgtgaagaagctgaacctgtacctgatcatcaactacttcaagggcggcaagctgcggttcaagaagatcaaacctgaagccttcgaagccaacagattctacaccgtgatcaacaaaaagagcggcgagatcgtgcccatggaggtgaacttcaacttcgacgaccccaacctgatcatcctgcctctggcctttggcaagagacagggcagagaattcatctggaacgacctgctgtccctggaaaccggcagcctgaagctggccaacggaagagtgatcgagaagacactgtacaacagaagaacccggcaggatgagcctgccctgttcgtggccctgaccttcgagcggcgggaggtcctggactcctccaatatcaaaccaatgaacctgatcggcgtggcaagaggcgaaaacatccccgccgtgatcgccctgaccgaccccgagggctgcccactgagccggtttaaggatagcctgggaaacccaacccacatcctgagaatcggcgagagctataaggagaagcagcggaccatccaggccaagaaggaggtggagcagcggagagccggcggctacagccggaagtacgccagcaaagccaagaatctggcagacgatatggtgagaaacaccgctagagatctgctgtactacgccgtgacccaggatgccatgctgatcttcgccaacctgagccggggcttcggccggcagggcaagcggaccttcatggccgagagacagtacacacggatggaggactggctgaccgccaagctggcctacgagggcctgagcaagacctacctgtccaagacactggcccagtacacctccaagacatgcagcaactgtgggtttaccatcaccagcgccgactacgacagggtgctggagaagctgaagaagacagcaacaggctggatgaccacaattaacggcaaggagctgaaggtggagggccagattacctactacaacagatacaagagacagaacgtagtcaaggacctgtccgtcgagctggatagactgagcgaagaatctgtgaacaacgacatctcctcctggacaaagggcagaagcggagaagctctgagcctcctgaagaaaagattctcccatagacccgtgcaggagaagttcgtgtgcctgaactgcggcttcgagacacacgcagccgagcaagccgccctgaacatcgccagatcctggctgttcctgcggagccaggagtacaagaaataccagacaaacaagacaaccggcaacaccgataagagagccttcgtcgagacctggcagtccttttaccggaagaagcttaaggaggtgtggaaacctgccgtgcggtctggcggatctggcggaggctccacaagcagcaagctgagcgaggccttcgaggacgtggccgtgtacttcacctggaaggagtgggccctgctggaggccgccgacaagatgctgtacagggaccagatgctgaagaactaccaggccctgttcagcctgggctacaggggccccacccccgacctgatctgcaggatccagaggggcgagatggagctgtgggtgagcgacctggaggaggccggcgagagcagcctgagcgaggacagcaccagccccaagaaaaagagaaaagtctaagctgccttctgcggggcttgccttctggccatgcccttcttctctcccttgcacctgtacctcttggtctttgaataaagcctgagtaggaaggctagcaaaaaaaaaaaaaaaaaaaaaaaaaaaaaaaaaaaaaaaaaaaaaaaaaaaaaaaaaaaaaaaaaaaaaaaaaaaaaaaa

SEQ ID NO: 6579 - RNA, 5797 nt, synthetic construct
  source 1..5797: mol_type = other RNA
aggaaataagagagaaaagaagagtaagaagaaatataagagccaccatggcccctaagaagaagcgtaaagtgagccggatggaacgcctcgtctacgaggtgcggcagaagtgcagaaacatcgaggacatctgcatctcctgcggatctctgaacgtgaccctggagcacccactgttcatcggcggcatgtgccagaactgtaaaaactgttttctggagtgtgcctatcaatacgacgatgacggctaccagagctactgcaccatctgttgcggcggaagagaggtgctgatgtgtggaaataacaactgctgccggtgcttctgcgtggaatgcgtggacctgctggtgggccccggcgccgcccaggccgctattaaggaagatccttggaactgctacatgtgcggccacaagggcacatacggcctgctgagacggagagaggactggcctagcagactgcagatgttcttcgccaataaccacgaccaggagttcgacccccctaaggtgtaccctcccgtccccgccgagaagagaaagcccatccgggtcctgagcctgttcgatggcatcgccaccggtctgctggtgctgaaggacctgggcatccaggtggataggtacattgcctccgaggtgtgcgaggactccatcaccgtgggaatggtgcgtcatcagggcaagatcatgtacgtgggcgacgtgcggagcgtgacacagaagcatatccaggagtggggccctttcgacctggtgatcggcggcagcccttgcaatgacctgagcatcgtgaacccagcccggaagggcctgtacgagggaaccggcagactgttcttcgagttttacagactgctgcacgacgcccggcctaaggaaggcgacgaccggcccttcttttggctgttcgagaatgtggtggccatgggagtcagcgacaagcgggatattagccggttcctggagagcaaccccgtgatgatcgatgccaaggaagtgagcgccgcccaccgggccagatacttctggggcaatctgcctggcatgaacagacccctggccagcaccgtgaacgacaagctggagctgcaggagtgcctggagcacggccggatcgccaagttcagcaaggtgagaaccatcaccacccgaagcaacagcatcaaacaaggcaaggaccagcactttcctgtgttcatgaacgagaaggaggacatcctgtggtgtaccgagatggagagagtgttcgggttcccagtccactacacagatgtcagcaacatgtctagactggccagacagagactgctgggaagaagctggtccgtccctgtgatcagacacctgttcgcccctctgaaggagtacttcgcctgcgtgagcagcggcaacagcaacgccaacagccggggccccagcttctctagcggcctggtgccactgtccctgagagggagccacatgggccccatggagatctacaaaaccgtgagcgcctggaagcggcagcctgtgcgcgtgctgagcctgtttcggaatatcgataaagtcctgaaaagcctgggattcctggagagcggctctggctccggcggtggcaccctgaagtacgtggaggatgtgacaaacgtggtcagacgggatgtggagaagtggggccccttcgatctggtgtacggcagcacccaacccctgggcagctcttgtgaccggtgccctggctggtacatgtttcagttccaccggatcctgcagtacgccctgccgagacaggagtcccagcggccattcttttggattttcatggacaacttgctgctgaccgaggatgaccaggaaactaccactcggttcctgcagaccgaagccgtgaccctgcaggacgtgagaggccgggactaccagaacgccatgcgggtgtggtccaacatccctggactgaaaagcaagcacgcacctctgacccctaaagaagaggagtacctgcaggcccaggtgcggagcagaagcaagctggacgcccctaaggtggatctgctggtgaagaattgcctcctgcccctgagagagtacttcaagtatttcagccagaatagtctgcccctgggcggcccaagcagcggcgcccctcctcccagcggcggcagcccagccggctccccaacctctaccgaggagggcacctctgagtccgccacccccgagagcggccctggcacctccaccgagcccagcgagggcagcgcacccggcagccctgccggcagccccacctccacagaggagggaaccagcaccgagcccagcgaaggcagcgccccaggcaccagcaccgagcctagtgagggcggctctggcggcggcagcgcccaggagattaaacggatcaacaagatcagaagaagacttgtgaaagacagcaacaccaagaaggccggcaagacaggccccatgaaaaccctgctggttagagtgatgacacccgatctgagagagcggctggaaaacctgagaaagaagcctgaaaatatcccccagcccatcagcaatacatctagagccaacctgaataagctgctgaccgattacaccgaaatgaagaaggcgatcctgcatgtgtactgggaagagttccagaaggaccctgtgggcctgatgagccgggtggcccagcctgccagcaagaagatcgatcagaacaagctgaaacctgagatggacgagaagggcaacctgaccaccgccggctttgcctgctctcagtgtggccagcccctgttcgtgtacaagctggagcaggtgtctgagaagggcaaggcttacaccaactacttcggacggtgcaatgtggccgagcacgaaaagctgatcctgctggcccagctgaagcccgagaaggatagcgacgaagccgtgacatatagcctgggaaagtttgggcagagggccctggatttctacagcattcatgtgaccaaggagtccacccaccccgtgaagcccctggcccagatcgccggaaacagatacgcctccggacctgtgggaaaggccctgagcgacgcatgtatgggcacaatcgcctccttcctgtctaagtaccaggacatcatcatcgaacaccagaaggtggtgaagggcaaccagaagagactggagagcctgcgggagctggccggcaaggaaaacctggaataccctagcgtgaccctgccacctcagcctcacaccaaggagggcgttgatgcctacaacgaagtgatcgcccgggtgcgaatgtgggtgaacctgaacctgtggcagaagctgaagctaagcagagatgatgccaagcctctgctgagactgaagggattcccttcctttcctctggtcgagagacaggccaacgaagtggactggtgggacatggtgtgtaacgtgaagaagctgatcaacgagaaaaaggaggatggcaaggtgttttggcagaatctggctggctacaagagacaggaagccctgagaccatacctgagcagcgaggaagatcggaagaagggaaagaaattcgctcggtaccagctgggcgacctgctgctgcacctggaaaagaagcacggcgaggactggggaaaggtgtacgacgaggcctgggagcggattgacaagaaagtggaaggcctgagcaagcacatcaagctggaagaggaacggagaagcgaggacgcccagagcaaggccgccctgaccgactggctgcgggctaaggccagcttcgtgatcgagggcctgaaggaggccgacaaggacgagttctgcagatgcgagctgaagctgcagaagtggtacggggacctgcggggaaagcccttcgccatcgaagccgagaacagcatcctggacatcagcggcttcagcaagcagtacaactgtgccttcatctggcagaaggacggcgtgaagaagctgaacctgtacctgatcatcaactacttcaagggcggcaagctgcggttcaagaagatcaaacctgaagccttcgaagccaacagattctacaccgtgatcaacaaaaagagcggcgagatcgtgcccatggaggtgaacttcaacttcgacgaccccaacctgatcatcctgcctctggcctttggcaagagacagggcagagaattcatctggaacgacctgctgtccctggaaaccggcagcctgaagctggccaacggaagagtgatcgagaagacactgtacaacagaagaacccggcaggatgagcctgccctgttcgtggccctgaccttcgagcggcgggaggtcctggactcctccaatatcaaaccaatgaacctgatcggcgtggcaagaggcgaaaacatccccgccgtgatcgccctgaccgaccccgagggctgcccactgagccggtttaaggatagcctgggaaacccaacccacatcctgagaatcggcgagagctataaggagaagcagcggaccatccaggccaagaaggaggtggagcagcggagagccggcggctacagccggaagtacgccagcaaagccaagaatctggcagacgatatggtgagaaacaccgctagagatctgctgtactacgccgtgacccaggatgccatgctgatcttcgccaacctgagccggggcttcggccggcagggcaagcggaccttcatggccgagagacagtacacacggatggaggactggctgaccgccaagctggcctacgagggcctgagcaagacctacctgtccaagacactggcccagtacacctccaagacatgcagcaactgtgggtttaccatcaccagcgccgactacgacagggtgctggagaagctgaagaagacagcaacaggctggatgaccacaattaacggcaaggagctgaaggtggagggccagattacctactacaacagatacaagagacagaacgtagtcaaggacctgtccgtcgagctggatagactgagcgaagaatctgtgaacaacgacatctcctcctggacaaagggcagaagcggagaagctctgagcctcctgaagaaaagattctcccatagacccgtgcaggagaagttcgtgtgcctgaactgcggcttcgagacacacgcagccgagcaagccgccctgaacatcgccagatcctggctgttcctgcggagccaggagtacaagaaataccagacaaacaagacaaccggcaacaccgataagagagccttcgtcgagacctggcagtccttttaccggaagaagcttaaggaggtgtggaaacctgccgtgcggtctggcggatctggcggaggctccacaagcgtgaccttcgaggacgtggccgtgtacttcagctgggaggagtggggcctgctggacgaggcccagaggtgcctgtaccaggacgtgatgctggagaacctggccctgatcaacagcctgggcctgaggcacggcgccgaggacgaggacgcccccgagcacagggtgagcgtgcaggccgccagccaggtgggcaccaggaaggccgtggtgagcccccagaaggcccaccccagggaggtgaccagccccaagaaaaagagaaaagtctaagctgccttctgcggggcttgccttctggccatgcccttcttctctcccttgcacctgtacctcttggtctttgaataaagcctgagtaggaaggctagcaaaaaaaaaaaaaaaaaaaaaaaaaaaaaaaaaaaaaaaaaaaaaaaaaaaaaaaaaaaaaaaaaaaaaaaaaaaaaaaa

SEQ ID NO: 6580 - RNA, 5797 nt, synthetic construct
  source 1..5797: mol_type = other RNA
aggaaataagagagaaaagaagagtaagaagaaatataagagccaccatggcccctaagaagaagcgtaaagtgagccggatggaacgcctcgtctacgaggtgcggcagaagtgcagaaacatcgaggacatctgcatctcctgcggatctctgaacgtgaccctggagcacccactgttcatcggcggcatgtgccagaactgtaaaaactgttttctggagtgtgcctatcaatacgacgatgacggctaccagagctactgcaccatctgttgcggcggaagagaggtgctgatgtgtggaaataacaactgctgccggtgcttctgcgtggaatgcgtggacctgctggtgggccccggcgccgcccaggccgctattaaggaagatccttggaactgctacatgtgcggccacaagggcacatacggcctgctgagacggagagaggactggcctagcagactgcagatgttcttcgccaataaccacgaccaggagttcgacccccctaaggtgtaccctcccgtccccgccgagaagagaaagcccatccgggtcctgagcctgttcgatggcatcgccaccggtctgctggtgctgaaggacctgggcatccaggtggataggtacattgcctccgaggtgtgcgaggactccatcaccgtgggaatggtgcgtcatcagggcaagatcatgtacgtgggcgacgtgcggagcgtgacacagaagcatatccaggagtggggccctttcgacctggtgatcggcggcagcccttgcaatgacctgagcatcgtgaacccagcccggaagggcctgtacgagggaaccggcagactgttcttcgagttttacagactgctgcacgacgcccggcctaaggaaggcgacgaccggcccttcttttggctgttcgagaatgtggtggccatgggagtcagcgacaagcgggatattagccggttcctggagagcaaccccgtgatgatcgatgccaaggaagtgagcgccgcccaccgggccagatacttctggggcaatctgcctggcatgaacagacccctggccagcaccgtgaacgacaagctggagctgcaggagtgcctggagcacggccggatcgccaagttcagcaaggtgagaaccatcaccacccgaagcaacagcatcaaacaaggcaaggaccagcactttcctgtgttcatgaacgagaaggaggacatcctgtggtgtaccgagatggagagagtgttcgggttcccagtccactacacagatgtcagcaacatgtctagactggccagacagagactgctgggaagaagctggtccgtccctgtgatcagacacctgttcgcccctctgaaggagtacttcgcctgcgtgagcagcggcaacagcaacgccaacagccggggccccagcttctctagcggcctggtgccactgtccctgagagggagccacatgggccccatggagatctacaaaaccgtgagcgcctggaagcggcagcctgtgcgcgtgctgagcctgtttcggaatatcgataaagtcctgaaaagcctgggattcctggagagcggctctggctccggcggtggcaccctgaagtacgtggaggatgtgacaaacgtggtcagacgggatgtggagaagtggggccccttcgatctggtgtacggcagcacccaacccctgggcagctcttgtgaccggtgccctggctggtacatgtttcagttccaccggatcctgcagtacgccctgccgagacaggagtcccagcggccattcttttggattttcatggacaacttgctgctgaccgaggatgaccaggaaactaccactcggttcctgcagaccgaagccgtgaccctgcaggacgtgagaggccgggactaccagaacgccatgcgggtgtggtccaacatccctggactgaaaagcaagcacgcacctctgacccctaaagaagaggagtacctgcaggcccaggtgcggagcagaagcaagctggacgcccctaaggtggatctgctggtgaagaattgcctcctgcccctgagagagtacttcaagtatttcagccagaatagtctgcccctgggcggcccaagcagcggcgcccctcctcccagcggcggcagcccagccggctccccaacctctaccgaggagggcacctctgagtccgccacccccgagagcggccctggcacctccaccgagcccagcgagggcagcgcacccggcagccctgccggcagccccacctccacagaggagggaaccagcaccgagcccagcgaaggcagcgccccaggcaccagcaccgagcctagtgagggcggctctggcggcggcagcgcccaggagattaaacggatcaacaagatcagaagaagacttgtgaaagacagcaacaccaagaaggccggcaagacaggccccatgaaaaccctgctggttagagtgatgacacccgatctgagagagcggctggaaaacctgagaaagaagcctgaaaatatcccccagcccatcagcaatacatctagagccaacctgaataagctgctgaccgattacaccgaaatgaagaaggcgatcctgcatgtgtactgggaagagttccagaaggaccctgtgggcctgatgagccgggtggcccagcctgccagcaagaagatcgatcagaacaagctgaaacctgagatggacgagaagggcaacctgaccaccgccggctttgcctgctctcagtgtggccagcccctgttcgtgtacaagctggagcaggtgtctgagaagggcaaggcttacaccaactacttcggacggtgcaatgtggccgagcacgaaaagctgatcctgctggcccagctgaagcccgagaaggatagcgacgaagccgtgacatatagcctgggaaagtttgggcagagggccctggatttctacagcattcatgtgaccaaggagtccacccaccccgtgaagcccctggcccagatcgccggaaacagatacgcctccggacctgtgggaaaggccctgagcgacgcatgtatgggcacaatcgcctccttcctgtctaagtaccaggacatcatcatcgaacaccagaaggtggtgaagggcaaccagaagagactggagagcctgcgggagctggccggcaaggaaaacctggaataccctagcgtgaccctgccacctcagcctcacaccaaggagggcgttgatgcctacaacgaagtgatcgcccgggtgcgaatgtgggtgaacctgaacctgtggcagaagctgaagctaagcagagatgatgccaagcctctgctgagactgaagggattcccttcctttcctctggtcgagagacaggccaacgaagtggactggtgggacatggtgtgtaacgtgaagaagctgatcaacgagaaaaaggaggatggcaaggtgttttggcagaatctggctggctacaagagacaggaagccctgagaccatacctgagcagcgaggaagatcggaagaagggaaagaaattcgctcggtaccagctgggcgacctgctgctgcacctggaaaagaagcacggcgaggactggggaaaggtgtacgacgaggcctgggagcggattgacaagaaagtggaaggcctgagcaagcacatcaagctggaagaggaacggagaagcgaggacgcccagagcaaggccgccctgaccgactggctgcgggctaaggccagcttcgtgatcgagggcctgaaggaggccgacaaggacgagttctgcagatgcgagctgaagctgcagaagtggtacggggacctgcggggaaagcccttcgccatcgaagccgagaacagcatcctggacatcagcggcttcagcaagcagtacaactgtgccttcatctggcagaaggacggcgtgaagaagctgaacctgtacctgatcatcaactacttcaagggcggcaagctgcggttcaagaagatcaaacctgaagccttcgaagccaacagattctacaccgtgatcaacaaaaagagcggcgagatcgtgcccatggaggtgaacttcaacttcgacgaccccaacctgatcatcctgcctctggcctttggcaagagacagggcagagaattcatctggaacgacctgctgtccctggaaaccggcagcctgaagctggccaacggaagagtgatcgagaagacactgtacaacagaagaacccggcaggatgagcctgccctgttcgtggccctgaccttcgagcggcgggaggtcctggactcctccaatatcaaaccaatgaacctgatcggcgtggcaagaggcgaaaacatccccgccgtgatcgccctgaccgaccccgagggctgcccactgagccggtttaaggatagcctgggaaacccaacccacatcctgagaatcggcgagagctataaggagaagcagcggaccatccaggccaagaaggaggtggagcagcggagagccggcggctacagccggaagtacgccagcaaagccaagaatctggcagacgatatggtgagaaacaccgctagagatctgctgtactacgccgtgacccaggatgccatgctgatcttcgccaacctgagccggggcttcggccggcagggcaagcggaccttcatggccgagagacagtacacacggatggaggactggctgaccgccaagctggcctacgagggcctgagcaagacctacctgtccaagacactggcccagtacacctccaagacatgcagcaactgtgggtttaccatcaccagcgccgactacgacagggtgctggagaagctgaagaagacagcaacaggctggatgaccacaattaacggcaaggagctgaaggtggagggccagattacctactacaacagatacaagagacagaacgtagtcaaggacctgtccgtcgagctggatagactgagcgaagaatctgtgaacaacgacatctcctcctggacaaagggcagaagcggagaagctctgagcctcctgaagaaaagattctcccatagacccgtgcaggagaagttcgtgtgcctgaactgcggcttcgagacacacgcagccgagcaagccgccctgaacatcgccagatcctggctgttcctgcggagccaggagtacaagaaataccagacaaacaagacaaccggcaacaccgataagagagccttcgtcgagacctggcagtccttttaccggaagaagcttaaggaggtgtggaaacctgccgtgcggtctggcggatctggcggaggctccacaagcaagcccggcaccgtgagcttcgccgacgtggccgtgtacttcagccccgaggagtggggctgcctgaggcccgcccagagggccctgtacagggacgtgatgcaggagacctacggccacctgggcgccctgggcttccccggccccaagcccgccctgatcagctggatggagcaggagagcgaggcctggagccccgccgcccaggaccccgagaagggcgagaggctgggcggcgccaggaccagccccaagaaaaagagaaaagtctaagctgccttctgcggggcttgccttctggccatgcccttcttctctcccttgcacctgtacctcttggtctttgaataaagcctgagtaggaaggctagcaaaaaaaaaaaaaaaaaaaaaaaaaaaaaaaaaaaaaaaaaaaaaaaaaaaaaaaaaaaaaaaaaaaaaaaaaaaaaaaa

SEQ ID NO: 6581 - RNA, 5797 nt, synthetic construct
  source 1..5797: mol_type = other RNA
aggaaataagagagaaaagaagagtaagaagaaatataagagccaccatggcccctaagaagaagcgtaaagtgagccggatggaacgcctcgtctacgaggtgcggcagaagtgcagaaacatcgaggacatctgcatctcctgcggatctctgaacgtgaccctggagcacccactgttcatcggcggcatgtgccagaactgtaaaaactgttttctggagtgtgcctatcaatacgacgatgacggctaccagagctactgcaccatctgttgcggcggaagagaggtgctgatgtgtggaaataacaactgctgccggtgcttctgcgtggaatgcgtggacctgctggtgggccccggcgccgcccaggccgctattaaggaagatccttggaactgctacatgtgcggccacaagggcacatacggcctgctgagacggagagaggactggcctagcagactgcagatgttcttcgccaataaccacgaccaggagttcgacccccctaaggtgtaccctcccgtccccgccgagaagagaaagcccatccgggtcctgagcctgttcgatggcatcgccaccggtctgctggtgctgaaggacctgggcatccaggtggataggtacattgcctccgaggtgtgcgaggactccatcaccgtgggaatggtgcgtcatcagggcaagatcatgtacgtgggcgacgtgcggagcgtgacacagaagcatatccaggagtggggccctttcgacctggtgatcggcggcagcccttgcaatgacctgagcatcgtgaacccagcccggaagggcctgtacgagggaaccggcagactgttcttcgagttttacagactgctgcacgacgcccggcctaaggaaggcgacgaccggcccttcttttggctgttcgagaatgtggtggccatgggagtcagcgacaagcgggatattagccggttcctggagagcaaccccgtgatgatcgatgccaaggaagtgagcgccgcccaccgggccagatacttctggggcaatctgcctggcatgaacagacccctggccagcaccgtgaacgacaagctggagctgcaggagtgcctggagcacggccggatcgccaagttcagcaaggtgagaaccatcaccacccgaagcaacagcatcaaacaaggcaaggaccagcactttcctgtgttcatgaacgagaaggaggacatcctgtggtgtaccgagatggagagagtgttcgggttcccagtccactacacagatgtcagcaacatgtctagactggccagacagagactgctgggaagaagctggtccgtccctgtgatcagacacctgttcgcccctctgaaggagtacttcgcctgcgtgagcagcggcaacagcaacgccaacagccggggccccagcttctctagcggcctggtgccactgtccctgagagggagccacatgggccccatggagatctacaaaaccgtgagcgcctggaagcggcagcctgtgcgcgtgctgagcctgtttcggaatatcgataaagtcctgaaaagcctgggattcctggagagcggctctggctccggcggtggcaccctgaagtacgtggaggatgtgacaaacgtggtcagacgggatgtggagaagtggggccccttcgatctggtgtacggcagcacccaacccctgggcagctcttgtgaccggtgccctggctggtacatgtttcagttccaccggatcctgcagtacgccctgccgagacaggagtcccagcggccattcttttggattttcatggacaacttgctgctgaccgaggatgaccaggaaactaccactcggttcctgcagaccgaagccgtgaccctgcaggacgtgagaggccgggactaccagaacgccatgcgggtgtggtccaacatccctggactgaaaagcaagcacgcacctctgacccctaaagaagaggagtacctgcaggcccaggtgcggagcagaagcaagctggacgcccctaaggtggatctgctggtgaagaattgcctcctgcccctgagagagtacttcaagtatttcagccagaatagtctgcccctgggcggcccaagcagcggcgcccctcctcccagcggcggcagcccagccggctccccaacctctaccgaggagggcacctctgagtccgccacccccgagagcggccctggcacctccaccgagcccagcgagggcagcgcacccggcagccctgccggcagccccacctccacagaggagggaaccagcaccgagcccagcgaaggcagcgccccaggcaccagcaccgagcctagtgagggcggctctggcggcggcagcgcccaggagattaaacggatcaacaagatcagaagaagacttgtgaaagacagcaacaccaagaaggccggcaagacaggccccatgaaaaccctgctggttagagtgatgacacccgatctgagagagcggctggaaaacctgagaaagaagcctgaaaatatcccccagcccatcagcaatacatctagagccaacctgaataagctgctgaccgattacaccgaaatgaagaaggcgatcctgcatgtgtactgggaagagttccagaaggaccctgtgggcctgatgagccgggtggcccagcctgccagcaagaagatcgatcagaacaagctgaaacctgagatggacgagaagggcaacctgaccaccgccggctttgcctgctctcagtgtggccagcccctgttcgtgtacaagctggagcaggtgtctgagaagggcaaggcttacaccaactacttcggacggtgcaatgtggccgagcacgaaaagctgatcctgctggcccagctgaagcccgagaaggatagcgacgaagccgtgacatatagcctgggaaagtttgggcagagggccctggatttctacagcattcatgtgaccaaggagtccacccaccccgtgaagcccctggcccagatcgccggaaacagatacgcctccggacctgtgggaaaggccctgagcgacgcatgtatgggcacaatcgcctccttcctgtctaagtaccaggacatcatcatcgaacaccagaaggtggtgaagggcaaccagaagagactggagagcctgcgggagctggccggcaaggaaaacctggaataccctagcgtgaccctgccacctcagcctcacaccaaggagggcgttgatgcctacaacgaagtgatcgcccgggtgcgaatgtgggtgaacctgaacctgtggcagaagctgaagctaagcagagatgatgccaagcctctgctgagactgaagggattcccttcctttcctctggtcgagagacaggccaacgaagtggactggtgggacatggtgtgtaacgtgaagaagctgatcaacgagaaaaaggaggatggcaaggtgttttggcagaatctggctggctacaagagacaggaagccctgagaccatacctgagcagcgaggaagatcggaagaagggaaagaaattcgctcggtaccagctgggcgacctgctgctgcacctggaaaagaagcacggcgaggactggggaaaggtgtacgacgaggcctgggagcggattgacaagaaagtggaaggcctgagcaagcacatcaagctggaagaggaacggagaagcgaggacgcccagagcaaggccgccctgaccgactggctgcgggctaaggccagcttcgtgatcgagggcctgaaggaggccgacaaggacgagttctgcagatgcgagctgaagctgcagaagtggtacggggacctgcggggaaagcccttcgccatcgaagccgagaacagcatcctggacatcagcggcttcagcaagcagtacaactgtgccttcatctggcagaaggacggcgtgaagaagctgaacctgtacctgatcatcaactacttcaagggcggcaagctgcggttcaagaagatcaaacctgaagccttcgaagccaacagattctacaccgtgatcaacaaaaagagcggcgagatcgtgcccatggaggtgaacttcaacttcgacgaccccaacctgatcatcctgcctctggcctttggcaagagacagggcagagaattcatctggaacgacctgctgtccctggaaaccggcagcctgaagctggccaacggaagagtgatcgagaagacactgtacaacagaagaacccggcaggatgagcctgccctgttcgtggccctgaccttcgagcggcgggaggtcctggactcctccaatatcaaaccaatgaacctgatcggcgtggcaagaggcgaaaacatccccgccgtgatcgccctgaccgaccccgagggctgcccactgagccggtttaaggatagcctgggaaacccaacccacatcctgagaatcggcgagagctataaggagaagcagcggaccatccaggccaagaaggaggtggagcagcggagagccggcggctacagccggaagtacgccagcaaagccaagaatctggcagacgatatggtgagaaacaccgctagagatctgctgtactacgccgtgacccaggatgccatgctgatcttcgccaacctgagccggggcttcggccggcagggcaagcggaccttcatggccgagagacagtacacacggatggaggactggctgaccgccaagctggcctacgagggcctgagcaagacctacctgtccaagacactggcccagtacacctccaagacatgcagcaactgtgggtttaccatcaccagcgccgactacgacagggtgctggagaagctgaagaagacagcaacaggctggatgaccacaattaacggcaaggagctgaaggtggagggccagattacctactacaacagatacaagagacagaacgtagtcaaggacctgtccgtcgagctggatagactgagcgaagaatctgtgaacaacgacatctcctcctggacaaagggcagaagcggagaagctctgagcctcctgaagaaaagattctcccatagacccgtgcaggagaagttcgtgtgcctgaactgcggcttcgagacacacgcagccgagcaagccgccctgaacatcgccagatcctggctgttcctgcggagccaggagtacaagaaataccagacaaacaagacaaccggcaacaccgataagagagccttcgtcgagacctggcagtccttttaccggaagaagcttaaggaggtgtggaaacctgccgtgcggtctggcggatctggcggaggctccacaagcacccccgacgtggtgaccttcgaggacgtggccgtgtgcttcagcagcggcgagtggcagtgcctgaccagggcccagaggcacctgtacaccgacgtgatgctggagaactacggcaacatgctgagcgccggcctggcctgccccaagccccccctgatcagccacctggagcagggcgccgtgccctgcgccgaggacctgcaggactggggcttcctgacctgcagcttccccgtgagcaccagccccaagaaaaagagaaaagtctaagctgccttctgcggggcttgccttctggccatgcccttcttctctcccttgcacctgtacctcttggtctttgaataaagcctgagtaggaaggctagcaaaaaaaaaaaaaaaaaaaaaaaaaaaaaaaaaaaaaaaaaaaaaaaaaaaaaaaaaaaaaaaaaaaaaaaaaaaaaaaa

SEQ ID NO: 6582 - RNA, 5797 nt, synthetic construct
  source 1..5797: mol_type = other RNA
aggaaataagagagaaaagaagagtaagaagaaatataagagccaccatggcccctaagaagaagcgtaaagtgagccggatggaacgcctcgtctacgaggtgcggcagaagtgcagaaacatcgaggacatctgcatctcctgcggatctctgaacgtgaccctggagcacccactgttcatcggcggcatgtgccagaactgtaaaaactgttttctggagtgtgcctatcaatacgacgatgacggctaccagagctactgcaccatctgttgcggcggaagagaggtgctgatgtgtggaaataacaactgctgccggtgcttctgcgtggaatgcgtggacctgctggtgggccccggcgccgcccaggccgctattaaggaagatccttggaactgctacatgtgcggccacaagggcacatacggcctgctgagacggagagaggactggcctagcagactgcagatgttcttcgccaataaccacgaccaggagttcgacccccctaaggtgtaccctcccgtccccgccgagaagagaaagcccatccgggtcctgagcctgttcgatggcatcgccaccggtctgctggtgctgaaggacctgggcatccaggtggataggtacattgcctccgaggtgtgcgaggactccatcaccgtgggaatggtgcgtcatcagggcaagatcatgtacgtgggcgacgtgcggagcgtgacacagaagcatatccaggagtggggccctttcgacctggtgatcggcggcagcccttgcaatgacctgagcatcgtgaacccagcccggaagggcctgtacgagggaaccggcagactgttcttcgagttttacagactgctgcacgacgcccggcctaaggaaggcgacgaccggcccttcttttggctgttcgagaatgtggtggccatgggagtcagcgacaagcgggatattagccggttcctggagagcaaccccgtgatgatcgatgccaaggaagtgagcgccgcccaccgggccagatacttctggggcaatctgcctggcatgaacagacccctggccagcaccgtgaacgacaagctggagctgcaggagtgcctggagcacggccggatcgccaagttcagcaaggtgagaaccatcaccacccgaagcaacagcatcaaacaaggcaaggaccagcactttcctgtgttcatgaacgagaaggaggacatcctgtggtgtaccgagatggagagagtgttcgggttcccagtccactacacagatgtcagcaacatgtctagactggccagacagagactgctgggaagaagctggtccgtccctgtgatcagacacctgttcgcccctctgaaggagtacttcgcctgcgtgagcagcggcaacagcaacgccaacagccggggccccagcttctctagcggcctggtgccactgtccctgagagggagccacatgggccccatggagatctacaaaaccgtgagcgcctggaagcggcagcctgtgcgcgtgctgagcctgtttcggaatatcgataaagtcctgaaaagcctgggattcctggagagcggctctggctccggcggtggcaccctgaagtacgtggaggatgtgacaaacgtggtcagacgggatgtggagaagtggggccccttcgatctggtgtacggcagcacccaacccctgggcagctcttgtgaccggtgccctggctggtacatgtttcagttccaccggatcctgcagtacgccctgccgagacaggagtcccagcggccattcttttggattttcatggacaacttgctgctgaccgaggatgaccaggaaactaccactcggttcctgcagaccgaagccgtgaccctgcaggacgtgagaggccgggactaccagaacgccatgcgggtgtggtccaacatccctggactgaaaagcaagcacgcacctctgacccctaaagaagaggagtacctgcaggcccaggtgcggagcagaagcaagctggacgcccctaaggtggatctgctggtgaagaattgcctcctgcccctgagagagtacttcaagtatttcagccagaatagtctgcccctgggcggcccaagcagcggcgcccctcctcccagcggcggcagcccagccggctccccaacctctaccgaggagggcacctctgagtccgccacccccgagagcggccctggcacctccaccgagcccagcgagggcagcgcacccggcagccctgccggcagccccacctccacagaggagggaaccagcaccgagcccagcgaaggcagcgccccaggcaccagcaccgagcctagtgagggcggctctggcggcggcagcgcccaggagattaaacggatcaacaagatcagaagaagacttgtgaaagacagcaacaccaagaaggccggcaagacaggccccatgaaaaccctgctggttagagtgatgacacccgatctgagagagcggctggaaaacctgagaaagaagcctgaaaatatcccccagcccatcagcaatacatctagagccaacctgaataagctgctgaccgattacaccgaaatgaagaaggcgatcctgcatgtgtactgggaagagttccagaaggaccctgtgggcctgatgagccgggtggcccagcctgccagcaagaagatcgatcagaacaagctgaaacctgagatggacgagaagggcaacctgaccaccgccggctttgcctgctctcagtgtggccagcccctgttcgtgtacaagctggagcaggtgtctgagaagggcaaggcttacaccaactacttcggacggtgcaatgtggccgagcacgaaaagctgatcctgctggcccagctgaagcccgagaaggatagcgacgaagccgtgacatatagcctgggaaagtttgggcagagggccctggatttctacagcattcatgtgaccaaggagtccacccaccccgtgaagcccctggcccagatcgccggaaacagatacgcctccggacctgtgggaaaggccctgagcgacgcatgtatgggcacaatcgcctccttcctgtctaagtaccaggacatcatcatcgaacaccagaaggtggtgaagggcaaccagaagagactggagagcctgcgggagctggccggcaaggaaaacctggaataccctagcgtgaccctgccacctcagcctcacaccaaggagggcgttgatgcctacaacgaagtgatcgcccgggtgcgaatgtgggtgaacctgaacctgtggcagaagctgaagctaagcagagatgatgccaagcctctgctgagactgaagggattcccttcctttcctctggtcgagagacaggccaacgaagtggactggtgggacatggtgtgtaacgtgaagaagctgatcaacgagaaaaaggaggatggcaaggtgttttggcagaatctggctggctacaagagacaggaagccctgagaccatacctgagcagcgaggaagatcggaagaagggaaagaaattcgctcggtaccagctgggcgacctgctgctgcacctggaaaagaagcacggcgaggactggggaaaggtgtacgacgaggcctgggagcggattgacaagaaagtggaaggcctgagcaagcacatcaagctggaagaggaacggagaagcgaggacgcccagagcaaggccgccctgaccgactggctgcgggctaaggccagcttcgtgatcgagggcctgaaggaggccgacaaggacgagttctgcagatgcgagctgaagctgcagaagtggtacggggacctgcggggaaagcccttcgccatcgaagccgagaacagcatcctggacatcagcggcttcagcaagcagtacaactgtgccttcatctggcagaaggacggcgtgaagaagctgaacctgtacctgatcatcaactacttcaagggcggcaagctgcggttcaagaagatcaaacctgaagccttcgaagccaacagattctacaccgtgatcaacaaaaagagcggcgagatcgtgcccatggaggtgaacttcaacttcgacgaccccaacctgatcatcctgcctctggcctttggcaagagacagggcagagaattcatctggaacgacctgctgtccctggaaaccggcagcctgaagctggccaacggaagagtgatcgagaagacactgtacaacagaagaacccggcaggatgagcctgccctgttcgtggccctgaccttcgagcggcgggaggtcctggactcctccaatatcaaaccaatgaacctgatcggcgtggcaagaggcgaaaacatccccgccgtgatcgccctgaccgaccccgagggctgcccactgagccggtttaaggatagcctgggaaacccaacccacatcctgagaatcggcgagagctataaggagaagcagcggaccatccaggccaagaaggaggtggagcagcggagagccggcggctacagccggaagtacgccagcaaagccaagaatctggcagacgatatggtgagaaacaccgctagagatctgctgtactacgccgtgacccaggatgccatgctgatcttcgccaacctgagccggggcttcggccggcagggcaagcggaccttcatggccgagagacagtacacacggatggaggactggctgaccgccaagctggcctacgagggcctgagcaagacctacctgtccaagacactggcccagtacacctccaagacatgcagcaactgtgggtttaccatcaccagcgccgactacgacagggtgctggagaagctgaagaagacagcaacaggctggatgaccacaattaacggcaaggagctgaaggtggagggccagattacctactacaacagatacaagagacagaacgtagtcaaggacctgtccgtcgagctggatagactgagcgaagaatctgtgaacaacgacatctcctcctggacaaagggcagaagcggagaagctctgagcctcctgaagaaaagattctcccatagacccgtgcaggagaagttcgtgtgcctgaactgcggcttcgagacacacgcagccgagcaagccgccctgaacatcgccagatcctggctgttcctgcggagccaggagtacaagaaataccagacaaacaagacaaccggcaacaccgataagagagccttcgtcgagacctggcagtccttttaccggaagaagcttaaggaggtgtggaaacctgccgtgcggtctggcggatctggcggaggctccacaagcctgctgaccttcgaggacgtggccgtgagcttcagcgaggaggagtggaagctgctggaccccacccagaagatcctgtacaacgacgtgatgcaggagaactacgagaccgtgatcagcctgggcctgaagctgaagaacgacaccggcaacgaccagcccatcagcctgagcgccctggagatccaggccagcggctgcaaggtgctgaggaaggccaggatgaaggtggcccagaagaccaccagccccaagaaaaagagaaaagtctaagctgccttctgcggggcttgccttctggccatgcccttcttctctcccttgcacctgtacctcttggtctttgaataaagcctgagtaggaaggctagcaaaaaaaaaaaaaaaaaaaaaaaaaaaaaaaaaaaaaaaaaaaaaaaaaaaaaaaaaaaaaaaaaaaaaaaaaaaaaaaa

SEQ ID NO: 6583 - RNA, 5797 nt, synthetic construct
  source 1..5797: mol_type = other RNA
aggaaataagagagaaaagaagagtaagaagaaatataagagccaccatggcccctaagaagaagcgtaaagtgagccggatggaacgcctcgtctacgaggtgcggcagaagtgcagaaacatcgaggacatctgcatctcctgcggatctctgaacgtgaccctggagcacccactgttcatcggcggcatgtgccagaactgtaaaaactgttttctggagtgtgcctatcaatacgacgatgacggctaccagagctactgcaccatctgttgcggcggaagagaggtgctgatgtgtggaaataacaactgctgccggtgcttctgcgtggaatgcgtggacctgctggtgggccccggcgccgcccaggccgctattaaggaagatccttggaactgctacatgtgcggccacaagggcacatacggcctgctgagacggagagaggactggcctagcagactgcagatgttcttcgccaataaccacgaccaggagttcgacccccctaaggtgtaccctcccgtccccgccgagaagagaaagcccatccgggtcctgagcctgttcgatggcatcgccaccggtctgctggtgctgaaggacctgggcatccaggtggataggtacattgcctccgaggtgtgcgaggactccatcaccgtgggaatggtgcgtcatcagggcaagatcatgtacgtgggcgacgtgcggagcgtgacacagaagcatatccaggagtggggccctttcgacctggtgatcggcggcagcccttgcaatgacctgagcatcgtgaacccagcccggaagggcctgtacgagggaaccggcagactgttcttcgagttttacagactgctgcacgacgcccggcctaaggaaggcgacgaccggcccttcttttggctgttcgagaatgtggtggccatgggagtcagcgacaagcgggatattagccggttcctggagagcaaccccgtgatgatcgatgccaaggaagtgagcgccgcccaccgggccagatacttctggggcaatctgcctggcatgaacagacccctggccagcaccgtgaacgacaagctggagctgcaggagtgcctggagcacggccggatcgccaagttcagcaaggtgagaaccatcaccacccgaagcaacagcatcaaacaaggcaaggaccagcactttcctgtgttcatgaacgagaaggaggacatcctgtggtgtaccgagatggagagagtgttcgggttcccagtccactacacagatgtcagcaacatgtctagactggccagacagagactgctgggaagaagctggtccgtccctgtgatcagacacctgttcgcccctctgaaggagtacttcgcctgcgtgagcagcggcaacagcaacgccaacagccggggccccagcttctctagcggcctggtgccactgtccctgagagggagccacatgggccccatggagatctacaaaaccgtgagcgcctggaagcggcagcctgtgcgcgtgctgagcctgtttcggaatatcgataaagtcctgaaaagcctgggattcctggagagcggctctggctccggcggtggcaccctgaagtacgtggaggatgtgacaaacgtggtcagacgggatgtggagaagtggggccccttcgatctggtgtacggcagcacccaacccctgggcagctcttgtgaccggtgccctggctggtacatgtttcagttccaccggatcctgcagtacgccctgccgagacaggagtcccagcggccattcttttggattttcatggacaacttgctgctgaccgaggatgaccaggaaactaccactcggttcctgcagaccgaagccgtgaccctgcaggacgtgagaggccgggactaccagaacgccatgcgggtgtggtccaacatccctggactgaaaagcaagcacgcacctctgacccctaaagaagaggagtacctgcaggcccaggtgcggagcagaagcaagctggacgcccctaaggtggatctgctggtgaagaattgcctcctgcccctgagagagtacttcaagtatttcagccagaatagtctgcccctgggcggcccaagcagcggcgcccctcctcccagcggcggcagcccagccggctccccaacctctaccgaggagggcacctctgagtccgccacccccgagagcggccctggcacctccaccgagcccagcgagggcagcgcacccggcagccctgccggcagccccacctccacagaggagggaaccagcaccgagcccagcgaaggcagcgccccaggcaccagcaccgagcctagtgagggcggctctggcggcggcagcgcccaggagattaaacggatcaacaagatcagaagaagacttgtgaaagacagcaacaccaagaaggccggcaagacaggccccatgaaaaccctgctggttagagtgatgacacccgatctgagagagcggctggaaaacctgagaaagaagcctgaaaatatcccccagcccatcagcaatacatctagagccaacctgaataagctgctgaccgattacaccgaaatgaagaaggcgatcctgcatgtgtactgggaagagttccagaaggaccctgtgggcctgatgagccgggtggcccagcctgccagcaagaagatcgatcagaacaagctgaaacctgagatggacgagaagggcaacctgaccaccgccggctttgcctgctctcagtgtggccagcccctgttcgtgtacaagctggagcaggtgtctgagaagggcaaggcttacaccaactacttcggacggtgcaatgtggccgagcacgaaaagctgatcctgctggcccagctgaagcccgagaaggatagcgacgaagccgtgacatatagcctgggaaagtttgggcagagggccctggatttctacagcattcatgtgaccaaggagtccacccaccccgtgaagcccctggcccagatcgccggaaacagatacgcctccggacctgtgggaaaggccctgagcgacgcatgtatgggcacaatcgcctccttcctgtctaagtaccaggacatcatcatcgaacaccagaaggtggtgaagggcaaccagaagagactggagagcctgcgggagctggccggcaaggaaaacctggaataccctagcgtgaccctgccacctcagcctcacaccaaggagggcgttgatgcctacaacgaagtgatcgcccgggtgcgaatgtgggtgaacctgaacctgtggcagaagctgaagctaagcagagatgatgccaagcctctgctgagactgaagggattcccttcctttcctctggtcgagagacaggccaacgaagtggactggtgggacatggtgtgtaacgtgaagaagctgatcaacgagaaaaaggaggatggcaaggtgttttggcagaatctggctggctacaagagacaggaagccctgagaccatacctgagcagcgaggaagatcggaagaagggaaagaaattcgctcggtaccagctgggcgacctgctgctgcacctggaaaagaagcacggcgaggactggggaaaggtgtacgacgaggcctgggagcggattgacaagaaagtggaaggcctgagcaagcacatcaagctggaagaggaacggagaagcgaggacgcccagagcaaggccgccctgaccgactggctgcgggctaaggccagcttcgtgatcgagggcctgaaggaggccgacaaggacgagttctgcagatgcgagctgaagctgcagaagtggtacggggacctgcggggaaagcccttcgccatcgaagccgagaacagcatcctggacatcagcggcttcagcaagcagtacaactgtgccttcatctggcagaaggacggcgtgaagaagctgaacctgtacctgatcatcaactacttcaagggcggcaagctgcggttcaagaagatcaaacctgaagccttcgaagccaacagattctacaccgtgatcaacaaaaagagcggcgagatcgtgcccatggaggtgaacttcaacttcgacgaccccaacctgatcatcctgcctctggcctttggcaagagacagggcagagaattcatctggaacgacctgctgtccctggaaaccggcagcctgaagctggccaacggaagagtgatcgagaagacactgtacaacagaagaacccggcaggatgagcctgccctgttcgtggccctgaccttcgagcggcgggaggtcctggactcctccaatatcaaaccaatgaacctgatcggcgtggcaagaggcgaaaacatccccgccgtgatcgccctgaccgaccccgagggctgcccactgagccggtttaaggatagcctgggaaacccaacccacatcctgagaatcggcgagagctataaggagaagcagcggaccatccaggccaagaaggaggtggagcagcggagagccggcggctacagccggaagtacgccagcaaagccaagaatctggcagacgatatggtgagaaacaccgctagagatctgctgtactacgccgtgacccaggatgccatgctgatcttcgccaacctgagccggggcttcggccggcagggcaagcggaccttcatggccgagagacagtacacacggatggaggactggctgaccgccaagctggcctacgagggcctgagcaagacctacctgtccaagacactggcccagtacacctccaagacatgcagcaactgtgggtttaccatcaccagcgccgactacgacagggtgctggagaagctgaagaagacagcaacaggctggatgaccacaattaacggcaaggagctgaaggtggagggccagattacctactacaacagatacaagagacagaacgtagtcaaggacctgtccgtcgagctggatagactgagcgaagaatctgtgaacaacgacatctcctcctggacaaagggcagaagcggagaagctctgagcctcctgaagaaaagattctcccatagacccgtgcaggagaagttcgtgtgcctgaactgcggcttcgagacacacgcagccgagcaagccgccctgaacatcgccagatcctggctgttcctgcggagccaggagtacaagaaataccagacaaacaagacaaccggcaacaccgataagagagccttcgtcgagacctggcagtccttttaccggaagaagcttaaggaggtgtggaaacctgccgtgcggtctggcggatctggcggaggctccacaagccaggccagcgtgaccttcagggacgtggccgtggacttcaccggcgaggagtggaggtgcctggagcccgcccagagggccctgtacagggacgtgatgctggagacctacgagaacctggtgttcctgggcctgagcgtgcccatcagcaagctggacctgatcttcctgctggagaggggcggcgccctgagcaggcccatgggcagggtgcccagcgacagctgccccgacagcttcatcaccagccccaagaaaaagagaaaagtctaagctgccttctgcggggcttgccttctggccatgcccttcttctctcccttgcacctgtacctcttggtctttgaataaagcctgagtaggaaggctagcaaaaaaaaaaaaaaaaaaaaaaaaaaaaaaaaaaaaaaaaaaaaaaaaaaaaaaaaaaaaaaaaaaaaaaaaaaaaaaaa

SEQ ID NO: 6584 - RNA, 5797 nt, synthetic construct
  source 1..5797: mol_type = other RNA
aggaaataagagagaaaagaagagtaagaagaaatataagagccaccatggcccctaagaagaagcgtaaagtgagccggatggaacgcctcgtctacgaggtgcggcagaagtgcagaaacatcgaggacatctgcatctcctgcggatctctgaacgtgaccctggagcacccactgttcatcggcggcatgtgccagaactgtaaaaactgttttctggagtgtgcctatcaatacgacgatgacggctaccagagctactgcaccatctgttgcggcggaagagaggtgctgatgtgtggaaataacaactgctgccggtgcttctgcgtggaatgcgtggacctgctggtgggccccggcgccgcccaggccgctattaaggaagatccttggaactgctacatgtgcggccacaagggcacatacggcctgctgagacggagagaggactggcctagcagactgcagatgttcttcgccaataaccacgaccaggagttcgacccccctaaggtgtaccctcccgtccccgccgagaagagaaagcccatccgggtcctgagcctgttcgatggcatcgccaccggtctgctggtgctgaaggacctgggcatccaggtggataggtacattgcctccgaggtgtgcgaggactccatcaccgtgggaatggtgcgtcatcagggcaagatcatgtacgtgggcgacgtgcggagcgtgacacagaagcatatccaggagtggggccctttcgacctggtgatcggcggcagcccttgcaatgacctgagcatcgtgaacccagcccggaagggcctgtacgagggaaccggcagactgttcttcgagttttacagactgctgcacgacgcccggcctaaggaaggcgacgaccggcccttcttttggctgttcgagaatgtggtggccatgggagtcagcgacaagcgggatattagccggttcctggagagcaaccccgtgatgatcgatgccaaggaagtgagcgccgcccaccgggccagatacttctggggcaatctgcctggcatgaacagacccctggccagcaccgtgaacgacaagctggagctgcaggagtgcctggagcacggccggatcgccaagttcagcaaggtgagaaccatcaccacccgaagcaacagcatcaaacaaggcaaggaccagcactttcctgtgttcatgaacgagaaggaggacatcctgtggtgtaccgagatggagagagtgttcgggttcccagtccactacacagatgtcagcaacatgtctagactggccagacagagactgctgggaagaagctggtccgtccctgtgatcagacacctgttcgcccctctgaaggagtacttcgcctgcgtgagcagcggcaacagcaacgccaacagccggggccccagcttctctagcggcctggtgccactgtccctgagagggagccacatgggccccatggagatctacaaaaccgtgagcgcctggaagcggcagcctgtgcgcgtgctgagcctgtttcggaatatcgataaagtcctgaaaagcctgggattcctggagagcggctctggctccggcggtggcaccctgaagtacgtggaggatgtgacaaacgtggtcagacgggatgtggagaagtggggccccttcgatctggtgtacggcagcacccaacccctgggcagctcttgtgaccggtgccctggctggtacatgtttcagttccaccggatcctgcagtacgccctgccgagacaggagtcccagcggccattcttttggattttcatggacaacttgctgctgaccgaggatgaccaggaaactaccactcggttcctgcagaccgaagccgtgaccctgcaggacgtgagaggccgggactaccagaacgccatgcgggtgtggtccaacatccctggactgaaaagcaagcacgcacctctgacccctaaagaagaggagtacctgcaggcccaggtgcggagcagaagcaagctggacgcccctaaggtggatctgctggtgaagaattgcctcctgcccctgagagagtacttcaagtatttcagccagaatagtctgcccctgggcggcccaagcagcggcgcccctcctcccagcggcggcagcccagccggctccccaacctctaccgaggagggcacctctgagtccgccacccccgagagcggccctggcacctccaccgagcccagcgagggcagcgcacccggcagccctgccggcagccccacctccacagaggagggaaccagcaccgagcccagcgaaggcagcgccccaggcaccagcaccgagcctagtgagggcggctctggcggcggcagcgcccaggagattaaacggatcaacaagatcagaagaagacttgtgaaagacagcaacaccaagaaggccggcaagacaggccccatgaaaaccctgctggttagagtgatgacacccgatctgagagagcggctggaaaacctgagaaagaagcctgaaaatatcccccagcccatcagcaatacatctagagccaacctgaataagctgctgaccgattacaccgaaatgaagaaggcgatcctgcatgtgtactgggaagagttccagaaggaccctgtgggcctgatgagccgggtggcccagcctgccagcaagaagatcgatcagaacaagctgaaacctgagatggacgagaagggcaacctgaccaccgccggctttgcctgctctcagtgtggccagcccctgttcgtgtacaagctggagcaggtgtctgagaagggcaaggcttacaccaactacttcggacggtgcaatgtggccgagcacgaaaagctgatcctgctggcccagctgaagcccgagaaggatagcgacgaagccgtgacatatagcctgggaaagtttgggcagagggccctggatttctacagcattcatgtgaccaaggagtccacccaccccgtgaagcccctggcccagatcgccggaaacagatacgcctccggacctgtgggaaaggccctgagcgacgcatgtatgggcacaatcgcctccttcctgtctaagtaccaggacatcatcatcgaacaccagaaggtggtgaagggcaaccagaagagactggagagcctgcgggagctggccggcaaggaaaacctggaataccctagcgtgaccctgccacctcagcctcacaccaaggagggcgttgatgcctacaacgaagtgatcgcccgggtgcgaatgtgggtgaacctgaacctgtggcagaagctgaagctaagcagagatgatgccaagcctctgctgagactgaagggattcccttcctttcctctggtcgagagacaggccaacgaagtggactggtgggacatggtgtgtaacgtgaagaagctgatcaacgagaaaaaggaggatggcaaggtgttttggcagaatctggctggctacaagagacaggaagccctgagaccatacctgagcagcgaggaagatcggaagaagggaaagaaattcgctcggtaccagctgggcgacctgctgctgcacctggaaaagaagcacggcgaggactggggaaaggtgtacgacgaggcctgggagcggattgacaagaaagtggaaggcctgagcaagcacatcaagctggaagaggaacggagaagcgaggacgcccagagcaaggccgccctgaccgactggctgcgggctaaggccagcttcgtgatcgagggcctgaaggaggccgacaaggacgagttctgcagatgcgagctgaagctgcagaagtggtacggggacctgcggggaaagcccttcgccatcgaagccgagaacagcatcctggacatcagcggcttcagcaagcagtacaactgtgccttcatctggcagaaggacggcgtgaagaagctgaacctgtacctgatcatcaactacttcaagggcggcaagctgcggttcaagaagatcaaacctgaagccttcgaagccaacagattctacaccgtgatcaacaaaaagagcggcgagatcgtgcccatggaggtgaacttcaacttcgacgaccccaacctgatcatcctgcctctggcctttggcaagagacagggcagagaattcatctggaacgacctgctgtccctggaaaccggcagcctgaagctggccaacggaagagtgatcgagaagacactgtacaacagaagaacccggcaggatgagcctgccctgttcgtggccctgaccttcgagcggcgggaggtcctggactcctccaatatcaaaccaatgaacctgatcggcgtggcaagaggcgaaaacatccccgccgtgatcgccctgaccgaccccgagggctgcccactgagccggtttaaggatagcctgggaaacccaacccacatcctgagaatcggcgagagctataaggagaagcagcggaccatccaggccaagaaggaggtggagcagcggagagccggcggctacagccggaagtacgccagcaaagccaagaatctggcagacgatatggtgagaaacaccgctagagatctgctgtactacgccgtgacccaggatgccatgctgatcttcgccaacctgagccggggcttcggccggcagggcaagcggaccttcatggccgagagacagtacacacggatggaggactggctgaccgccaagctggcctacgagggcctgagcaagacctacctgtccaagacactggcccagtacacctccaagacatgcagcaactgtgggtttaccatcaccagcgccgactacgacagggtgctggagaagctgaagaagacagcaacaggctggatgaccacaattaacggcaaggagctgaaggtggagggccagattacctactacaacagatacaagagacagaacgtagtcaaggacctgtccgtcgagctggatagactgagcgaagaatctgtgaacaacgacatctcctcctggacaaagggcagaagcggagaagctctgagcctcctgaagaaaagattctcccatagacccgtgcaggagaagttcgtgtgcctgaactgcggcttcgagacacacgcagccgagcaagccgccctgaacatcgccagatcctggctgttcctgcggagccaggagtacaagaaataccagacaaacaagacaaccggcaacaccgataagagagccttcgtcgagacctggcagtccttttaccggaagaagcttaaggaggtgtggaaacctgccgtgcggtctggcggatctggcggaggctccacaagcatgagcggcccccccggcagcctggagatggagcccctgcagttcagggacgtggccgtggagttcagcctggaggagtggcactgcctggacaccgcccagcagaacctgtacagggacgtgatgctggagaactacaggcacctggtgttcctgggcatcgtggtgagcaagcccgacctgatcacctgcctggagcagggcaagaagcccctgaccatgaagaggcacgagatgatcgccaccagccccaagaaaaagagaaaagtctaagctgccttctgcggggcttgccttctggccatgcccttcttctctcccttgcacctgtacctcttggtctttgaataaagcctgagtaggaaggctagcaaaaaaaaaaaaaaaaaaaaaaaaaaaaaaaaaaaaaaaaaaaaaaaaaaaaaaaaaaaaaaaaaaaaaaaaaaaaaaaa

SEQ ID NO: 6585 - RNA, 5797 nt, synthetic construct
  source 1..5797: mol_type = other RNA
aggaaataagagagaaaagaagagtaagaagaaatataagagccaccatggcccctaagaagaagcgtaaagtgagccggatggaacgcctcgtctacgaggtgcggcagaagtgcagaaacatcgaggacatctgcatctcctgcggatctctgaacgtgaccctggagcacccactgttcatcggcggcatgtgccagaactgtaaaaactgttttctggagtgtgcctatcaatacgacgatgacggctaccagagctactgcaccatctgttgcggcggaagagaggtgctgatgtgtggaaataacaactgctgccggtgcttctgcgtggaatgcgtggacctgctggtgggccccggcgccgcccaggccgctattaaggaagatccttggaactgctacatgtgcggccacaagggcacatacggcctgctgagacggagagaggactggcctagcagactgcagatgttcttcgccaataaccacgaccaggagttcgacccccctaaggtgtaccctcccgtccccgccgagaagagaaagcccatccgggtcctgagcctgttcgatggcatcgccaccggtctgctggtgctgaaggacctgggcatccaggtggataggtacattgcctccgaggtgtgcgaggactccatcaccgtgggaatggtgcgtcatcagggcaagatcatgtacgtgggcgacgtgcggagcgtgacacagaagcatatccaggagtggggccctttcgacctggtgatcggcggcagcccttgcaatgacctgagcatcgtgaacccagcccggaagggcctgtacgagggaaccggcagactgttcttcgagttttacagactgctgcacgacgcccggcctaaggaaggcgacgaccggcccttcttttggctgttcgagaatgtggtggccatgggagtcagcgacaagcgggatattagccggttcctggagagcaaccccgtgatgatcgatgccaaggaagtgagcgccgcccaccgggccagatacttctggggcaatctgcctggcatgaacagacccctggccagcaccgtgaacgacaagctggagctgcaggagtgcctggagcacggccggatcgccaagttcagcaaggtgagaaccatcaccacccgaagcaacagcatcaaacaaggcaaggaccagcactttcctgtgttcatgaacgagaaggaggacatcctgtggtgtaccgagatggagagagtgttcgggttcccagtccactacacagatgtcagcaacatgtctagactggccagacagagactgctgggaagaagctggtccgtccctgtgatcagacacctgttcgcccctctgaaggagtacttcgcctgcgtgagcagcggcaacagcaacgccaacagccggggccccagcttctctagcggcctggtgccactgtccctgagagggagccacatgggccccatggagatctacaaaaccgtgagcgcctggaagcggcagcctgtgcgcgtgctgagcctgtttcggaatatcgataaagtcctgaaaagcctgggattcctggagagcggctctggctccggcggtggcaccctgaagtacgtggaggatgtgacaaacgtggtcagacgggatgtggagaagtggggccccttcgatctggtgtacggcagcacccaacccctgggcagctcttgtgaccggtgccctggctggtacatgtttcagttccaccggatcctgcagtacgccctgccgagacaggagtcccagcggccattcttttggattttcatggacaacttgctgctgaccgaggatgaccaggaaactaccactcggttcctgcagaccgaagccgtgaccctgcaggacgtgagaggccgggactaccagaacgccatgcgggtgtggtccaacatccctggactgaaaagcaagcacgcacctctgacccctaaagaagaggagtacctgcaggcccaggtgcggagcagaagcaagctggacgcccctaaggtggatctgctggtgaagaattgcctcctgcccctgagagagtacttcaagtatttcagccagaatagtctgcccctgggcggcccaagcagcggcgcccctcctcccagcggcggcagcccagccggctccccaacctctaccgaggagggcacctctgagtccgccacccccgagagcggccctggcacctccaccgagcccagcgagggcagcgcacccggcagccctgccggcagccccacctccacagaggagggaaccagcaccgagcccagcgaaggcagcgccccaggcaccagcaccgagcctagtgagggcggctctggcggcggcagcgcccaggagattaaacggatcaacaagatcagaagaagacttgtgaaagacagcaacaccaagaaggccggcaagacaggccccatgaaaaccctgctggttagagtgatgacacccgatctgagagagcggctggaaaacctgagaaagaagcctgaaaatatcccccagcccatcagcaatacatctagagccaacctgaataagctgctgaccgattacaccgaaatgaagaaggcgatcctgcatgtgtactgggaagagttccagaaggaccctgtgggcctgatgagccgggtggcccagcctgccagcaagaagatcgatcagaacaagctgaaacctgagatggacgagaagggcaacctgaccaccgccggctttgcctgctctcagtgtggccagcccctgttcgtgtacaagctggagcaggtgtctgagaagggcaaggcttacaccaactacttcggacggtgcaatgtggccgagcacgaaaagctgatcctgctggcccagctgaagcccgagaaggatagcgacgaagccgtgacatatagcctgggaaagtttgggcagagggccctggatttctacagcattcatgtgaccaaggagtccacccaccccgtgaagcccctggcccagatcgccggaaacagatacgcctccggacctgtgggaaaggccctgagcgacgcatgtatgggcacaatcgcctccttcctgtctaagtaccaggacatcatcatcgaacaccagaaggtggtgaagggcaaccagaagagactggagagcctgcgggagctggccggcaaggaaaacctggaataccctagcgtgaccctgccacctcagcctcacaccaaggagggcgttgatgcctacaacgaagtgatcgcccgggtgcgaatgtgggtgaacctgaacctgtggcagaagctgaagctaagcagagatgatgccaagcctctgctgagactgaagggattcccttcctttcctctggtcgagagacaggccaacgaagtggactggtgggacatggtgtgtaacgtgaagaagctgatcaacgagaaaaaggaggatggcaaggtgttttggcagaatctggctggctacaagagacaggaagccctgagaccatacctgagcagcgaggaagatcggaagaagggaaagaaattcgctcggtaccagctgggcgacctgctgctgcacctggaaaagaagcacggcgaggactggggaaaggtgtacgacgaggcctgggagcggattgacaagaaagtggaaggcctgagcaagcacatcaagctggaagaggaacggagaagcgaggacgcccagagcaaggccgccctgaccgactggctgcgggctaaggccagcttcgtgatcgagggcctgaaggaggccgacaaggacgagttctgcagatgcgagctgaagctgcagaagtggtacggggacctgcggggaaagcccttcgccatcgaagccgagaacagcatcctggacatcagcggcttcagcaagcagtacaactgtgccttcatctggcagaaggacggcgtgaagaagctgaacctgtacctgatcatcaactacttcaagggcggcaagctgcggttcaagaagatcaaacctgaagccttcgaagccaacagattctacaccgtgatcaacaaaaagagcggcgagatcgtgcccatggaggtgaacttcaacttcgacgaccccaacctgatcatcctgcctctggcctttggcaagagacagggcagagaattcatctggaacgacctgctgtccctggaaaccggcagcctgaagctggccaacggaagagtgatcgagaagacactgtacaacagaagaacccggcaggatgagcctgccctgttcgtggccctgaccttcgagcggcgggaggtcctggactcctccaatatcaaaccaatgaacctgatcggcgtggcaagaggcgaaaacatccccgccgtgatcgccctgaccgaccccgagggctgcccactgagccggtttaaggatagcctgggaaacccaacccacatcctgagaatcggcgagagctataaggagaagcagcggaccatccaggccaagaaggaggtggagcagcggagagccggcggctacagccggaagtacgccagcaaagccaagaatctggcagacgatatggtgagaaacaccgctagagatctgctgtactacgccgtgacccaggatgccatgctgatcttcgccaacctgagccggggcttcggccggcagggcaagcggaccttcatggccgagagacagtacacacggatggaggactggctgaccgccaagctggcctacgagggcctgagcaagacctacctgtccaagacactggcccagtacacctccaagacatgcagcaactgtgggtttaccatcaccagcgccgactacgacagggtgctggagaagctgaagaagacagcaacaggctggatgaccacaattaacggcaaggagctgaaggtggagggccagattacctactacaacagatacaagagacagaacgtagtcaaggacctgtccgtcgagctggatagactgagcgaagaatctgtgaacaacgacatctcctcctggacaaagggcagaagcggagaagctctgagcctcctgaagaaaagattctcccatagacccgtgcaggagaagttcgtgtgcctgaactgcggcttcgagacacacgcagccgagcaagccgccctgaacatcgccagatcctggctgttcctgcggagccaggagtacaagaaataccagacaaacaagacaaccggcaacaccgataagagagccttcgtcgagacctggcagtccttttaccggaagaagcttaaggaggtgtggaaacctgccgtgcggtctggcggatctggcggaggctccacaagccccgagaccgtggtgagcttcgaggacgtggccgtgaggttcagccccgacgagtggcacctgctggacgacggccagaggaggctgtacagggacgtgctgagggagaactacagccacgtgaggagcctgggcttccccgtgcccgacctggccgtgatcttcaggatggagaggggcgaggagccctggccccccggcctgcccgccggcgagtggccctggggccagggccaggcccccaccagccccaagaaaaagagaaaagtctaagctgccttctgcggggcttgccttctggccatgcccttcttctctcccttgcacctgtacctcttggtctttgaataaagcctgagtaggaaggctagcaaaaaaaaaaaaaaaaaaaaaaaaaaaaaaaaaaaaaaaaaaaaaaaaaaaaaaaaaaaaaaaaaaaaaaaaaaaaaaaa

SEQ ID NO: 6586 - RNA, 5797 nt, synthetic construct
  source 1..5797: mol_type = other RNA
aggaaataagagagaaaagaagagtaagaagaaatataagagccaccatggcccctaagaagaagcgtaaagtgagccggatggaacgcctcgtctacgaggtgcggcagaagtgcagaaacatcgaggacatctgcatctcctgcggatctctgaacgtgaccctggagcacccactgttcatcggcggcatgtgccagaactgtaaaaactgttttctggagtgtgcctatcaatacgacgatgacggctaccagagctactgcaccatctgttgcggcggaagagaggtgctgatgtgtggaaataacaactgctgccggtgcttctgcgtggaatgcgtggacctgctggtgggccccggcgccgcccaggccgctattaaggaagatccttggaactgctacatgtgcggccacaagggcacatacggcctgctgagacggagagaggactggcctagcagactgcagatgttcttcgccaataaccacgaccaggagttcgacccccctaaggtgtaccctcccgtccccgccgagaagagaaagcccatccgggtcctgagcctgttcgatggcatcgccaccggtctgctggtgctgaaggacctgggcatccaggtggataggtacattgcctccgaggtgtgcgaggactccatcaccgtgggaatggtgcgtcatcagggcaagatcatgtacgtgggcgacgtgcggagcgtgacacagaagcatatccaggagtggggccctttcgacctggtgatcggcggcagcccttgcaatgacctgagcatcgtgaacccagcccggaagggcctgtacgagggaaccggcagactgttcttcgagttttacagactgctgcacgacgcccggcctaaggaaggcgacgaccggcccttcttttggctgttcgagaatgtggtggccatgggagtcagcgacaagcgggatattagccggttcctggagagcaaccccgtgatgatcgatgccaaggaagtgagcgccgcccaccgggccagatacttctggggcaatctgcctggcatgaacagacccctggccagcaccgtgaacgacaagctggagctgcaggagtgcctggagcacggccggatcgccaagttcagcaaggtgagaaccatcaccacccgaagcaacagcatcaaacaaggcaaggaccagcactttcctgtgttcatgaacgagaaggaggacatcctgtggtgtaccgagatggagagagtgttcgggttcccagtccactacacagatgtcagcaacatgtctagactggccagacagagactgctgggaagaagctggtccgtccctgtgatcagacacctgttcgcccctctgaaggagtacttcgcctgcgtgagcagcggcaacagcaacgccaacagccggggccccagcttctctagcggcctggtgccactgtccctgagagggagccacatgggccccatggagatctacaaaaccgtgagcgcctggaagcggcagcctgtgcgcgtgctgagcctgtttcggaatatcgataaagtcctgaaaagcctgggattcctggagagcggctctggctccggcggtggcaccctgaagtacgtggaggatgtgacaaacgtggtcagacgggatgtggagaagtggggccccttcgatctggtgtacggcagcacccaacccctgggcagctcttgtgaccggtgccctggctggtacatgtttcagttccaccggatcctgcagtacgccctgccgagacaggagtcccagcggccattcttttggattttcatggacaacttgctgctgaccgaggatgaccaggaaactaccactcggttcctgcagaccgaagccgtgaccctgcaggacgtgagaggccgggactaccagaacgccatgcgggtgtggtccaacatccctggactgaaaagcaagcacgcacctctgacccctaaagaagaggagtacctgcaggcccaggtgcggagcagaagcaagctggacgcccctaaggtggatctgctggtgaagaattgcctcctgcccctgagagagtacttcaagtatttcagccagaatagtctgcccctgggcggcccaagcagcggcgcccctcctcccagcggcggcagcccagccggctccccaacctctaccgaggagggcacctctgagtccgccacccccgagagcggccctggcacctccaccgagcccagcgagggcagcgcacccggcagccctgccggcagccccacctccacagaggagggaaccagcaccgagcccagcgaaggcagcgccccaggcaccagcaccgagcctagtgagggcggctctggcggcggcagcgcccaggagattaaacggatcaacaagatcagaagaagacttgtgaaagacagcaacaccaagaaggccggcaagacaggccccatgaaaaccctgctggttagagtgatgacacccgatctgagagagcggctggaaaacctgagaaagaagcctgaaaatatcccccagcccatcagcaatacatctagagccaacctgaataagctgctgaccgattacaccgaaatgaagaaggcgatcctgcatgtgtactgggaagagttccagaaggaccctgtgggcctgatgagccgggtggcccagcctgccagcaagaagatcgatcagaacaagctgaaacctgagatggacgagaagggcaacctgaccaccgccggctttgcctgctctcagtgtggccagcccctgttcgtgtacaagctggagcaggtgtctgagaagggcaaggcttacaccaactacttcggacggtgcaatgtggccgagcacgaaaagctgatcctgctggcccagctgaagcccgagaaggatagcgacgaagccgtgacatatagcctgggaaagtttgggcagagggccctggatttctacagcattcatgtgaccaaggagtccacccaccccgtgaagcccctggcccagatcgccggaaacagatacgcctccggacctgtgggaaaggccctgagcgacgcatgtatgggcacaatcgcctccttcctgtctaagtaccaggacatcatcatcgaacaccagaaggtggtgaagggcaaccagaagagactggagagcctgcgggagctggccggcaaggaaaacctggaataccctagcgtgaccctgccacctcagcctcacaccaaggagggcgttgatgcctacaacgaagtgatcgcccgggtgcgaatgtgggtgaacctgaacctgtggcagaagctgaagctaagcagagatgatgccaagcctctgctgagactgaagggattcccttcctttcctctggtcgagagacaggccaacgaagtggactggtgggacatggtgtgtaacgtgaagaagctgatcaacgagaaaaaggaggatggcaaggtgttttggcagaatctggctggctacaagagacaggaagccctgagaccatacctgagcagcgaggaagatcggaagaagggaaagaaattcgctcggtaccagctgggcgacctgctgctgcacctggaaaagaagcacggcgaggactggggaaaggtgtacgacgaggcctgggagcggattgacaagaaagtggaaggcctgagcaagcacatcaagctggaagaggaacggagaagcgaggacgcccagagcaaggccgccctgaccgactggctgcgggctaaggccagcttcgtgatcgagggcctgaaggaggccgacaaggacgagttctgcagatgcgagctgaagctgcagaagtggtacggggacctgcggggaaagcccttcgccatcgaagccgagaacagcatcctggacatcagcggcttcagcaagcagtacaactgtgccttcatctggcagaaggacggcgtgaagaagctgaacctgtacctgatcatcaactacttcaagggcggcaagctgcggttcaagaagatcaaacctgaagccttcgaagccaacagattctacaccgtgatcaacaaaaagagcggcgagatcgtgcccatggaggtgaacttcaacttcgacgaccccaacctgatcatcctgcctctggcctttggcaagagacagggcagagaattcatctggaacgacctgctgtccctggaaaccggcagcctgaagctggccaacggaagagtgatcgagaagacactgtacaacagaagaacccggcaggatgagcctgccctgttcgtggccctgaccttcgagcggcgggaggtcctggactcctccaatatcaaaccaatgaacctgatcggcgtggcaagaggcgaaaacatccccgccgtgatcgccctgaccgaccccgagggctgcccactgagccggtttaaggatagcctgggaaacccaacccacatcctgagaatcggcgagagctataaggagaagcagcggaccatccaggccaagaaggaggtggagcagcggagagccggcggctacagccggaagtacgccagcaaagccaagaatctggcagacgatatggtgagaaacaccgctagagatctgctgtactacgccgtgacccaggatgccatgctgatcttcgccaacctgagccggggcttcggccggcagggcaagcggaccttcatggccgagagacagtacacacggatggaggactggctgaccgccaagctggcctacgagggcctgagcaagacctacctgtccaagacactggcccagtacacctccaagacatgcagcaactgtgggtttaccatcaccagcgccgactacgacagggtgctggagaagctgaagaagacagcaacaggctggatgaccacaattaacggcaaggagctgaaggtggagggccagattacctactacaacagatacaagagacagaacgtagtcaaggacctgtccgtcgagctggatagactgagcgaagaatctgtgaacaacgacatctcctcctggacaaagggcagaagcggagaagctctgagcctcctgaagaaaagattctcccatagacccgtgcaggagaagttcgtgtgcctgaactgcggcttcgagacacacgcagccgagcaagccgccctgaacatcgccagatcctggctgttcctgcggagccaggagtacaagaaataccagacaaacaagacaaccggcaacaccgataagagagccttcgtcgagacctggcagtccttttaccggaagaagcttaaggaggtgtggaaacctgccgtgcggtctggcggatctggcggaggctccacaagcctgcagggcctgctgaccttcagggacgtggccatcgagttcagcgaggaggagtggggctgcctgacccacacccagaggcagctgtacagggacgtgatgctggagaactacggccacctgcacttcctgggcctgctgctgagcaagcccgacctgatcatgttcctggagcaggagaagcagctgtgggacgtgaagaggaaggagagcaggggcttcagccccgagagccagtgcctgaccagccccaagaaaaagagaaaagtctaagctgccttctgcggggcttgccttctggccatgcccttcttctctcccttgcacctgtacctcttggtctttgaataaagcctgagtaggaaggctagcaaaaaaaaaaaaaaaaaaaaaaaaaaaaaaaaaaaaaaaaaaaaaaaaaaaaaaaaaaaaaaaaaaaaaaaaaaaaaaaa

SEQ ID NO: 6587 - RNA, 5797 nt, synthetic construct
  source 1..5797: mol_type = other RNA
aggaaataagagagaaaagaagagtaagaagaaatataagagccaccatggcccctaagaagaagcgtaaagtgagccggatggaacgcctcgtctacgaggtgcggcagaagtgcagaaacatcgaggacatctgcatctcctgcggatctctgaacgtgaccctggagcacccactgttcatcggcggcatgtgccagaactgtaaaaactgttttctggagtgtgcctatcaatacgacgatgacggctaccagagctactgcaccatctgttgcggcggaagagaggtgctgatgtgtggaaataacaactgctgccggtgcttctgcgtggaatgcgtggacctgctggtgggccccggcgccgcccaggccgctattaaggaagatccttggaactgctacatgtgcggccacaagggcacatacggcctgctgagacggagagaggactggcctagcagactgcagatgttcttcgccaataaccacgaccaggagttcgacccccctaaggtgtaccctcccgtccccgccgagaagagaaagcccatccgggtcctgagcctgttcgatggcatcgccaccggtctgctggtgctgaaggacctgggcatccaggtggataggtacattgcctccgaggtgtgcgaggactccatcaccgtgggaatggtgcgtcatcagggcaagatcatgtacgtgggcgacgtgcggagcgtgacacagaagcatatccaggagtggggccctttcgacctggtgatcggcggcagcccttgcaatgacctgagcatcgtgaacccagcccggaagggcctgtacgagggaaccggcagactgttcttcgagttttacagactgctgcacgacgcccggcctaaggaaggcgacgaccggcccttcttttggctgttcgagaatgtggtggccatgggagtcagcgacaagcgggatattagccggttcctggagagcaaccccgtgatgatcgatgccaaggaagtgagcgccgcccaccgggccagatacttctggggcaatctgcctggcatgaacagacccctggccagcaccgtgaacgacaagctggagctgcaggagtgcctggagcacggccggatcgccaagttcagcaaggtgagaaccatcaccacccgaagcaacagcatcaaacaaggcaaggaccagcactttcctgtgttcatgaacgagaaggaggacatcctgtggtgtaccgagatggagagagtgttcgggttcccagtccactacacagatgtcagcaacatgtctagactggccagacagagactgctgggaagaagctggtccgtccctgtgatcagacacctgttcgcccctctgaaggagtacttcgcctgcgtgagcagcggcaacagcaacgccaacagccggggccccagcttctctagcggcctggtgccactgtccctgagagggagccacatgggccccatggagatctacaaaaccgtgagcgcctggaagcggcagcctgtgcgcgtgctgagcctgtttcggaatatcgataaagtcctgaaaagcctgggattcctggagagcggctctggctccggcggtggcaccctgaagtacgtggaggatgtgacaaacgtggtcagacgggatgtggagaagtggggccccttcgatctggtgtacggcagcacccaacccctgggcagctcttgtgaccggtgccctggctggtacatgtttcagttccaccggatcctgcagtacgccctgccgagacaggagtcccagcggccattcttttggattttcatggacaacttgctgctgaccgaggatgaccaggaaactaccactcggttcctgcagaccgaagccgtgaccctgcaggacgtgagaggccgggactaccagaacgccatgcgggtgtggtccaacatccctggactgaaaagcaagcacgcacctctgacccctaaagaagaggagtacctgcaggcccaggtgcggagcagaagcaagctggacgcccctaaggtggatctgctggtgaagaattgcctcctgcccctgagagagtacttcaagtatttcagccagaatagtctgcccctgggcggcccaagcagcggcgcccctcctcccagcggcggcagcccagccggctccccaacctctaccgaggagggcacctctgagtccgccacccccgagagcggccctggcacctccaccgagcccagcgagggcagcgcacccggcagccctgccggcagccccacctccacagaggagggaaccagcaccgagcccagcgaaggcagcgccccaggcaccagcaccgagcctagtgagggcggctctggcggcggcagcgcccaggagattaaacggatcaacaagatcagaagaagacttgtgaaagacagcaacaccaagaaggccggcaagacaggccccatgaaaaccctgctggttagagtgatgacacccgatctgagagagcggctggaaaacctgagaaagaagcctgaaaatatcccccagcccatcagcaatacatctagagccaacctgaataagctgctgaccgattacaccgaaatgaagaaggcgatcctgcatgtgtactgggaagagttccagaaggaccctgtgggcctgatgagccgggtggcccagcctgccagcaagaagatcgatcagaacaagctgaaacctgagatggacgagaagggcaacctgaccaccgccggctttgcctgctctcagtgtggccagcccctgttcgtgtacaagctggagcaggtgtctgagaagggcaaggcttacaccaactacttcggacggtgcaatgtggccgagcacgaaaagctgatcctgctggcccagctgaagcccgagaaggatagcgacgaagccgtgacatatagcctgggaaagtttgggcagagggccctggatttctacagcattcatgtgaccaaggagtccacccaccccgtgaagcccctggcccagatcgccggaaacagatacgcctccggacctgtgggaaaggccctgagcgacgcatgtatgggcacaatcgcctccttcctgtctaagtaccaggacatcatcatcgaacaccagaaggtggtgaagggcaaccagaagagactggagagcctgcgggagctggccggcaaggaaaacctggaataccctagcgtgaccctgccacctcagcctcacaccaaggagggcgttgatgcctacaacgaagtgatcgcccgggtgcgaatgtgggtgaacctgaacctgtggcagaagctgaagctaagcagagatgatgccaagcctctgctgagactgaagggattcccttcctttcctctggtcgagagacaggccaacgaagtggactggtgggacatggtgtgtaacgtgaagaagctgatcaacgagaaaaaggaggatggcaaggtgttttggcagaatctggctggctacaagagacaggaagccctgagaccatacctgagcagcgaggaagatcggaagaagggaaagaaattcgctcggtaccagctgggcgacctgctgctgcacctggaaaagaagcacggcgaggactggggaaaggtgtacgacgaggcctgggagcggattgacaagaaagtggaaggcctgagcaagcacatcaagctggaagaggaacggagaagcgaggacgcccagagcaaggccgccctgaccgactggctgcgggctaaggccagcttcgtgatcgagggcctgaaggaggccgacaaggacgagttctgcagatgcgagctgaagctgcagaagtggtacggggacctgcggggaaagcccttcgccatcgaagccgagaacagcatcctggacatcagcggcttcagcaagcagtacaactgtgccttcatctggcagaaggacggcgtgaagaagctgaacctgtacctgatcatcaactacttcaagggcggcaagctgcggttcaagaagatcaaacctgaagccttcgaagccaacagattctacaccgtgatcaacaaaaagagcggcgagatcgtgcccatggaggtgaacttcaacttcgacgaccccaacctgatcatcctgcctctggcctttggcaagagacagggcagagaattcatctggaacgacctgctgtccctggaaaccggcagcctgaagctggccaacggaagagtgatcgagaagacactgtacaacagaagaacccggcaggatgagcctgccctgttcgtggccctgaccttcgagcggcgggaggtcctggactcctccaatatcaaaccaatgaacctgatcggcgtggcaagaggcgaaaacatccccgccgtgatcgccctgaccgaccccgagggctgcccactgagccggtttaaggatagcctgggaaacccaacccacatcctgagaatcggcgagagctataaggagaagcagcggaccatccaggccaagaaggaggtggagcagcggagagccggcggctacagccggaagtacgccagcaaagccaagaatctggcagacgatatggtgagaaacaccgctagagatctgctgtactacgccgtgacccaggatgccatgctgatcttcgccaacctgagccggggcttcggccggcagggcaagcggaccttcatggccgagagacagtacacacggatggaggactggctgaccgccaagctggcctacgagggcctgagcaagacctacctgtccaagacactggcccagtacacctccaagacatgcagcaactgtgggtttaccatcaccagcgccgactacgacagggtgctggagaagctgaagaagacagcaacaggctggatgaccacaattaacggcaaggagctgaaggtggagggccagattacctactacaacagatacaagagacagaacgtagtcaaggacctgtccgtcgagctggatagactgagcgaagaatctgtgaacaacgacatctcctcctggacaaagggcagaagcggagaagctctgagcctcctgaagaaaagattctcccatagacccgtgcaggagaagttcgtgtgcctgaactgcggcttcgagacacacgcagccgagcaagccgccctgaacatcgccagatcctggctgttcctgcggagccaggagtacaagaaataccagacaaacaagacaaccggcaacaccgataagagagccttcgtcgagacctggcagtccttttaccggaagaagcttaaggaggtgtggaaacctgccgtgcggtctggcggatctggcggaggctccacaagcttcagcctggaggacgtgagcgtgagcttcagccccgccgagtgggccctgctggaccccgcccagagggccctgtggagggaggtgatgagggagaacgccgagaacgtggccttcctggccaggagcatcggcgagaccctggtggaggccaacaacgaccccgtgagcgagggcaggctggagaggagcagcggcggcgccgaggagcagatcagcttccccaacggcctggccaagaggaccagccccaagaaaaagagaaaagtctaagctgccttctgcggggcttgccttctggccatgcccttcttctctcccttgcacctgtacctcttggtctttgaataaagcctgagtaggaaggctagcaaaaaaaaaaaaaaaaaaaaaaaaaaaaaaaaaaaaaaaaaaaaaaaaaaaaaaaaaaaaaaaaaaaaaaaaaaaaaaaa

SEQ ID NO: 6588 - RNA, 5797 nt, synthetic construct
  source 1..5797: mol_type = other RNA
aggaaataagagagaaaagaagagtaagaagaaatataagagccaccatggcccctaagaagaagcgtaaagtgagccggatggaacgcctcgtctacgaggtgcggcagaagtgcagaaacatcgaggacatctgcatctcctgcggatctctgaacgtgaccctggagcacccactgttcatcggcggcatgtgccagaactgtaaaaactgttttctggagtgtgcctatcaatacgacgatgacggctaccagagctactgcaccatctgttgcggcggaagagaggtgctgatgtgtggaaataacaactgctgccggtgcttctgcgtggaatgcgtggacctgctggtgggccccggcgccgcccaggccgctattaaggaagatccttggaactgctacatgtgcggccacaagggcacatacggcctgctgagacggagagaggactggcctagcagactgcagatgttcttcgccaataaccacgaccaggagttcgacccccctaaggtgtaccctcccgtccccgccgagaagagaaagcccatccgggtcctgagcctgttcgatggcatcgccaccggtctgctggtgctgaaggacctgggcatccaggtggataggtacattgcctccgaggtgtgcgaggactccatcaccgtgggaatggtgcgtcatcagggcaagatcatgtacgtgggcgacgtgcggagcgtgacacagaagcatatccaggagtggggccctttcgacctggtgatcggcggcagcccttgcaatgacctgagcatcgtgaacccagcccggaagggcctgtacgagggaaccggcagactgttcttcgagttttacagactgctgcacgacgcccggcctaaggaaggcgacgaccggcccttcttttggctgttcgagaatgtggtggccatgggagtcagcgacaagcgggatattagccggttcctggagagcaaccccgtgatgatcgatgccaaggaagtgagcgccgcccaccgggccagatacttctggggcaatctgcctggcatgaacagacccctggccagcaccgtgaacgacaagctggagctgcaggagtgcctggagcacggccggatcgccaagttcagcaaggtgagaaccatcaccacccgaagcaacagcatcaaacaaggcaaggaccagcactttcctgtgttcatgaacgagaaggaggacatcctgtggtgtaccgagatggagagagtgttcgggttcccagtccactacacagatgtcagcaacatgtctagactggccagacagagactgctgggaagaagctggtccgtccctgtgatcagacacctgttcgcccctctgaaggagtacttcgcctgcgtgagcagcggcaacagcaacgccaacagccggggccccagcttctctagcggcctggtgccactgtccctgagagggagccacatgggccccatggagatctacaaaaccgtgagcgcctggaagcggcagcctgtgcgcgtgctgagcctgtttcggaatatcgataaagtcctgaaaagcctgggattcctggagagcggctctggctccggcggtggcaccctgaagtacgtggaggatgtgacaaacgtggtcagacgggatgtggagaagtggggccccttcgatctggtgtacggcagcacccaacccctgggcagctcttgtgaccggtgccctggctggtacatgtttcagttccaccggatcctgcagtacgccctgccgagacaggagtcccagcggccattcttttggattttcatggacaacttgctgctgaccgaggatgaccaggaaactaccactcggttcctgcagaccgaagccgtgaccctgcaggacgtgagaggccgggactaccagaacgccatgcgggtgtggtccaacatccctggactgaaaagcaagcacgcacctctgacccctaaagaagaggagtacctgcaggcccaggtgcggagcagaagcaagctggacgcccctaaggtggatctgctggtgaagaattgcctcctgcccctgagagagtacttcaagtatttcagccagaatagtctgcccctgggcggcccaagcagcggcgcccctcctcccagcggcggcagcccagccggctccccaacctctaccgaggagggcacctctgagtccgccacccccgagagcggccctggcacctccaccgagcccagcgagggcagcgcacccggcagccctgccggcagccccacctccacagaggagggaaccagcaccgagcccagcgaaggcagcgccccaggcaccagcaccgagcctagtgagggcggctctggcggcggcagcgcccaggagattaaacggatcaacaagatcagaagaagacttgtgaaagacagcaacaccaagaaggccggcaagacaggccccatgaaaaccctgctggttagagtgatgacacccgatctgagagagcggctggaaaacctgagaaagaagcctgaaaatatcccccagcccatcagcaatacatctagagccaacctgaataagctgctgaccgattacaccgaaatgaagaaggcgatcctgcatgtgtactgggaagagttccagaaggaccctgtgggcctgatgagccgggtggcccagcctgccagcaagaagatcgatcagaacaagctgaaacctgagatggacgagaagggcaacctgaccaccgccggctttgcctgctctcagtgtggccagcccctgttcgtgtacaagctggagcaggtgtctgagaagggcaaggcttacaccaactacttcggacggtgcaatgtggccgagcacgaaaagctgatcctgctggcccagctgaagcccgagaaggatagcgacgaagccgtgacatatagcctgggaaagtttgggcagagggccctggatttctacagcattcatgtgaccaaggagtccacccaccccgtgaagcccctggcccagatcgccggaaacagatacgcctccggacctgtgggaaaggccctgagcgacgcatgtatgggcacaatcgcctccttcctgtctaagtaccaggacatcatcatcgaacaccagaaggtggtgaagggcaaccagaagagactggagagcctgcgggagctggccggcaaggaaaacctggaataccctagcgtgaccctgccacctcagcctcacaccaaggagggcgttgatgcctacaacgaagtgatcgcccgggtgcgaatgtgggtgaacctgaacctgtggcagaagctgaagctaagcagagatgatgccaagcctctgctgagactgaagggattcccttcctttcctctggtcgagagacaggccaacgaagtggactggtgggacatggtgtgtaacgtgaagaagctgatcaacgagaaaaaggaggatggcaaggtgttttggcagaatctggctggctacaagagacaggaagccctgagaccatacctgagcagcgaggaagatcggaagaagggaaagaaattcgctcggtaccagctgggcgacctgctgctgcacctggaaaagaagcacggcgaggactggggaaaggtgtacgacgaggcctgggagcggattgacaagaaagtggaaggcctgagcaagcacatcaagctggaagaggaacggagaagcgaggacgcccagagcaaggccgccctgaccgactggctgcgggctaaggccagcttcgtgatcgagggcctgaaggaggccgacaaggacgagttctgcagatgcgagctgaagctgcagaagtggtacggggacctgcggggaaagcccttcgccatcgaagccgagaacagcatcctggacatcagcggcttcagcaagcagtacaactgtgccttcatctggcagaaggacggcgtgaagaagctgaacctgtacctgatcatcaactacttcaagggcggcaagctgcggttcaagaagatcaaacctgaagccttcgaagccaacagattctacaccgtgatcaacaaaaagagcggcgagatcgtgcccatggaggtgaacttcaacttcgacgaccccaacctgatcatcctgcctctggcctttggcaagagacagggcagagaattcatctggaacgacctgctgtccctggaaaccggcagcctgaagctggccaacggaagagtgatcgagaagacactgtacaacagaagaacccggcaggatgagcctgccctgttcgtggccctgaccttcgagcggcgggaggtcctggactcctccaatatcaaaccaatgaacctgatcggcgtggcaagaggcgaaaacatccccgccgtgatcgccctgaccgaccccgagggctgcccactgagccggtttaaggatagcctgggaaacccaacccacatcctgagaatcggcgagagctataaggagaagcagcggaccatccaggccaagaaggaggtggagcagcggagagccggcggctacagccggaagtacgccagcaaagccaagaatctggcagacgatatggtgagaaacaccgctagagatctgctgtactacgccgtgacccaggatgccatgctgatcttcgccaacctgagccggggcttcggccggcagggcaagcggaccttcatggccgagagacagtacacacggatggaggactggctgaccgccaagctggcctacgagggcctgagcaagacctacctgtccaagacactggcccagtacacctccaagacatgcagcaactgtgggtttaccatcaccagcgccgactacgacagggtgctggagaagctgaagaagacagcaacaggctggatgaccacaattaacggcaaggagctgaaggtggagggccagattacctactacaacagatacaagagacagaacgtagtcaaggacctgtccgtcgagctggatagactgagcgaagaatctgtgaacaacgacatctcctcctggacaaagggcagaagcggagaagctctgagcctcctgaagaaaagattctcccatagacccgtgcaggagaagttcgtgtgcctgaactgcggcttcgagacacacgcagccgagcaagccgccctgaacatcgccagatcctggctgttcctgcggagccaggagtacaagaaataccagacaaacaagacaaccggcaacaccgataagagagccttcgtcgagacctggcagtccttttaccggaagaagcttaaggaggtgtggaaacctgccgtgcggtctggcggatctggcggaggctccacaagcatggcccacctgatgatgttcagggacgtggccgtggacttcagccaggaggagtgggagtgcctggacctggagcagaggggcctgtacagggacgtgatgctggagaactacagcaacatggtgagcctgggcctgtgcatctaccagcccgaggccttcagcctgctggagaagggcaaggagccctggaagatcctgagggacgagaccaggggcccctgccccgacatgcagagcaggaccagccccaagaaaaagagaaaagtctaagctgccttctgcggggcttgccttctggccatgcccttcttctctcccttgcacctgtacctcttggtctttgaataaagcctgagtaggaaggctagcaaaaaaaaaaaaaaaaaaaaaaaaaaaaaaaaaaaaaaaaaaaaaaaaaaaaaaaaaaaaaaaaaaaaaaaaaaaaaaaa

SEQ ID NO: 6589 - RNA, 5797 nt, synthetic construct
  source 1..5797: mol_type = other RNA
aggaaataagagagaaaagaagagtaagaagaaatataagagccaccatggcccctaagaagaagcgtaaagtgagccggatggaacgcctcgtctacgaggtgcggcagaagtgcagaaacatcgaggacatctgcatctcctgcggatctctgaacgtgaccctggagcacccactgttcatcggcggcatgtgccagaactgtaaaaactgttttctggagtgtgcctatcaatacgacgatgacggctaccagagctactgcaccatctgttgcggcggaagagaggtgctgatgtgtggaaataacaactgctgccggtgcttctgcgtggaatgcgtggacctgctggtgggccccggcgccgcccaggccgctattaaggaagatccttggaactgctacatgtgcggccacaagggcacatacggcctgctgagacggagagaggactggcctagcagactgcagatgttcttcgccaataaccacgaccaggagttcgacccccctaaggtgtaccctcccgtccccgccgagaagagaaagcccatccgggtcctgagcctgttcgatggcatcgccaccggtctgctggtgctgaaggacctgggcatccaggtggataggtacattgcctccgaggtgtgcgaggactccatcaccgtgggaatggtgcgtcatcagggcaagatcatgtacgtgggcgacgtgcggagcgtgacacagaagcatatccaggagtggggccctttcgacctggtgatcggcggcagcccttgcaatgacctgagcatcgtgaacccagcccggaagggcctgtacgagggaaccggcagactgttcttcgagttttacagactgctgcacgacgcccggcctaaggaaggcgacgaccggcccttcttttggctgttcgagaatgtggtggccatgggagtcagcgacaagcgggatattagccggttcctggagagcaaccccgtgatgatcgatgccaaggaagtgagcgccgcccaccgggccagatacttctggggcaatctgcctggcatgaacagacccctggccagcaccgtgaacgacaagctggagctgcaggagtgcctggagcacggccggatcgccaagttcagcaaggtgagaaccatcaccacccgaagcaacagcatcaaacaaggcaaggaccagcactttcctgtgttcatgaacgagaaggaggacatcctgtggtgtaccgagatggagagagtgttcgggttcccagtccactacacagatgtcagcaacatgtctagactggccagacagagactgctgggaagaagctggtccgtccctgtgatcagacacctgttcgcccctctgaaggagtacttcgcctgcgtgagcagcggcaacagcaacgccaacagccggggccccagcttctctagcggcctggtgccactgtccctgagagggagccacatgggccccatggagatctacaaaaccgtgagcgcctggaagcggcagcctgtgcgcgtgctgagcctgtttcggaatatcgataaagtcctgaaaagcctgggattcctggagagcggctctggctccggcggtggcaccctgaagtacgtggaggatgtgacaaacgtggtcagacgggatgtggagaagtggggccccttcgatctggtgtacggcagcacccaacccctgggcagctcttgtgaccggtgccctggctggtacatgtttcagttccaccggatcctgcagtacgccctgccgagacaggagtcccagcggccattcttttggattttcatggacaacttgctgctgaccgaggatgaccaggaaactaccactcggttcctgcagaccgaagccgtgaccctgcaggacgtgagaggccgggactaccagaacgccatgcgggtgtggtccaacatccctggactgaaaagcaagcacgcacctctgacccctaaagaagaggagtacctgcaggcccaggtgcggagcagaagcaagctggacgcccctaaggtggatctgctggtgaagaattgcctcctgcccctgagagagtacttcaagtatttcagccagaatagtctgcccctgggcggcccaagcagcggcgcccctcctcccagcggcggcagcccagccggctccccaacctctaccgaggagggcacctctgagtccgccacccccgagagcggccctggcacctccaccgagcccagcgagggcagcgcacccggcagccctgccggcagccccacctccacagaggagggaaccagcaccgagcccagcgaaggcagcgccccaggcaccagcaccgagcctagtgagggcggctctggcggcggcagcgcccaggagattaaacggatcaacaagatcagaagaagacttgtgaaagacagcaacaccaagaaggccggcaagacaggccccatgaaaaccctgctggttagagtgatgacacccgatctgagagagcggctggaaaacctgagaaagaagcctgaaaatatcccccagcccatcagcaatacatctagagccaacctgaataagctgctgaccgattacaccgaaatgaagaaggcgatcctgcatgtgtactgggaagagttccagaaggaccctgtgggcctgatgagccgggtggcccagcctgccagcaagaagatcgatcagaacaagctgaaacctgagatggacgagaagggcaacctgaccaccgccggctttgcctgctctcagtgtggccagcccctgttcgtgtacaagctggagcaggtgtctgagaagggcaaggcttacaccaactacttcggacggtgcaatgtggccgagcacgaaaagctgatcctgctggcccagctgaagcccgagaaggatagcgacgaagccgtgacatatagcctgggaaagtttgggcagagggccctggatttctacagcattcatgtgaccaaggagtccacccaccccgtgaagcccctggcccagatcgccggaaacagatacgcctccggacctgtgggaaaggccctgagcgacgcatgtatgggcacaatcgcctccttcctgtctaagtaccaggacatcatcatcgaacaccagaaggtggtgaagggcaaccagaagagactggagagcctgcgggagctggccggcaaggaaaacctggaataccctagcgtgaccctgccacctcagcctcacaccaaggagggcgttgatgcctacaacgaagtgatcgcccgggtgcgaatgtgggtgaacctgaacctgtggcagaagctgaagctaagcagagatgatgccaagcctctgctgagactgaagggattcccttcctttcctctggtcgagagacaggccaacgaagtggactggtgggacatggtgtgtaacgtgaagaagctgatcaacgagaaaaaggaggatggcaaggtgttttggcagaatctggctggctacaagagacaggaagccctgagaccatacctgagcagcgaggaagatcggaagaagggaaagaaattcgctcggtaccagctgggcgacctgctgctgcacctggaaaagaagcacggcgaggactggggaaaggtgtacgacgaggcctgggagcggattgacaagaaagtggaaggcctgagcaagcacatcaagctggaagaggaacggagaagcgaggacgcccagagcaaggccgccctgaccgactggctgcgggctaaggccagcttcgtgatcgagggcctgaaggaggccgacaaggacgagttctgcagatgcgagctgaagctgcagaagtggtacggggacctgcggggaaagcccttcgccatcgaagccgagaacagcatcctggacatcagcggcttcagcaagcagtacaactgtgccttcatctggcagaaggacggcgtgaagaagctgaacctgtacctgatcatcaactacttcaagggcggcaagctgcggttcaagaagatcaaacctgaagccttcgaagccaacagattctacaccgtgatcaacaaaaagagcggcgagatcgtgcccatggaggtgaacttcaacttcgacgaccccaacctgatcatcctgcctctggcctttggcaagagacagggcagagaattcatctggaacgacctgctgtccctggaaaccggcagcctgaagctggccaacggaagagtgatcgagaagacactgtacaacagaagaacccggcaggatgagcctgccctgttcgtggccctgaccttcgagcggcgggaggtcctggactcctccaatatcaaaccaatgaacctgatcggcgtggcaagaggcgaaaacatccccgccgtgatcgccctgaccgaccccgagggctgcccactgagccggtttaaggatagcctgggaaacccaacccacatcctgagaatcggcgagagctataaggagaagcagcggaccatccaggccaagaaggaggtggagcagcggagagccggcggctacagccggaagtacgccagcaaagccaagaatctggcagacgatatggtgagaaacaccgctagagatctgctgtactacgccgtgacccaggatgccatgctgatcttcgccaacctgagccggggcttcggccggcagggcaagcggaccttcatggccgagagacagtacacacggatggaggactggctgaccgccaagctggcctacgagggcctgagcaagacctacctgtccaagacactggcccagtacacctccaagacatgcagcaactgtgggtttaccatcaccagcgccgactacgacagggtgctggagaagctgaagaagacagcaacaggctggatgaccacaattaacggcaaggagctgaaggtggagggccagattacctactacaacagatacaagagacagaacgtagtcaaggacctgtccgtcgagctggatagactgagcgaagaatctgtgaacaacgacatctcctcctggacaaagggcagaagcggagaagctctgagcctcctgaagaaaagattctcccatagacccgtgcaggagaagttcgtgtgcctgaactgcggcttcgagacacacgcagccgagcaagccgccctgaacatcgccagatcctggctgttcctgcggagccaggagtacaagaaataccagacaaacaagacaaccggcaacaccgataagagagccttcgtcgagacctggcagtccttttaccggaagaagcttaaggaggtgtggaaacctgccgtgcggtctggcggatctggcggaggctccacaagcatggacgccgtgacctacgaggacgtgcaggtgagcttcaccagggaggagtggaccctgctggaccccagccagaagagcctgtacaaggacgtgatggtggagacctacaggaacctgaccgccatcggctacaagtgggaggaccagaacatcaagaagcaccaccagtgcagcaggaggcacggcaggcacgagaggagcaacagcgccgagaaggactacgagtgcgagcagtgcggcaccagccccaagaaaaagagaaaagtctaagctgccttctgcggggcttgccttctggccatgcccttcttctctcccttgcacctgtacctcttggtctttgaataaagcctgagtaggaaggctagcaaaaaaaaaaaaaaaaaaaaaaaaaaaaaaaaaaaaaaaaaaaaaaaaaaaaaaaaaaaaaaaaaaaaaaaaaaaaaaaa

SEQ ID NO: 6590 - RNA, 5797 nt, synthetic construct
  source 1..5797: mol_type = other RNA
aggaaataagagagaaaagaagagtaagaagaaatataagagccaccatggcccctaagaagaagcgtaaagtgagccggatggaacgcctcgtctacgaggtgcggcagaagtgcagaaacatcgaggacatctgcatctcctgcggatctctgaacgtgaccctggagcacccactgttcatcggcggcatgtgccagaactgtaaaaactgttttctggagtgtgcctatcaatacgacgatgacggctaccagagctactgcaccatctgttgcggcggaagagaggtgctgatgtgtggaaataacaactgctgccggtgcttctgcgtggaatgcgtggacctgctggtgggccccggcgccgcccaggccgctattaaggaagatccttggaactgctacatgtgcggccacaagggcacatacggcctgctgagacggagagaggactggcctagcagactgcagatgttcttcgccaataaccacgaccaggagttcgacccccctaaggtgtaccctcccgtccccgccgagaagagaaagcccatccgggtcctgagcctgttcgatggcatcgccaccggtctgctggtgctgaaggacctgggcatccaggtggataggtacattgcctccgaggtgtgcgaggactccatcaccgtgggaatggtgcgtcatcagggcaagatcatgtacgtgggcgacgtgcggagcgtgacacagaagcatatccaggagtggggccctttcgacctggtgatcggcggcagcccttgcaatgacctgagcatcgtgaacccagcccggaagggcctgtacgagggaaccggcagactgttcttcgagttttacagactgctgcacgacgcccggcctaaggaaggcgacgaccggcccttcttttggctgttcgagaatgtggtggccatgggagtcagcgacaagcgggatattagccggttcctggagagcaaccccgtgatgatcgatgccaaggaagtgagcgccgcccaccgggccagatacttctggggcaatctgcctggcatgaacagacccctggccagcaccgtgaacgacaagctggagctgcaggagtgcctggagcacggccggatcgccaagttcagcaaggtgagaaccatcaccacccgaagcaacagcatcaaacaaggcaaggaccagcactttcctgtgttcatgaacgagaaggaggacatcctgtggtgtaccgagatggagagagtgttcgggttcccagtccactacacagatgtcagcaacatgtctagactggccagacagagactgctgggaagaagctggtccgtccctgtgatcagacacctgttcgcccctctgaaggagtacttcgcctgcgtgagcagcggcaacagcaacgccaacagccggggccccagcttctctagcggcctggtgccactgtccctgagagggagccacatgggccccatggagatctacaaaaccgtgagcgcctggaagcggcagcctgtgcgcgtgctgagcctgtttcggaatatcgataaagtcctgaaaagcctgggattcctggagagcggctctggctccggcggtggcaccctgaagtacgtggaggatgtgacaaacgtggtcagacgggatgtggagaagtggggccccttcgatctggtgtacggcagcacccaacccctgggcagctcttgtgaccggtgccctggctggtacatgtttcagttccaccggatcctgcagtacgccctgccgagacaggagtcccagcggccattcttttggattttcatggacaacttgctgctgaccgaggatgaccaggaaactaccactcggttcctgcagaccgaagccgtgaccctgcaggacgtgagaggccgggactaccagaacgccatgcgggtgtggtccaacatccctggactgaaaagcaagcacgcacctctgacccctaaagaagaggagtacctgcaggcccaggtgcggagcagaagcaagctggacgcccctaaggtggatctgctggtgaagaattgcctcctgcccctgagagagtacttcaagtatttcagccagaatagtctgcccctgggcggcccaagcagcggcgcccctcctcccagcggcggcagcccagccggctccccaacctctaccgaggagggcacctctgagtccgccacccccgagagcggccctggcacctccaccgagcccagcgagggcagcgcacccggcagccctgccggcagccccacctccacagaggagggaaccagcaccgagcccagcgaaggcagcgccccaggcaccagcaccgagcctagtgagggcggctctggcggcggcagcgcccaggagattaaacggatcaacaagatcagaagaagacttgtgaaagacagcaacaccaagaaggccggcaagacaggccccatgaaaaccctgctggttagagtgatgacacccgatctgagagagcggctggaaaacctgagaaagaagcctgaaaatatcccccagcccatcagcaatacatctagagccaacctgaataagctgctgaccgattacaccgaaatgaagaaggcgatcctgcatgtgtactgggaagagttccagaaggaccctgtgggcctgatgagccgggtggcccagcctgccagcaagaagatcgatcagaacaagctgaaacctgagatggacgagaagggcaacctgaccaccgccggctttgcctgctctcagtgtggccagcccctgttcgtgtacaagctggagcaggtgtctgagaagggcaaggcttacaccaactacttcggacggtgcaatgtggccgagcacgaaaagctgatcctgctggcccagctgaagcccgagaaggatagcgacgaagccgtgacatatagcctgggaaagtttgggcagagggccctggatttctacagcattcatgtgaccaaggagtccacccaccccgtgaagcccctggcccagatcgccggaaacagatacgcctccggacctgtgggaaaggccctgagcgacgcatgtatgggcacaatcgcctccttcctgtctaagtaccaggacatcatcatcgaacaccagaaggtggtgaagggcaaccagaagagactggagagcctgcgggagctggccggcaaggaaaacctggaataccctagcgtgaccctgccacctcagcctcacaccaaggagggcgttgatgcctacaacgaagtgatcgcccgggtgcgaatgtgggtgaacctgaacctgtggcagaagctgaagctaagcagagatgatgccaagcctctgctgagactgaagggattcccttcctttcctctggtcgagagacaggccaacgaagtggactggtgggacatggtgtgtaacgtgaagaagctgatcaacgagaaaaaggaggatggcaaggtgttttggcagaatctggctggctacaagagacaggaagccctgagaccatacctgagcagcgaggaagatcggaagaagggaaagaaattcgctcggtaccagctgggcgacctgctgctgcacctggaaaagaagcacggcgaggactggggaaaggtgtacgacgaggcctgggagcggattgacaagaaagtggaaggcctgagcaagcacatcaagctggaagaggaacggagaagcgaggacgcccagagcaaggccgccctgaccgactggctgcgggctaaggccagcttcgtgatcgagggcctgaaggaggccgacaaggacgagttctgcagatgcgagctgaagctgcagaagtggtacggggacctgcggggaaagcccttcgccatcgaagccgagaacagcatcctggacatcagcggcttcagcaagcagtacaactgtgccttcatctggcagaaggacggcgtgaagaagctgaacctgtacctgatcatcaactacttcaagggcggcaagctgcggttcaagaagatcaaacctgaagccttcgaagccaacagattctacaccgtgatcaacaaaaagagcggcgagatcgtgcccatggaggtgaacttcaacttcgacgaccccaacctgatcatcctgcctctggcctttggcaagagacagggcagagaattcatctggaacgacctgctgtccctggaaaccggcagcctgaagctggccaacggaagagtgatcgagaagacactgtacaacagaagaacccggcaggatgagcctgccctgttcgtggccctgaccttcgagcggcgggaggtcctggactcctccaatatcaaaccaatgaacctgatcggcgtggcaagaggcgaaaacatccccgccgtgatcgccctgaccgaccccgagggctgcccactgagccggtttaaggatagcctgggaaacccaacccacatcctgagaatcggcgagagctataaggagaagcagcggaccatccaggccaagaaggaggtggagcagcggagagccggcggctacagccggaagtacgccagcaaagccaagaatctggcagacgatatggtgagaaacaccgctagagatctgctgtactacgccgtgacccaggatgccatgctgatcttcgccaacctgagccggggcttcggccggcagggcaagcggaccttcatggccgagagacagtacacacggatggaggactggctgaccgccaagctggcctacgagggcctgagcaagacctacctgtccaagacactggcccagtacacctccaagacatgcagcaactgtgggtttaccatcaccagcgccgactacgacagggtgctggagaagctgaagaagacagcaacaggctggatgaccacaattaacggcaaggagctgaaggtggagggccagattacctactacaacagatacaagagacagaacgtagtcaaggacctgtccgtcgagctggatagactgagcgaagaatctgtgaacaacgacatctcctcctggacaaagggcagaagcggagaagctctgagcctcctgaagaaaagattctcccatagacccgtgcaggagaagttcgtgtgcctgaactgcggcttcgagacacacgcagccgagcaagccgccctgaacatcgccagatcctggctgttcctgcggagccaggagtacaagaaataccagacaaacaagacaaccggcaacaccgataagagagccttcgtcgagacctggcagtccttttaccggaagaagcttaaggaggtgtggaaacctgccgtgcggtctggcggatctggcggaggctccacaagccaggagctgctgaccttcaaggacgtgagcgtggagttcagcatggacgagtgggcctgcctggaccccgcccagcagaccctgtaccaggacgtgatgctggagaactacaggcacctggtgttcctgggcctgaccctgagcaagcccgacctgatcacctgcctggagcagagcaaggagccctggaaggtgaagagccaccagaccgtggtgaagcaccccgccgtgagcgacccccccaccagccccaagaaaaagagaaaagtctaagctgccttctgcggggcttgccttctggccatgcccttcttctctcccttgcacctgtacctcttggtctttgaataaagcctgagtaggaaggctagcaaaaaaaaaaaaaaaaaaaaaaaaaaaaaaaaaaaaaaaaaaaaaaaaaaaaaaaaaaaaaaaaaaaaaaaaaaaaaaaa

SEQ ID NO: 6591 - RNA, 5830 nt, synthetic construct
  source 1..5830: mol_type = other RNA
aggaaataagagagaaaagaagagtaagaagaaatataagagccaccatggcccctaagaagaagcgtaaagtgagccggatggaacgcctcgtctacgaggtgcggcagaagtgcagaaacatcgaggacatctgcatctcctgcggatctctgaacgtgaccctggagcacccactgttcatcggcggcatgtgccagaactgtaaaaactgttttctggagtgtgcctatcaatacgacgatgacggctaccagagctactgcaccatctgttgcggcggaagagaggtgctgatgtgtggaaataacaactgctgccggtgcttctgcgtggaatgcgtggacctgctggtgggccccggcgccgcccaggccgctattaaggaagatccttggaactgctacatgtgcggccacaagggcacatacggcctgctgagacggagagaggactggcctagcagactgcagatgttcttcgccaataaccacgaccaggagttcgacccccctaaggtgtaccctcccgtccccgccgagaagagaaagcccatccgggtcctgagcctgttcgatggcatcgccaccggtctgctggtgctgaaggacctgggcatccaggtggataggtacattgcctccgaggtgtgcgaggactccatcaccgtgggaatggtgcgtcatcagggcaagatcatgtacgtgggcgacgtgcggagcgtgacacagaagcatatccaggagtggggccctttcgacctggtgatcggcggcagcccttgcaatgacctgagcatcgtgaacccagcccggaagggcctgtacgagggaaccggcagactgttcttcgagttttacagactgctgcacgacgcccggcctaaggaaggcgacgaccggcccttcttttggctgttcgagaatgtggtggccatgggagtcagcgacaagcgggatattagccggttcctggagagcaaccccgtgatgatcgatgccaaggaagtgagcgccgcccaccgggccagatacttctggggcaatctgcctggcatgaacagacccctggccagcaccgtgaacgacaagctggagctgcaggagtgcctggagcacggccggatcgccaagttcagcaaggtgagaaccatcaccacccgaagcaacagcatcaaacaaggcaaggaccagcactttcctgtgttcatgaacgagaaggaggacatcctgtggtgtaccgagatggagagagtgttcgggttcccagtccactacacagatgtcagcaacatgtctagactggccagacagagactgctgggaagaagctggtccgtccctgtgatcagacacctgttcgcccctctgaaggagtacttcgcctgcgtgagcagcggcaacagcaacgccaacagccggggccccagcttctctagcggcctggtgccactgtccctgagagggagccacatgggccccatggagatctacaaaaccgtgagcgcctggaagcggcagcctgtgcgcgtgctgagcctgtttcggaatatcgataaagtcctgaaaagcctgggattcctggagagcggctctggctccggcggtggcaccctgaagtacgtggaggatgtgacaaacgtggtcagacgggatgtggagaagtggggccccttcgatctggtgtacggcagcacccaacccctgggcagctcttgtgaccggtgccctggctggtacatgtttcagttccaccggatcctgcagtacgccctgccgagacaggagtcccagcggccattcttttggattttcatggacaacttgctgctgaccgaggatgaccaggaaactaccactcggttcctgcagaccgaagccgtgaccctgcaggacgtgagaggccgggactaccagaacgccatgcgggtgtggtccaacatccctggactgaaaagcaagcacgcacctctgacccctaaagaagaggagtacctgcaggcccaggtgcggagcagaagcaagctggacgcccctaaggtggatctgctggtgaagaattgcctcctgcccctgagagagtacttcaagtatttcagccagaatagtctgcccctgggcggcccaagcagcggcgcccctcctcccagcggcggcagcccagccggctccccaacctctaccgaggagggcacctctgagtccgccacccccgagagcggccctggcacctccaccgagcccagcgagggcagcgcacccggcagccctgccggcagccccacctccacagaggagggaaccagcaccgagcccagcgaaggcagcgccccaggcaccagcaccgagcctagtgagggcggctctggcggcggcagcgcccaggagattaaacggatcaacaagatcagaagaagacttgtgaaagacagcaacaccaagaaggccggcaagacaggccccatgaaaaccctgctggttagagtgatgacacccgatctgagagagcggctggaaaacctgagaaagaagcctgaaaatatcccccagcccatcagcaatacatctagagccaacctgaataagctgctgaccgattacaccgaaatgaagaaggcgatcctgcatgtgtactgggaagagttccagaaggaccctgtgggcctgatgagccgggtggcccagcctgccagcaagaagatcgatcagaacaagctgaaacctgagatggacgagaagggcaacctgaccaccgccggctttgcctgctctcagtgtggccagcccctgttcgtgtacaagctggagcaggtgtctgagaagggcaaggcttacaccaactacttcggacggtgcaatgtggccgagcacgaaaagctgatcctgctggcccagctgaagcccgagaaggatagcgacgaagccgtgacatatagcctgggaaagtttgggcagagggccctggatttctacagcattcatgtgaccaaggagtccacccaccccgtgaagcccctggcccagatcgccggaaacagatacgcctccggacctgtgggaaaggccctgagcgacgcatgtatgggcacaatcgcctccttcctgtctaagtaccaggacatcatcatcgaacaccagaaggtggtgaagggcaaccagaagagactggagagcctgcgggagctggccggcaaggaaaacctggaataccctagcgtgaccctgccacctcagcctcacaccaaggagggcgttgatgcctacaacgaagtgatcgcccgggtgcgaatgtgggtgaacctgaacctgtggcagaagctgaagctaagcagagatgatgccaagcctctgctgagactgaagggattcccttcctttcctctggtcgagagacaggccaacgaagtggactggtgggacatggtgtgtaacgtgaagaagctgatcaacgagaaaaaggaggatggcaaggtgttttggcagaatctggctggctacaagagacaggaagccctgagaccatacctgagcagcgaggaagatcggaagaagggaaagaaattcgctcggtaccagctgggcgacctgctgctgcacctggaaaagaagcacggcgaggactggggaaaggtgtacgacgaggcctgggagcggattgacaagaaagtggaaggcctgagcaagcacatcaagctggaagaggaacggagaagcgaggacgcccagagcaaggccgccctgaccgactggctgcgggctaaggccagcttcgtgatcgagggcctgaaggaggccgacaaggacgagttctgcagatgcgagctgaagctgcagaagtggtacggggacctgcggggaaagcccttcgccatcgaagccgagaacagcatcctggacatcagcggcttcagcaagcagtacaactgtgccttcatctggcagaaggacggcgtgaagaagctgaacctgtacctgatcatcaactacttcaagggcggcaagctgcggttcaagaagatcaaacctgaagccttcgaagccaacagattctacaccgtgatcaacaaaaagagcggcgagatcgtgcccatggaggtgaacttcaacttcgacgaccccaacctgatcatcctgcctctggcctttggcaagagacagggcagagaattcatctggaacgacctgctgtccctggaaaccggcagcctgaagctggccaacggaagagtgatcgagaagacactgtacaacagaagaacccggcaggatgagcctgccctgttcgtggccctgaccttcgagcggcgggaggtcctggactcctccaatatcaaaccaatgaacctgatcggcgtggcaagaggcgaaaacatccccgccgtgatcgccctgaccgaccccgagggctgcccactgagccggtttaaggatagcctgggaaacccaacccacatcctgagaatcggcgagagctataaggagaagcagcggaccatccaggccaagaaggaggtggagcagcggagagccggcggctacagccggaagtacgccagcaaagccaagaatctggcagacgatatggtgagaaacaccgctagagatctgctgtactacgccgtgacccaggatgccatgctgatcttcgccaacctgagccggggcttcggccggcagggcaagcggaccttcatggccgagagacagtacacacggatggaggactggctgaccgccaagctggcctacgagggcctgagcaagacctacctgtccaagacactggcccagtacacctccaagacatgcagcaactgtgggtttaccatcaccagcgccgactacgacagggtgctggagaagctgaagaagacagcaacaggctggatgaccacaattaacggcaaggagctgaaggtggagggccagattacctactacaacagatacaagagacagaacgtagtcaaggacctgtccgtcgagctggatagactgagcgaagaatctgtgaacaacgacatctcctcctggacaaagggcagaagcggagaagctctgagcctcctgaagaaaagattctcccatagacccgtgcaggagaagttcgtgtgcctgaactgcggcttcgagacacacgcagccgagcaagccgccctgaacatcgccagatcctggctgttcctgcggagccaggagtacaagaaataccagacaaacaagacaaccggcaacaccgataagagagccttcgtcgagacctggcagtccttttaccggaagaagcttaaggaggtgtggaaacctgccgtgcggtctggcggatctggcggaggctccacaagcgtgacctacgaggacgtgaccgtgaccttcacccaggaggagtgggccctgctgaaccccagcgagaagaagctgtacagggacgtgatgtgggagaacctgaggaacatcttcagcaccggcaagatccagggcgacaactacaacgaggagcagcacaaccaccagggcagcaagcagagctgcagggtggtgaagatcagcggcggccagaagaggagccagaacgacgagaagcagaggatgcagagcgagggcaagagctacgagtgcgagaccagccccaagaaaaagagaaaagtctaagctgccttctgcggggcttgccttctggccatgcccttcttctctcccttgcacctgtacctcttggtctttgaataaagcctgagtaggaaggctagcaaaaaaaaaaaaaaaaaaaaaaaaaaaaaaaaaaaaaaaaaaaaaaaaaaaaaaaaaaaaaaaaaaaaaaaaaaaaaaaa

SEQ ID NO: 6592 - RNA, 5797 nt, synthetic construct
  source 1..5797: mol_type = other RNA
aggaaataagagagaaaagaagagtaagaagaaatataagagccaccatggcccctaagaagaagcgtaaagtgagccggatggaacgcctcgtctacgaggtgcggcagaagtgcagaaacatcgaggacatctgcatctcctgcggatctctgaacgtgaccctggagcacccactgttcatcggcggcatgtgccagaactgtaaaaactgttttctggagtgtgcctatcaatacgacgatgacggctaccagagctactgcaccatctgttgcggcggaagagaggtgctgatgtgtggaaataacaactgctgccggtgcttctgcgtggaatgcgtggacctgctggtgggccccggcgccgcccaggccgctattaaggaagatccttggaactgctacatgtgcggccacaagggcacatacggcctgctgagacggagagaggactggcctagcagactgcagatgttcttcgccaataaccacgaccaggagttcgacccccctaaggtgtaccctcccgtccccgccgagaagagaaagcccatccgggtcctgagcctgttcgatggcatcgccaccggtctgctggtgctgaaggacctgggcatccaggtggataggtacattgcctccgaggtgtgcgaggactccatcaccgtgggaatggtgcgtcatcagggcaagatcatgtacgtgggcgacgtgcggagcgtgacacagaagcatatccaggagtggggccctttcgacctggtgatcggcggcagcccttgcaatgacctgagcatcgtgaacccagcccggaagggcctgtacgagggaaccggcagactgttcttcgagttttacagactgctgcacgacgcccggcctaaggaaggcgacgaccggcccttcttttggctgttcgagaatgtggtggccatgggagtcagcgacaagcgggatattagccggttcctggagagcaaccccgtgatgatcgatgccaaggaagtgagcgccgcccaccgggccagatacttctggggcaatctgcctggcatgaacagacccctggccagcaccgtgaacgacaagctggagctgcaggagtgcctggagcacggccggatcgccaagttcagcaaggtgagaaccatcaccacccgaagcaacagcatcaaacaaggcaaggaccagcactttcctgtgttcatgaacgagaaggaggacatcctgtggtgtaccgagatggagagagtgttcgggttcccagtccactacacagatgtcagcaacatgtctagactggccagacagagactgctgggaagaagctggtccgtccctgtgatcagacacctgttcgcccctctgaaggagtacttcgcctgcgtgagcagcggcaacagcaacgccaacagccggggccccagcttctctagcggcctggtgccactgtccctgagagggagccacatgggccccatggagatctacaaaaccgtgagcgcctggaagcggcagcctgtgcgcgtgctgagcctgtttcggaatatcgataaagtcctgaaaagcctgggattcctggagagcggctctggctccggcggtggcaccctgaagtacgtggaggatgtgacaaacgtggtcagacgggatgtggagaagtggggccccttcgatctggtgtacggcagcacccaacccctgggcagctcttgtgaccggtgccctggctggtacatgtttcagttccaccggatcctgcagtacgccctgccgagacaggagtcccagcggccattcttttggattttcatggacaacttgctgctgaccgaggatgaccaggaaactaccactcggttcctgcagaccgaagccgtgaccctgcaggacgtgagaggccgggactaccagaacgccatgcgggtgtggtccaacatccctggactgaaaagcaagcacgcacctctgacccctaaagaagaggagtacctgcaggcccaggtgcggagcagaagcaagctggacgcccctaaggtggatctgctggtgaagaattgcctcctgcccctgagagagtacttcaagtatttcagccagaatagtctgcccctgggcggcccaagcagcggcgcccctcctcccagcggcggcagcccagccggctccccaacctctaccgaggagggcacctctgagtccgccacccccgagagcggccctggcacctccaccgagcccagcgagggcagcgcacccggcagccctgccggcagccccacctccacagaggagggaaccagcaccgagcccagcgaaggcagcgccccaggcaccagcaccgagcctagtgagggcggctctggcggcggcagcgcccaggagattaaacggatcaacaagatcagaagaagacttgtgaaagacagcaacaccaagaaggccggcaagacaggccccatgaaaaccctgctggttagagtgatgacacccgatctgagagagcggctggaaaacctgagaaagaagcctgaaaatatcccccagcccatcagcaatacatctagagccaacctgaataagctgctgaccgattacaccgaaatgaagaaggcgatcctgcatgtgtactgggaagagttccagaaggaccctgtgggcctgatgagccgggtggcccagcctgccagcaagaagatcgatcagaacaagctgaaacctgagatggacgagaagggcaacctgaccaccgccggctttgcctgctctcagtgtggccagcccctgttcgtgtacaagctggagcaggtgtctgagaagggcaaggcttacaccaactacttcggacggtgcaatgtggccgagcacgaaaagctgatcctgctggcccagctgaagcccgagaaggatagcgacgaagccgtgacatatagcctgggaaagtttgggcagagggccctggatttctacagcattcatgtgaccaaggagtccacccaccccgtgaagcccctggcccagatcgccggaaacagatacgcctccggacctgtgggaaaggccctgagcgacgcatgtatgggcacaatcgcctccttcctgtctaagtaccaggacatcatcatcgaacaccagaaggtggtgaagggcaaccagaagagactggagagcctgcgggagctggccggcaaggaaaacctggaataccctagcgtgaccctgccacctcagcctcacaccaaggagggcgttgatgcctacaacgaagtgatcgcccgggtgcgaatgtgggtgaacctgaacctgtggcagaagctgaagctaagcagagatgatgccaagcctctgctgagactgaagggattcccttcctttcctctggtcgagagacaggccaacgaagtggactggtgggacatggtgtgtaacgtgaagaagctgatcaacgagaaaaaggaggatggcaaggtgttttggcagaatctggctggctacaagagacaggaagccctgagaccatacctgagcagcgaggaagatcggaagaagggaaagaaattcgctcggtaccagctgggcgacctgctgctgcacctggaaaagaagcacggcgaggactggggaaaggtgtacgacgaggcctgggagcggattgacaagaaagtggaaggcctgagcaagcacatcaagctggaagaggaacggagaagcgaggacgcccagagcaaggccgccctgaccgactggctgcgggctaaggccagcttcgtgatcgagggcctgaaggaggccgacaaggacgagttctgcagatgcgagctgaagctgcagaagtggtacggggacctgcggggaaagcccttcgccatcgaagccgagaacagcatcctggacatcagcggcttcagcaagcagtacaactgtgccttcatctggcagaaggacggcgtgaagaagctgaacctgtacctgatcatcaactacttcaagggcggcaagctgcggttcaagaagatcaaacctgaagccttcgaagccaacagattctacaccgtgatcaacaaaaagagcggcgagatcgtgcccatggaggtgaacttcaacttcgacgaccccaacctgatcatcctgcctctggcctttggcaagagacagggcagagaattcatctggaacgacctgctgtccctggaaaccggcagcctgaagctggccaacggaagagtgatcgagaagacactgtacaacagaagaacccggcaggatgagcctgccctgttcgtggccctgaccttcgagcggcgggaggtcctggactcctccaatatcaaaccaatgaacctgatcggcgtggcaagaggcgaaaacatccccgccgtgatcgccctgaccgaccccgagggctgcccactgagccggtttaaggatagcctgggaaacccaacccacatcctgagaatcggcgagagctataaggagaagcagcggaccatccaggccaagaaggaggtggagcagcggagagccggcggctacagccggaagtacgccagcaaagccaagaatctggcagacgatatggtgagaaacaccgctagagatctgctgtactacgccgtgacccaggatgccatgctgatcttcgccaacctgagccggggcttcggccggcagggcaagcggaccttcatggccgagagacagtacacacggatggaggactggctgaccgccaagctggcctacgagggcctgagcaagacctacctgtccaagacactggcccagtacacctccaagacatgcagcaactgtgggtttaccatcaccagcgccgactacgacagggtgctggagaagctgaagaagacagcaacaggctggatgaccacaattaacggcaaggagctgaaggtggagggccagattacctactacaacagatacaagagacagaacgtagtcaaggacctgtccgtcgagctggatagactgagcgaagaatctgtgaacaacgacatctcctcctggacaaagggcagaagcggagaagctctgagcctcctgaagaaaagattctcccatagacccgtgcaggagaagttcgtgtgcctgaactgcggcttcgagacacacgcagccgagcaagccgccctgaacatcgccagatcctggctgttcctgcggagccaggagtacaagaaataccagacaaacaagacaaccggcaacaccgataagagagccttcgtcgagacctggcagtccttttaccggaagaagcttaaggaggtgtggaaacctgccgtgcggtctggcggatctggcggaggctccacaagcgcccaggcccccctgagcttcgaggacgtggccgtgagcttcagcagggaggagtggaggctgctggtgcccgcccagaaggacctgtacagggacgtgatgctggagaactacaggaacctggtgagcgtgggctaccaggccagcgagcccgacagcctgttccagctggagcacggcggccccctgtgggtggtggagggcgccgcccccaggcccccctgccccgaggagatctgggagaccagccccaagaaaaagagaaaagtctaagctgccttctgcggggcttgccttctggccatgcccttcttctctcccttgcacctgtacctcttggtctttgaataaagcctgagtaggaaggctagcaaaaaaaaaaaaaaaaaaaaaaaaaaaaaaaaaaaaaaaaaaaaaaaaaaaaaaaaaaaaaaaaaaaaaaaaaaaaaaaa

SEQ ID NO: 6593 - RNA, 5797 nt, synthetic construct
  source 1..5797: mol_type = other RNA
aggaaataagagagaaaagaagagtaagaagaaatataagagccaccatggcccctaagaagaagcgtaaagtgagccggatggaacgcctcgtctacgaggtgcggcagaagtgcagaaacatcgaggacatctgcatctcctgcggatctctgaacgtgaccctggagcacccactgttcatcggcggcatgtgccagaactgtaaaaactgttttctggagtgtgcctatcaatacgacgatgacggctaccagagctactgcaccatctgttgcggcggaagagaggtgctgatgtgtggaaataacaactgctgccggtgcttctgcgtggaatgcgtggacctgctggtgggccccggcgccgcccaggccgctattaaggaagatccttggaactgctacatgtgcggccacaagggcacatacggcctgctgagacggagagaggactggcctagcagactgcagatgttcttcgccaataaccacgaccaggagttcgacccccctaaggtgtaccctcccgtccccgccgagaagagaaagcccatccgggtcctgagcctgttcgatggcatcgccaccggtctgctggtgctgaaggacctgggcatccaggtggataggtacattgcctccgaggtgtgcgaggactccatcaccgtgggaatggtgcgtcatcagggcaagatcatgtacgtgggcgacgtgcggagcgtgacacagaagcatatccaggagtggggccctttcgacctggtgatcggcggcagcccttgcaatgacctgagcatcgtgaacccagcccggaagggcctgtacgagggaaccggcagactgttcttcgagttttacagactgctgcacgacgcccggcctaaggaaggcgacgaccggcccttcttttggctgttcgagaatgtggtggccatgggagtcagcgacaagcgggatattagccggttcctggagagcaaccccgtgatgatcgatgccaaggaagtgagcgccgcccaccgggccagatacttctggggcaatctgcctggcatgaacagacccctggccagcaccgtgaacgacaagctggagctgcaggagtgcctggagcacggccggatcgccaagttcagcaaggtgagaaccatcaccacccgaagcaacagcatcaaacaaggcaaggaccagcactttcctgtgttcatgaacgagaaggaggacatcctgtggtgtaccgagatggagagagtgttcgggttcccagtccactacacagatgtcagcaacatgtctagactggccagacagagactgctgggaagaagctggtccgtccctgtgatcagacacctgttcgcccctctgaaggagtacttcgcctgcgtgagcagcggcaacagcaacgccaacagccggggccccagcttctctagcggcctggtgccactgtccctgagagggagccacatgggccccatggagatctacaaaaccgtgagcgcctggaagcggcagcctgtgcgcgtgctgagcctgtttcggaatatcgataaagtcctgaaaagcctgggattcctggagagcggctctggctccggcggtggcaccctgaagtacgtggaggatgtgacaaacgtggtcagacgggatgtggagaagtggggccccttcgatctggtgtacggcagcacccaacccctgggcagctcttgtgaccggtgccctggctggtacatgtttcagttccaccggatcctgcagtacgccctgccgagacaggagtcccagcggccattcttttggattttcatggacaacttgctgctgaccgaggatgaccaggaaactaccactcggttcctgcagaccgaagccgtgaccctgcaggacgtgagaggccgggactaccagaacgccatgcgggtgtggtccaacatccctggactgaaaagcaagcacgcacctctgacccctaaagaagaggagtacctgcaggcccaggtgcggagcagaagcaagctggacgcccctaaggtggatctgctggtgaagaattgcctcctgcccctgagagagtacttcaagtatttcagccagaatagtctgcccctgggcggcccaagcagcggcgcccctcctcccagcggcggcagcccagccggctccccaacctctaccgaggagggcacctctgagtccgccacccccgagagcggccctggcacctccaccgagcccagcgagggcagcgcacccggcagccctgccggcagccccacctccacagaggagggaaccagcaccgagcccagcgaaggcagcgccccaggcaccagcaccgagcctagtgagggcggctctggcggcggcagcgcccaggagattaaacggatcaacaagatcagaagaagacttgtgaaagacagcaacaccaagaaggccggcaagacaggccccatgaaaaccctgctggttagagtgatgacacccgatctgagagagcggctggaaaacctgagaaagaagcctgaaaatatcccccagcccatcagcaatacatctagagccaacctgaataagctgctgaccgattacaccgaaatgaagaaggcgatcctgcatgtgtactgggaagagttccagaaggaccctgtgggcctgatgagccgggtggcccagcctgccagcaagaagatcgatcagaacaagctgaaacctgagatggacgagaagggcaacctgaccaccgccggctttgcctgctctcagtgtggccagcccctgttcgtgtacaagctggagcaggtgtctgagaagggcaaggcttacaccaactacttcggacggtgcaatgtggccgagcacgaaaagctgatcctgctggcccagctgaagcccgagaaggatagcgacgaagccgtgacatatagcctgggaaagtttgggcagagggccctggatttctacagcattcatgtgaccaaggagtccacccaccccgtgaagcccctggcccagatcgccggaaacagatacgcctccggacctgtgggaaaggccctgagcgacgcatgtatgggcacaatcgcctccttcctgtctaagtaccaggacatcatcatcgaacaccagaaggtggtgaagggcaaccagaagagactggagagcctgcgggagctggccggcaaggaaaacctggaataccctagcgtgaccctgccacctcagcctcacaccaaggagggcgttgatgcctacaacgaagtgatcgcccgggtgcgaatgtgggtgaacctgaacctgtggcagaagctgaagctaagcagagatgatgccaagcctctgctgagactgaagggattcccttcctttcctctggtcgagagacaggccaacgaagtggactggtgggacatggtgtgtaacgtgaagaagctgatcaacgagaaaaaggaggatggcaaggtgttttggcagaatctggctggctacaagagacaggaagccctgagaccatacctgagcagcgaggaagatcggaagaagggaaagaaattcgctcggtaccagctgggcgacctgctgctgcacctggaaaagaagcacggcgaggactggggaaaggtgtacgacgaggcctgggagcggattgacaagaaagtggaaggcctgagcaagcacatcaagctggaagaggaacggagaagcgaggacgcccagagcaaggccgccctgaccgactggctgcgggctaaggccagcttcgtgatcgagggcctgaaggaggccgacaaggacgagttctgcagatgcgagctgaagctgcagaagtggtacggggacctgcggggaaagcccttcgccatcgaagccgagaacagcatcctggacatcagcggcttcagcaagcagtacaactgtgccttcatctggcagaaggacggcgtgaagaagctgaacctgtacctgatcatcaactacttcaagggcggcaagctgcggttcaagaagatcaaacctgaagccttcgaagccaacagattctacaccgtgatcaacaaaaagagcggcgagatcgtgcccatggaggtgaacttcaacttcgacgaccccaacctgatcatcctgcctctggcctttggcaagagacagggcagagaattcatctggaacgacctgctgtccctggaaaccggcagcctgaagctggccaacggaagagtgatcgagaagacactgtacaacagaagaacccggcaggatgagcctgccctgttcgtggccctgaccttcgagcggcgggaggtcctggactcctccaatatcaaaccaatgaacctgatcggcgtggcaagaggcgaaaacatccccgccgtgatcgccctgaccgaccccgagggctgcccactgagccggtttaaggatagcctgggaaacccaacccacatcctgagaatcggcgagagctataaggagaagcagcggaccatccaggccaagaaggaggtggagcagcggagagccggcggctacagccggaagtacgccagcaaagccaagaatctggcagacgatatggtgagaaacaccgctagagatctgctgtactacgccgtgacccaggatgccatgctgatcttcgccaacctgagccggggcttcggccggcagggcaagcggaccttcatggccgagagacagtacacacggatggaggactggctgaccgccaagctggcctacgagggcctgagcaagacctacctgtccaagacactggcccagtacacctccaagacatgcagcaactgtgggtttaccatcaccagcgccgactacgacagggtgctggagaagctgaagaagacagcaacaggctggatgaccacaattaacggcaaggagctgaaggtggagggccagattacctactacaacagatacaagagacagaacgtagtcaaggacctgtccgtcgagctggatagactgagcgaagaatctgtgaacaacgacatctcctcctggacaaagggcagaagcggagaagctctgagcctcctgaagaaaagattctcccatagacccgtgcaggagaagttcgtgtgcctgaactgcggcttcgagacacacgcagccgagcaagccgccctgaacatcgccagatcctggctgttcctgcggagccaggagtacaagaaataccagacaaacaagacaaccggcaacaccgataagagagccttcgtcgagacctggcagtccttttaccggaagaagcttaaggaggtgtggaaacctgccgtgcggtctggcggatctggcggaggctccacaagcgcccagaagagcctgaccctggaggacgtggccgtggacttcagcagggaggagtggaggctgctggcccccgcccagaaggacctgtacagggacgtgatgctggagaactacaggaacctggtgagcgtgggccaccaggccagcaagcccgacgtgctggccaagctggagaggggcgaggagccctgggccatcgaggaggaggtgaggagcggcaccagccccgagaccggcaaggtgaccagccccaagaaaaagagaaaagtctaagctgccttctgcggggcttgccttctggccatgcccttcttctctcccttgcacctgtacctcttggtctttgaataaagcctgagtaggaaggctagcaaaaaaaaaaaaaaaaaaaaaaaaaaaaaaaaaaaaaaaaaaaaaaaaaaaaaaaaaaaaaaaaaaaaaaaaaaaaaaaa

SEQ ID NO: 6594 - RNA, 5797 nt, synthetic construct
  source 1..5797: mol_type = other RNA
aggaaataagagagaaaagaagagtaagaagaaatataagagccaccatggcccctaagaagaagcgtaaagtgagccggatggaacgcctcgtctacgaggtgcggcagaagtgcagaaacatcgaggacatctgcatctcctgcggatctctgaacgtgaccctggagcacccactgttcatcggcggcatgtgccagaactgtaaaaactgttttctggagtgtgcctatcaatacgacgatgacggctaccagagctactgcaccatctgttgcggcggaagagaggtgctgatgtgtggaaataacaactgctgccggtgcttctgcgtggaatgcgtggacctgctggtgggccccggcgccgcccaggccgctattaaggaagatccttggaactgctacatgtgcggccacaagggcacatacggcctgctgagacggagagaggactggcctagcagactgcagatgttcttcgccaataaccacgaccaggagttcgacccccctaaggtgtaccctcccgtccccgccgagaagagaaagcccatccgggtcctgagcctgttcgatggcatcgccaccggtctgctggtgctgaaggacctgggcatccaggtggataggtacattgcctccgaggtgtgcgaggactccatcaccgtgggaatggtgcgtcatcagggcaagatcatgtacgtgggcgacgtgcggagcgtgacacagaagcatatccaggagtggggccctttcgacctggtgatcggcggcagcccttgcaatgacctgagcatcgtgaacccagcccggaagggcctgtacgagggaaccggcagactgttcttcgagttttacagactgctgcacgacgcccggcctaaggaaggcgacgaccggcccttcttttggctgttcgagaatgtggtggccatgggagtcagcgacaagcgggatattagccggttcctggagagcaaccccgtgatgatcgatgccaaggaagtgagcgccgcccaccgggccagatacttctggggcaatctgcctggcatgaacagacccctggccagcaccgtgaacgacaagctggagctgcaggagtgcctggagcacggccggatcgccaagttcagcaaggtgagaaccatcaccacccgaagcaacagcatcaaacaaggcaaggaccagcactttcctgtgttcatgaacgagaaggaggacatcctgtggtgtaccgagatggagagagtgttcgggttcccagtccactacacagatgtcagcaacatgtctagactggccagacagagactgctgggaagaagctggtccgtccctgtgatcagacacctgttcgcccctctgaaggagtacttcgcctgcgtgagcagcggcaacagcaacgccaacagccggggccccagcttctctagcggcctggtgccactgtccctgagagggagccacatgggccccatggagatctacaaaaccgtgagcgcctggaagcggcagcctgtgcgcgtgctgagcctgtttcggaatatcgataaagtcctgaaaagcctgggattcctggagagcggctctggctccggcggtggcaccctgaagtacgtggaggatgtgacaaacgtggtcagacgggatgtggagaagtggggccccttcgatctggtgtacggcagcacccaacccctgggcagctcttgtgaccggtgccctggctggtacatgtttcagttccaccggatcctgcagtacgccctgccgagacaggagtcccagcggccattcttttggattttcatggacaacttgctgctgaccgaggatgaccaggaaactaccactcggttcctgcagaccgaagccgtgaccctgcaggacgtgagaggccgggactaccagaacgccatgcgggtgtggtccaacatccctggactgaaaagcaagcacgcacctctgacccctaaagaagaggagtacctgcaggcccaggtgcggagcagaagcaagctggacgcccctaaggtggatctgctggtgaagaattgcctcctgcccctgagagagtacttcaagtatttcagccagaatagtctgcccctgggcggcccaagcagcggcgcccctcctcccagcggcggcagcccagccggctccccaacctctaccgaggagggcacctctgagtccgccacccccgagagcggccctggcacctccaccgagcccagcgagggcagcgcacccggcagccctgccggcagccccacctccacagaggagggaaccagcaccgagcccagcgaaggcagcgccccaggcaccagcaccgagcctagtgagggcggctctggcggcggcagcgcccaggagattaaacggatcaacaagatcagaagaagacttgtgaaagacagcaacaccaagaaggccggcaagacaggccccatgaaaaccctgctggttagagtgatgacacccgatctgagagagcggctggaaaacctgagaaagaagcctgaaaatatcccccagcccatcagcaatacatctagagccaacctgaataagctgctgaccgattacaccgaaatgaagaaggcgatcctgcatgtgtactgggaagagttccagaaggaccctgtgggcctgatgagccgggtggcccagcctgccagcaagaagatcgatcagaacaagctgaaacctgagatggacgagaagggcaacctgaccaccgccggctttgcctgctctcagtgtggccagcccctgttcgtgtacaagctggagcaggtgtctgagaagggcaaggcttacaccaactacttcggacggtgcaatgtggccgagcacgaaaagctgatcctgctggcccagctgaagcccgagaaggatagcgacgaagccgtgacatatagcctgggaaagtttgggcagagggccctggatttctacagcattcatgtgaccaaggagtccacccaccccgtgaagcccctggcccagatcgccggaaacagatacgcctccggacctgtgggaaaggccctgagcgacgcatgtatgggcacaatcgcctccttcctgtctaagtaccaggacatcatcatcgaacaccagaaggtggtgaagggcaaccagaagagactggagagcctgcgggagctggccggcaaggaaaacctggaataccctagcgtgaccctgccacctcagcctcacaccaaggagggcgttgatgcctacaacgaagtgatcgcccgggtgcgaatgtgggtgaacctgaacctgtggcagaagctgaagctaagcagagatgatgccaagcctctgctgagactgaagggattcccttcctttcctctggtcgagagacaggccaacgaagtggactggtgggacatggtgtgtaacgtgaagaagctgatcaacgagaaaaaggaggatggcaaggtgttttggcagaatctggctggctacaagagacaggaagccctgagaccatacctgagcagcgaggaagatcggaagaagggaaagaaattcgctcggtaccagctgggcgacctgctgctgcacctggaaaagaagcacggcgaggactggggaaaggtgtacgacgaggcctgggagcggattgacaagaaagtggaaggcctgagcaagcacatcaagctggaagaggaacggagaagcgaggacgcccagagcaaggccgccctgaccgactggctgcgggctaaggccagcttcgtgatcgagggcctgaaggaggccgacaaggacgagttctgcagatgcgagctgaagctgcagaagtggtacggggacctgcggggaaagcccttcgccatcgaagccgagaacagcatcctggacatcagcggcttcagcaagcagtacaactgtgccttcatctggcagaaggacggcgtgaagaagctgaacctgtacctgatcatcaactacttcaagggcggcaagctgcggttcaagaagatcaaacctgaagccttcgaagccaacagattctacaccgtgatcaacaaaaagagcggcgagatcgtgcccatggaggtgaacttcaacttcgacgaccccaacctgatcatcctgcctctggcctttggcaagagacagggcagagaattcatctggaacgacctgctgtccctggaaaccggcagcctgaagctggccaacggaagagtgatcgagaagacactgtacaacagaagaacccggcaggatgagcctgccctgttcgtggccctgaccttcgagcggcgggaggtcctggactcctccaatatcaaaccaatgaacctgatcggcgtggcaagaggcgaaaacatccccgccgtgatcgccctgaccgaccccgagggctgcccactgagccggtttaaggatagcctgggaaacccaacccacatcctgagaatcggcgagagctataaggagaagcagcggaccatccaggccaagaaggaggtggagcagcggagagccggcggctacagccggaagtacgccagcaaagccaagaatctggcagacgatatggtgagaaacaccgctagagatctgctgtactacgccgtgacccaggatgccatgctgatcttcgccaacctgagccggggcttcggccggcagggcaagcggaccttcatggccgagagacagtacacacggatggaggactggctgaccgccaagctggcctacgagggcctgagcaagacctacctgtccaagacactggcccagtacacctccaagacatgcagcaactgtgggtttaccatcaccagcgccgactacgacagggtgctggagaagctgaagaagacagcaacaggctggatgaccacaattaacggcaaggagctgaaggtggagggccagattacctactacaacagatacaagagacagaacgtagtcaaggacctgtccgtcgagctggatagactgagcgaagaatctgtgaacaacgacatctcctcctggacaaagggcagaagcggagaagctctgagcctcctgaagaaaagattctcccatagacccgtgcaggagaagttcgtgtgcctgaactgcggcttcgagacacacgcagccgagcaagccgccctgaacatcgccagatcctggctgttcctgcggagccaggagtacaagaaataccagacaaacaagacaaccggcaacaccgataagagagccttcgtcgagacctggcagtccttttaccggaagaagcttaaggaggtgtggaaacctgccgtgcggtctggcggatctggcggaggctccacaagcgcccaggagcccgtgaccttcaacgacgtggccgtggacttcacccaggaggagtggggccagctggacctggtgcagaggaccctgtacagggacgtgatgctggagacctacggccacctgctgagcgtgggcaaccagatcaccaagcccgaggtgatcagcctgctggagcagggcgaggagccctggagcatggagcccgcctaccccctgcagggcacctgccccgcccccgagatcaccagccccaagaaaaagagaaaagtctaagctgccttctgcggggcttgccttctggccatgcccttcttctctcccttgcacctgtacctcttggtctttgaataaagcctgagtaggaaggctagcaaaaaaaaaaaaaaaaaaaaaaaaaaaaaaaaaaaaaaaaaaaaaaaaaaaaaaaaaaaaaaaaaaaaaaaaaaaaaaaa

SEQ ID NO: 6595 - RNA, 5797 nt, synthetic construct
  source 1..5797: mol_type = other RNA
aggaaataagagagaaaagaagagtaagaagaaatataagagccaccatggcccctaagaagaagcgtaaagtgagccggatggaacgcctcgtctacgaggtgcggcagaagtgcagaaacatcgaggacatctgcatctcctgcggatctctgaacgtgaccctggagcacccactgttcatcggcggcatgtgccagaactgtaaaaactgttttctggagtgtgcctatcaatacgacgatgacggctaccagagctactgcaccatctgttgcggcggaagagaggtgctgatgtgtggaaataacaactgctgccggtgcttctgcgtggaatgcgtggacctgctggtgggccccggcgccgcccaggccgctattaaggaagatccttggaactgctacatgtgcggccacaagggcacatacggcctgctgagacggagagaggactggcctagcagactgcagatgttcttcgccaataaccacgaccaggagttcgacccccctaaggtgtaccctcccgtccccgccgagaagagaaagcccatccgggtcctgagcctgttcgatggcatcgccaccggtctgctggtgctgaaggacctgggcatccaggtggataggtacattgcctccgaggtgtgcgaggactccatcaccgtgggaatggtgcgtcatcagggcaagatcatgtacgtgggcgacgtgcggagcgtgacacagaagcatatccaggagtggggccctttcgacctggtgatcggcggcagcccttgcaatgacctgagcatcgtgaacccagcccggaagggcctgtacgagggaaccggcagactgttcttcgagttttacagactgctgcacgacgcccggcctaaggaaggcgacgaccggcccttcttttggctgttcgagaatgtggtggccatgggagtcagcgacaagcgggatattagccggttcctggagagcaaccccgtgatgatcgatgccaaggaagtgagcgccgcccaccgggccagatacttctggggcaatctgcctggcatgaacagacccctggccagcaccgtgaacgacaagctggagctgcaggagtgcctggagcacggccggatcgccaagttcagcaaggtgagaaccatcaccacccgaagcaacagcatcaaacaaggcaaggaccagcactttcctgtgttcatgaacgagaaggaggacatcctgtggtgtaccgagatggagagagtgttcgggttcccagtccactacacagatgtcagcaacatgtctagactggccagacagagactgctgggaagaagctggtccgtccctgtgatcagacacctgttcgcccctctgaaggagtacttcgcctgcgtgagcagcggcaacagcaacgccaacagccggggccccagcttctctagcggcctggtgccactgtccctgagagggagccacatgggccccatggagatctacaaaaccgtgagcgcctggaagcggcagcctgtgcgcgtgctgagcctgtttcggaatatcgataaagtcctgaaaagcctgggattcctggagagcggctctggctccggcggtggcaccctgaagtacgtggaggatgtgacaaacgtggtcagacgggatgtggagaagtggggccccttcgatctggtgtacggcagcacccaacccctgggcagctcttgtgaccggtgccctggctggtacatgtttcagttccaccggatcctgcagtacgccctgccgagacaggagtcccagcggccattcttttggattttcatggacaacttgctgctgaccgaggatgaccaggaaactaccactcggttcctgcagaccgaagccgtgaccctgcaggacgtgagaggccgggactaccagaacgccatgcgggtgtggtccaacatccctggactgaaaagcaagcacgcacctctgacccctaaagaagaggagtacctgcaggcccaggtgcggagcagaagcaagctggacgcccctaaggtggatctgctggtgaagaattgcctcctgcccctgagagagtacttcaagtatttcagccagaatagtctgcccctgggcggcccaagcagcggcgcccctcctcccagcggcggcagcccagccggctccccaacctctaccgaggagggcacctctgagtccgccacccccgagagcggccctggcacctccaccgagcccagcgagggcagcgcacccggcagccctgccggcagccccacctccacagaggagggaaccagcaccgagcccagcgaaggcagcgccccaggcaccagcaccgagcctagtgagggcggctctggcggcggcagcgcccaggagattaaacggatcaacaagatcagaagaagacttgtgaaagacagcaacaccaagaaggccggcaagacaggccccatgaaaaccctgctggttagagtgatgacacccgatctgagagagcggctggaaaacctgagaaagaagcctgaaaatatcccccagcccatcagcaatacatctagagccaacctgaataagctgctgaccgattacaccgaaatgaagaaggcgatcctgcatgtgtactgggaagagttccagaaggaccctgtgggcctgatgagccgggtggcccagcctgccagcaagaagatcgatcagaacaagctgaaacctgagatggacgagaagggcaacctgaccaccgccggctttgcctgctctcagtgtggccagcccctgttcgtgtacaagctggagcaggtgtctgagaagggcaaggcttacaccaactacttcggacggtgcaatgtggccgagcacgaaaagctgatcctgctggcccagctgaagcccgagaaggatagcgacgaagccgtgacatatagcctgggaaagtttgggcagagggccctggatttctacagcattcatgtgaccaaggagtccacccaccccgtgaagcccctggcccagatcgccggaaacagatacgcctccggacctgtgggaaaggccctgagcgacgcatgtatgggcacaatcgcctccttcctgtctaagtaccaggacatcatcatcgaacaccagaaggtggtgaagggcaaccagaagagactggagagcctgcgggagctggccggcaaggaaaacctggaataccctagcgtgaccctgccacctcagcctcacaccaaggagggcgttgatgcctacaacgaagtgatcgcccgggtgcgaatgtgggtgaacctgaacctgtggcagaagctgaagctaagcagagatgatgccaagcctctgctgagactgaagggattcccttcctttcctctggtcgagagacaggccaacgaagtggactggtgggacatggtgtgtaacgtgaagaagctgatcaacgagaaaaaggaggatggcaaggtgttttggcagaatctggctggctacaagagacaggaagccctgagaccatacctgagcagcgaggaagatcggaagaagggaaagaaattcgctcggtaccagctgggcgacctgctgctgcacctggaaaagaagcacggcgaggactggggaaaggtgtacgacgaggcctgggagcggattgacaagaaagtggaaggcctgagcaagcacatcaagctggaagaggaacggagaagcgaggacgcccagagcaaggccgccctgaccgactggctgcgggctaaggccagcttcgtgatcgagggcctgaaggaggccgacaaggacgagttctgcagatgcgagctgaagctgcagaagtggtacggggacctgcggggaaagcccttcgccatcgaagccgagaacagcatcctggacatcagcggcttcagcaagcagtacaactgtgccttcatctggcagaaggacggcgtgaagaagctgaacctgtacctgatcatcaactacttcaagggcggcaagctgcggttcaagaagatcaaacctgaagccttcgaagccaacagattctacaccgtgatcaacaaaaagagcggcgagatcgtgcccatggaggtgaacttcaacttcgacgaccccaacctgatcatcctgcctctggcctttggcaagagacagggcagagaattcatctggaacgacctgctgtccctggaaaccggcagcctgaagctggccaacggaagagtgatcgagaagacactgtacaacagaagaacccggcaggatgagcctgccctgttcgtggccctgaccttcgagcggcgggaggtcctggactcctccaatatcaaaccaatgaacctgatcggcgtggcaagaggcgaaaacatccccgccgtgatcgccctgaccgaccccgagggctgcccactgagccggtttaaggatagcctgggaaacccaacccacatcctgagaatcggcgagagctataaggagaagcagcggaccatccaggccaagaaggaggtggagcagcggagagccggcggctacagccggaagtacgccagcaaagccaagaatctggcagacgatatggtgagaaacaccgctagagatctgctgtactacgccgtgacccaggatgccatgctgatcttcgccaacctgagccggggcttcggccggcagggcaagcggaccttcatggccgagagacagtacacacggatggaggactggctgaccgccaagctggcctacgagggcctgagcaagacctacctgtccaagacactggcccagtacacctccaagacatgcagcaactgtgggtttaccatcaccagcgccgactacgacagggtgctggagaagctgaagaagacagcaacaggctggatgaccacaattaacggcaaggagctgaaggtggagggccagattacctactacaacagatacaagagacagaacgtagtcaaggacctgtccgtcgagctggatagactgagcgaagaatctgtgaacaacgacatctcctcctggacaaagggcagaagcggagaagctctgagcctcctgaagaaaagattctcccatagacccgtgcaggagaagttcgtgtgcctgaactgcggcttcgagacacacgcagccgagcaagccgccctgaacatcgccagatcctggctgttcctgcggagccaggagtacaagaaataccagacaaacaagacaaccggcaacaccgataagagagccttcgtcgagacctggcagtccttttaccggaagaagcttaaggaggtgtggaaacctgccgtgcggtctggcggatctggcggaggctccacaagcaggcccagggccctgaagttcgccgacgtggccgtgtacttcagccccgaggagtggggctgcctgaggcccgcccagaggaccctgtacagggacgtgatgagggagacctacggccacctgggcgccctgggctgcgccggccccaagcccgccctgatcagctggctggagaggaacaccgacgactgggagcccgccgccctggacccccaggagtaccccaggggcgtgaccgtgcagaccagccccaagaaaaagagaaaagtctaagctgccttctgcggggcttgccttctggccatgcccttcttctctcccttgcacctgtacctcttggtctttgaataaagcctgagtaggaaggctagcaaaaaaaaaaaaaaaaaaaaaaaaaaaaaaaaaaaaaaaaaaaaaaaaaaaaaaaaaaaaaaaaaaaaaaaaaaaaaaaa

SEQ ID NO: 6596 - RNA, 5797 nt, synthetic construct
  source 1..5797: mol_type = other RNA
aggaaataagagagaaaagaagagtaagaagaaatataagagccaccatggcccctaagaagaagcgtaaagtgagccggatggaacgcctcgtctacgaggtgcggcagaagtgcagaaacatcgaggacatctgcatctcctgcggatctctgaacgtgaccctggagcacccactgttcatcggcggcatgtgccagaactgtaaaaactgttttctggagtgtgcctatcaatacgacgatgacggctaccagagctactgcaccatctgttgcggcggaagagaggtgctgatgtgtggaaataacaactgctgccggtgcttctgcgtggaatgcgtggacctgctggtgggccccggcgccgcccaggccgctattaaggaagatccttggaactgctacatgtgcggccacaagggcacatacggcctgctgagacggagagaggactggcctagcagactgcagatgttcttcgccaataaccacgaccaggagttcgacccccctaaggtgtaccctcccgtccccgccgagaagagaaagcccatccgggtcctgagcctgttcgatggcatcgccaccggtctgctggtgctgaaggacctgggcatccaggtggataggtacattgcctccgaggtgtgcgaggactccatcaccgtgggaatggtgcgtcatcagggcaagatcatgtacgtgggcgacgtgcggagcgtgacacagaagcatatccaggagtggggccctttcgacctggtgatcggcggcagcccttgcaatgacctgagcatcgtgaacccagcccggaagggcctgtacgagggaaccggcagactgttcttcgagttttacagactgctgcacgacgcccggcctaaggaaggcgacgaccggcccttcttttggctgttcgagaatgtggtggccatgggagtcagcgacaagcgggatattagccggttcctggagagcaaccccgtgatgatcgatgccaaggaagtgagcgccgcccaccgggccagatacttctggggcaatctgcctggcatgaacagacccctggccagcaccgtgaacgacaagctggagctgcaggagtgcctggagcacggccggatcgccaagttcagcaaggtgagaaccatcaccacccgaagcaacagcatcaaacaaggcaaggaccagcactttcctgtgttcatgaacgagaaggaggacatcctgtggtgtaccgagatggagagagtgttcgggttcccagtccactacacagatgtcagcaacatgtctagactggccagacagagactgctgggaagaagctggtccgtccctgtgatcagacacctgttcgcccctctgaaggagtacttcgcctgcgtgagcagcggcaacagcaacgccaacagccggggccccagcttctctagcggcctggtgccactgtccctgagagggagccacatgggccccatggagatctacaaaaccgtgagcgcctggaagcggcagcctgtgcgcgtgctgagcctgtttcggaatatcgataaagtcctgaaaagcctgggattcctggagagcggctctggctccggcggtggcaccctgaagtacgtggaggatgtgacaaacgtggtcagacgggatgtggagaagtggggccccttcgatctggtgtacggcagcacccaacccctgggcagctcttgtgaccggtgccctggctggtacatgtttcagttccaccggatcctgcagtacgccctgccgagacaggagtcccagcggccattcttttggattttcatggacaacttgctgctgaccgaggatgaccaggaaactaccactcggttcctgcagaccgaagccgtgaccctgcaggacgtgagaggccgggactaccagaacgccatgcgggtgtggtccaacatccctggactgaaaagcaagcacgcacctctgacccctaaagaagaggagtacctgcaggcccaggtgcggagcagaagcaagctggacgcccctaaggtggatctgctggtgaagaattgcctcctgcccctgagagagtacttcaagtatttcagccagaatagtctgcccctgggcggcccaagcagcggcgcccctcctcccagcggcggcagcccagccggctccccaacctctaccgaggagggcacctctgagtccgccacccccgagagcggccctggcacctccaccgagcccagcgagggcagcgcacccggcagccctgccggcagccccacctccacagaggagggaaccagcaccgagcccagcgaaggcagcgccccaggcaccagcaccgagcctagtgagggcggctctggcggcggcagcgcccaggagattaaacggatcaacaagatcagaagaagacttgtgaaagacagcaacaccaagaaggccggcaagacaggccccatgaaaaccctgctggttagagtgatgacacccgatctgagagagcggctggaaaacctgagaaagaagcctgaaaatatcccccagcccatcagcaatacatctagagccaacctgaataagctgctgaccgattacaccgaaatgaagaaggcgatcctgcatgtgtactgggaagagttccagaaggaccctgtgggcctgatgagccgggtggcccagcctgccagcaagaagatcgatcagaacaagctgaaacctgagatggacgagaagggcaacctgaccaccgccggctttgcctgctctcagtgtggccagcccctgttcgtgtacaagctggagcaggtgtctgagaagggcaaggcttacaccaactacttcggacggtgcaatgtggccgagcacgaaaagctgatcctgctggcccagctgaagcccgagaaggatagcgacgaagccgtgacatatagcctgggaaagtttgggcagagggccctggatttctacagcattcatgtgaccaaggagtccacccaccccgtgaagcccctggcccagatcgccggaaacagatacgcctccggacctgtgggaaaggccctgagcgacgcatgtatgggcacaatcgcctccttcctgtctaagtaccaggacatcatcatcgaacaccagaaggtggtgaagggcaaccagaagagactggagagcctgcgggagctggccggcaaggaaaacctggaataccctagcgtgaccctgccacctcagcctcacaccaaggagggcgttgatgcctacaacgaagtgatcgcccgggtgcgaatgtgggtgaacctgaacctgtggcagaagctgaagctaagcagagatgatgccaagcctctgctgagactgaagggattcccttcctttcctctggtcgagagacaggccaacgaagtggactggtgggacatggtgtgtaacgtgaagaagctgatcaacgagaaaaaggaggatggcaaggtgttttggcagaatctggctggctacaagagacaggaagccctgagaccatacctgagcagcgaggaagatcggaagaagggaaagaaattcgctcggtaccagctgggcgacctgctgctgcacctggaaaagaagcacggcgaggactggggaaaggtgtacgacgaggcctgggagcggattgacaagaaagtggaaggcctgagcaagcacatcaagctggaagaggaacggagaagcgaggacgcccagagcaaggccgccctgaccgactggctgcgggctaaggccagcttcgtgatcgagggcctgaaggaggccgacaaggacgagttctgcagatgcgagctgaagctgcagaagtggtacggggacctgcggggaaagcccttcgccatcgaagccgagaacagcatcctggacatcagcggcttcagcaagcagtacaactgtgccttcatctggcagaaggacggcgtgaagaagctgaacctgtacctgatcatcaactacttcaagggcggcaagctgcggttcaagaagatcaaacctgaagccttcgaagccaacagattctacaccgtgatcaacaaaaagagcggcgagatcgtgcccatggaggtgaacttcaacttcgacgaccccaacctgatcatcctgcctctggcctttggcaagagacagggcagagaattcatctggaacgacctgctgtccctggaaaccggcagcctgaagctggccaacggaagagtgatcgagaagacactgtacaacagaagaacccggcaggatgagcctgccctgttcgtggccctgaccttcgagcggcgggaggtcctggactcctccaatatcaaaccaatgaacctgatcggcgtggcaagaggcgaaaacatccccgccgtgatcgccctgaccgaccccgagggctgcccactgagccggtttaaggatagcctgggaaacccaacccacatcctgagaatcggcgagagctataaggagaagcagcggaccatccaggccaagaaggaggtggagcagcggagagccggcggctacagccggaagtacgccagcaaagccaagaatctggcagacgatatggtgagaaacaccgctagagatctgctgtactacgccgtgacccaggatgccatgctgatcttcgccaacctgagccggggcttcggccggcagggcaagcggaccttcatggccgagagacagtacacacggatggaggactggctgaccgccaagctggcctacgagggcctgagcaagacctacctgtccaagacactggcccagtacacctccaagacatgcagcaactgtgggtttaccatcaccagcgccgactacgacagggtgctggagaagctgaagaagacagcaacaggctggatgaccacaattaacggcaaggagctgaaggtggagggccagattacctactacaacagatacaagagacagaacgtagtcaaggacctgtccgtcgagctggatagactgagcgaagaatctgtgaacaacgacatctcctcctggacaaagggcagaagcggagaagctctgagcctcctgaagaaaagattctcccatagacccgtgcaggagaagttcgtgtgcctgaactgcggcttcgagacacacgcagccgagcaagccgccctgaacatcgccagatcctggctgttcctgcggagccaggagtacaagaaataccagacaaacaagacaaccggcaacaccgataagagagccttcgtcgagacctggcagtccttttaccggaagaagcttaaggaggtgtggaaacctgccgtgcggtctggcggatctggcggaggctccacaagcagccaggtgagcgtgaccttcgaggacgtggccgtgctgttcaccagggacgagtggaggaagctggcccccccccagaggaacctgtaccaggacgtgatgctggagaactacagcaacctggtgagcctgggcctgctgttccccaagcccaaggtgatcagcctgctgcagcagggcgaggacccctggaaggtggagaaggagaacctgggcggcagcagcctgggctggaagaacagcaccagccccaagaaaaagagaaaagtctaagctgccttctgcggggcttgccttctggccatgcccttcttctctcccttgcacctgtacctcttggtctttgaataaagcctgagtaggaaggctagcaaaaaaaaaaaaaaaaaaaaaaaaaaaaaaaaaaaaaaaaaaaaaaaaaaaaaaaaaaaaaaaaaaaaaaaaaaaaaaaa

SEQ ID NO: 6597 - RNA, 5797 nt, synthetic construct
  source 1..5797: mol_type = other RNA
aggaaataagagagaaaagaagagtaagaagaaatataagagccaccatggcccctaagaagaagcgtaaagtgagccggatggaacgcctcgtctacgaggtgcggcagaagtgcagaaacatcgaggacatctgcatctcctgcggatctctgaacgtgaccctggagcacccactgttcatcggcggcatgtgccagaactgtaaaaactgttttctggagtgtgcctatcaatacgacgatgacggctaccagagctactgcaccatctgttgcggcggaagagaggtgctgatgtgtggaaataacaactgctgccggtgcttctgcgtggaatgcgtggacctgctggtgggccccggcgccgcccaggccgctattaaggaagatccttggaactgctacatgtgcggccacaagggcacatacggcctgctgagacggagagaggactggcctagcagactgcagatgttcttcgccaataaccacgaccaggagttcgacccccctaaggtgtaccctcccgtccccgccgagaagagaaagcccatccgggtcctgagcctgttcgatggcatcgccaccggtctgctggtgctgaaggacctgggcatccaggtggataggtacattgcctccgaggtgtgcgaggactccatcaccgtgggaatggtgcgtcatcagggcaagatcatgtacgtgggcgacgtgcggagcgtgacacagaagcatatccaggagtggggccctttcgacctggtgatcggcggcagcccttgcaatgacctgagcatcgtgaacccagcccggaagggcctgtacgagggaaccggcagactgttcttcgagttttacagactgctgcacgacgcccggcctaaggaaggcgacgaccggcccttcttttggctgttcgagaatgtggtggccatgggagtcagcgacaagcgggatattagccggttcctggagagcaaccccgtgatgatcgatgccaaggaagtgagcgccgcccaccgggccagatacttctggggcaatctgcctggcatgaacagacccctggccagcaccgtgaacgacaagctggagctgcaggagtgcctggagcacggccggatcgccaagttcagcaaggtgagaaccatcaccacccgaagcaacagcatcaaacaaggcaaggaccagcactttcctgtgttcatgaacgagaaggaggacatcctgtggtgtaccgagatggagagagtgttcgggttcccagtccactacacagatgtcagcaacatgtctagactggccagacagagactgctgggaagaagctggtccgtccctgtgatcagacacctgttcgcccctctgaaggagtacttcgcctgcgtgagcagcggcaacagcaacgccaacagccggggccccagcttctctagcggcctggtgccactgtccctgagagggagccacatgggccccatggagatctacaaaaccgtgagcgcctggaagcggcagcctgtgcgcgtgctgagcctgtttcggaatatcgataaagtcctgaaaagcctgggattcctggagagcggctctggctccggcggtggcaccctgaagtacgtggaggatgtgacaaacgtggtcagacgggatgtggagaagtggggccccttcgatctggtgtacggcagcacccaacccctgggcagctcttgtgaccggtgccctggctggtacatgtttcagttccaccggatcctgcagtacgccctgccgagacaggagtcccagcggccattcttttggattttcatggacaacttgctgctgaccgaggatgaccaggaaactaccactcggttcctgcagaccgaagccgtgaccctgcaggacgtgagaggccgggactaccagaacgccatgcgggtgtggtccaacatccctggactgaaaagcaagcacgcacctctgacccctaaagaagaggagtacctgcaggcccaggtgcggagcagaagcaagctggacgcccctaaggtggatctgctggtgaagaattgcctcctgcccctgagagagtacttcaagtatttcagccagaatagtctgcccctgggcggcccaagcagcggcgcccctcctcccagcggcggcagcccagccggctccccaacctctaccgaggagggcacctctgagtccgccacccccgagagcggccctggcacctccaccgagcccagcgagggcagcgcacccggcagccctgccggcagccccacctccacagaggagggaaccagcaccgagcccagcgaaggcagcgccccaggcaccagcaccgagcctagtgagggcggctctggcggcggcagcgcccaggagattaaacggatcaacaagatcagaagaagacttgtgaaagacagcaacaccaagaaggccggcaagacaggccccatgaaaaccctgctggttagagtgatgacacccgatctgagagagcggctggaaaacctgagaaagaagcctgaaaatatcccccagcccatcagcaatacatctagagccaacctgaataagctgctgaccgattacaccgaaatgaagaaggcgatcctgcatgtgtactgggaagagttccagaaggaccctgtgggcctgatgagccgggtggcccagcctgccagcaagaagatcgatcagaacaagctgaaacctgagatggacgagaagggcaacctgaccaccgccggctttgcctgctctcagtgtggccagcccctgttcgtgtacaagctggagcaggtgtctgagaagggcaaggcttacaccaactacttcggacggtgcaatgtggccgagcacgaaaagctgatcctgctggcccagctgaagcccgagaaggatagcgacgaagccgtgacatatagcctgggaaagtttgggcagagggccctggatttctacagcattcatgtgaccaaggagtccacccaccccgtgaagcccctggcccagatcgccggaaacagatacgcctccggacctgtgggaaaggccctgagcgacgcatgtatgggcacaatcgcctccttcctgtctaagtaccaggacatcatcatcgaacaccagaaggtggtgaagggcaaccagaagagactggagagcctgcgggagctggccggcaaggaaaacctggaataccctagcgtgaccctgccacctcagcctcacaccaaggagggcgttgatgcctacaacgaagtgatcgcccgggtgcgaatgtgggtgaacctgaacctgtggcagaagctgaagctaagcagagatgatgccaagcctctgctgagactgaagggattcccttcctttcctctggtcgagagacaggccaacgaagtggactggtgggacatggtgtgtaacgtgaagaagctgatcaacgagaaaaaggaggatggcaaggtgttttggcagaatctggctggctacaagagacaggaagccctgagaccatacctgagcagcgaggaagatcggaagaagggaaagaaattcgctcggtaccagctgggcgacctgctgctgcacctggaaaagaagcacggcgaggactggggaaaggtgtacgacgaggcctgggagcggattgacaagaaagtggaaggcctgagcaagcacatcaagctggaagaggaacggagaagcgaggacgcccagagcaaggccgccctgaccgactggctgcgggctaaggccagcttcgtgatcgagggcctgaaggaggccgacaaggacgagttctgcagatgcgagctgaagctgcagaagtggtacggggacctgcggggaaagcccttcgccatcgaagccgagaacagcatcctggacatcagcggcttcagcaagcagtacaactgtgccttcatctggcagaaggacggcgtgaagaagctgaacctgtacctgatcatcaactacttcaagggcggcaagctgcggttcaagaagatcaaacctgaagccttcgaagccaacagattctacaccgtgatcaacaaaaagagcggcgagatcgtgcccatggaggtgaacttcaacttcgacgaccccaacctgatcatcctgcctctggcctttggcaagagacagggcagagaattcatctggaacgacctgctgtccctggaaaccggcagcctgaagctggccaacggaagagtgatcgagaagacactgtacaacagaagaacccggcaggatgagcctgccctgttcgtggccctgaccttcgagcggcgggaggtcctggactcctccaatatcaaaccaatgaacctgatcggcgtggcaagaggcgaaaacatccccgccgtgatcgccctgaccgaccccgagggctgcccactgagccggtttaaggatagcctgggaaacccaacccacatcctgagaatcggcgagagctataaggagaagcagcggaccatccaggccaagaaggaggtggagcagcggagagccggcggctacagccggaagtacgccagcaaagccaagaatctggcagacgatatggtgagaaacaccgctagagatctgctgtactacgccgtgacccaggatgccatgctgatcttcgccaacctgagccggggcttcggccggcagggcaagcggaccttcatggccgagagacagtacacacggatggaggactggctgaccgccaagctggcctacgagggcctgagcaagacctacctgtccaagacactggcccagtacacctccaagacatgcagcaactgtgggtttaccatcaccagcgccgactacgacagggtgctggagaagctgaagaagacagcaacaggctggatgaccacaattaacggcaaggagctgaaggtggagggccagattacctactacaacagatacaagagacagaacgtagtcaaggacctgtccgtcgagctggatagactgagcgaagaatctgtgaacaacgacatctcctcctggacaaagggcagaagcggagaagctctgagcctcctgaagaaaagattctcccatagacccgtgcaggagaagttcgtgtgcctgaactgcggcttcgagacacacgcagccgagcaagccgccctgaacatcgccagatcctggctgttcctgcggagccaggagtacaagaaataccagacaaacaagacaaccggcaacaccgataagagagccttcgtcgagacctggcagtccttttaccggaagaagcttaaggaggtgtggaaacctgccgtgcggtctggcggatctggcggaggctccacaagcatggaggagatgctgagcttcagggacgtggccatcgacttcagcgccgaggagtgggagtgcctggacctggcccagtggaacctgtacagggacgtgatgctggagaactacagcaacctggtgttcctgggcctggccagctgcaagccctacctggtgaccttcctggagcagaggcagggccccagcgacgtgaagaggcaggccgccgcccccgtgcaccccggcggcaccccctacaccagccccaagaaaaagagaaaagtctaagctgccttctgcggggcttgccttctggccatgcccttcttctctcccttgcacctgtacctcttggtctttgaataaagcctgagtaggaaggctagcaaaaaaaaaaaaaaaaaaaaaaaaaaaaaaaaaaaaaaaaaaaaaaaaaaaaaaaaaaaaaaaaaaaaaaaaaaaaaaaa

SEQ ID NO: 6598 - RNA, 5797 nt, synthetic construct
  source 1..5797: mol_type = other RNA
aggaaataagagagaaaagaagagtaagaagaaatataagagccaccatggcccctaagaagaagcgtaaagtgagccggatggaacgcctcgtctacgaggtgcggcagaagtgcagaaacatcgaggacatctgcatctcctgcggatctctgaacgtgaccctggagcacccactgttcatcggcggcatgtgccagaactgtaaaaactgttttctggagtgtgcctatcaatacgacgatgacggctaccagagctactgcaccatctgttgcggcggaagagaggtgctgatgtgtggaaataacaactgctgccggtgcttctgcgtggaatgcgtggacctgctggtgggccccggcgccgcccaggccgctattaaggaagatccttggaactgctacatgtgcggccacaagggcacatacggcctgctgagacggagagaggactggcctagcagactgcagatgttcttcgccaataaccacgaccaggagttcgacccccctaaggtgtaccctcccgtccccgccgagaagagaaagcccatccgggtcctgagcctgttcgatggcatcgccaccggtctgctggtgctgaaggacctgggcatccaggtggataggtacattgcctccgaggtgtgcgaggactccatcaccgtgggaatggtgcgtcatcagggcaagatcatgtacgtgggcgacgtgcggagcgtgacacagaagcatatccaggagtggggccctttcgacctggtgatcggcggcagcccttgcaatgacctgagcatcgtgaacccagcccggaagggcctgtacgagggaaccggcagactgttcttcgagttttacagactgctgcacgacgcccggcctaaggaaggcgacgaccggcccttcttttggctgttcgagaatgtggtggccatgggagtcagcgacaagcgggatattagccggttcctggagagcaaccccgtgatgatcgatgccaaggaagtgagcgccgcccaccgggccagatacttctggggcaatctgcctggcatgaacagacccctggccagcaccgtgaacgacaagctggagctgcaggagtgcctggagcacggccggatcgccaagttcagcaaggtgagaaccatcaccacccgaagcaacagcatcaaacaaggcaaggaccagcactttcctgtgttcatgaacgagaaggaggacatcctgtggtgtaccgagatggagagagtgttcgggttcccagtccactacacagatgtcagcaacatgtctagactggccagacagagactgctgggaagaagctggtccgtccctgtgatcagacacctgttcgcccctctgaaggagtacttcgcctgcgtgagcagcggcaacagcaacgccaacagccggggccccagcttctctagcggcctggtgccactgtccctgagagggagccacatgggccccatggagatctacaaaaccgtgagcgcctggaagcggcagcctgtgcgcgtgctgagcctgtttcggaatatcgataaagtcctgaaaagcctgggattcctggagagcggctctggctccggcggtggcaccctgaagtacgtggaggatgtgacaaacgtggtcagacgggatgtggagaagtggggccccttcgatctggtgtacggcagcacccaacccctgggcagctcttgtgaccggtgccctggctggtacatgtttcagttccaccggatcctgcagtacgccctgccgagacaggagtcccagcggccattcttttggattttcatggacaacttgctgctgaccgaggatgaccaggaaactaccactcggttcctgcagaccgaagccgtgaccctgcaggacgtgagaggccgggactaccagaacgccatgcgggtgtggtccaacatccctggactgaaaagcaagcacgcacctctgacccctaaagaagaggagtacctgcaggcccaggtgcggagcagaagcaagctggacgcccctaaggtggatctgctggtgaagaattgcctcctgcccctgagagagtacttcaagtatttcagccagaatagtctgcccctgggcggcccaagcagcggcgcccctcctcccagcggcggcagcccagccggctccccaacctctaccgaggagggcacctctgagtccgccacccccgagagcggccctggcacctccaccgagcccagcgagggcagcgcacccggcagccctgccggcagccccacctccacagaggagggaaccagcaccgagcccagcgaaggcagcgccccaggcaccagcaccgagcctagtgagggcggctctggcggcggcagcgcccaggagattaaacggatcaacaagatcagaagaagacttgtgaaagacagcaacaccaagaaggccggcaagacaggccccatgaaaaccctgctggttagagtgatgacacccgatctgagagagcggctggaaaacctgagaaagaagcctgaaaatatcccccagcccatcagcaatacatctagagccaacctgaataagctgctgaccgattacaccgaaatgaagaaggcgatcctgcatgtgtactgggaagagttccagaaggaccctgtgggcctgatgagccgggtggcccagcctgccagcaagaagatcgatcagaacaagctgaaacctgagatggacgagaagggcaacctgaccaccgccggctttgcctgctctcagtgtggccagcccctgttcgtgtacaagctggagcaggtgtctgagaagggcaaggcttacaccaactacttcggacggtgcaatgtggccgagcacgaaaagctgatcctgctggcccagctgaagcccgagaaggatagcgacgaagccgtgacatatagcctgggaaagtttgggcagagggccctggatttctacagcattcatgtgaccaaggagtccacccaccccgtgaagcccctggcccagatcgccggaaacagatacgcctccggacctgtgggaaaggccctgagcgacgcatgtatgggcacaatcgcctccttcctgtctaagtaccaggacatcatcatcgaacaccagaaggtggtgaagggcaaccagaagagactggagagcctgcgggagctggccggcaaggaaaacctggaataccctagcgtgaccctgccacctcagcctcacaccaaggagggcgttgatgcctacaacgaagtgatcgcccgggtgcgaatgtgggtgaacctgaacctgtggcagaagctgaagctaagcagagatgatgccaagcctctgctgagactgaagggattcccttcctttcctctggtcgagagacaggccaacgaagtggactggtgggacatggtgtgtaacgtgaagaagctgatcaacgagaaaaaggaggatggcaaggtgttttggcagaatctggctggctacaagagacaggaagccctgagaccatacctgagcagcgaggaagatcggaagaagggaaagaaattcgctcggtaccagctgggcgacctgctgctgcacctggaaaagaagcacggcgaggactggggaaaggtgtacgacgaggcctgggagcggattgacaagaaagtggaaggcctgagcaagcacatcaagctggaagaggaacggagaagcgaggacgcccagagcaaggccgccctgaccgactggctgcgggctaaggccagcttcgtgatcgagggcctgaaggaggccgacaaggacgagttctgcagatgcgagctgaagctgcagaagtggtacggggacctgcggggaaagcccttcgccatcgaagccgagaacagcatcctggacatcagcggcttcagcaagcagtacaactgtgccttcatctggcagaaggacggcgtgaagaagctgaacctgtacctgatcatcaactacttcaagggcggcaagctgcggttcaagaagatcaaacctgaagccttcgaagccaacagattctacaccgtgatcaacaaaaagagcggcgagatcgtgcccatggaggtgaacttcaacttcgacgaccccaacctgatcatcctgcctctggcctttggcaagagacagggcagagaattcatctggaacgacctgctgtccctggaaaccggcagcctgaagctggccaacggaagagtgatcgagaagacactgtacaacagaagaacccggcaggatgagcctgccctgttcgtggccctgaccttcgagcggcgggaggtcctggactcctccaatatcaaaccaatgaacctgatcggcgtggcaagaggcgaaaacatccccgccgtgatcgccctgaccgaccccgagggctgcccactgagccggtttaaggatagcctgggaaacccaacccacatcctgagaatcggcgagagctataaggagaagcagcggaccatccaggccaagaaggaggtggagcagcggagagccggcggctacagccggaagtacgccagcaaagccaagaatctggcagacgatatggtgagaaacaccgctagagatctgctgtactacgccgtgacccaggatgccatgctgatcttcgccaacctgagccggggcttcggccggcagggcaagcggaccttcatggccgagagacagtacacacggatggaggactggctgaccgccaagctggcctacgagggcctgagcaagacctacctgtccaagacactggcccagtacacctccaagacatgcagcaactgtgggtttaccatcaccagcgccgactacgacagggtgctggagaagctgaagaagacagcaacaggctggatgaccacaattaacggcaaggagctgaaggtggagggccagattacctactacaacagatacaagagacagaacgtagtcaaggacctgtccgtcgagctggatagactgagcgaagaatctgtgaacaacgacatctcctcctggacaaagggcagaagcggagaagctctgagcctcctgaagaaaagattctcccatagacccgtgcaggagaagttcgtgtgcctgaactgcggcttcgagacacacgcagccgagcaagccgccctgaacatcgccagatcctggctgttcctgcggagccaggagtacaagaaataccagacaaacaagacaaccggcaacaccgataagagagccttcgtcgagacctggcagtccttttaccggaagaagcttaaggaggtgtggaaacctgccgtgcggtctggcggatctggcggaggctccacaagcgcccagggctacgtgaccttcgaggacgtggccgtgtacttcagccaggaggagtggaggctgctggacgaggcccagaagctgctgtacaggaacgtgatgctggagaacttcagcctgctggccagcctgggcctggccagcagcaagacccacgagatcacccagctggagagctgggaggagcccttcatgcccgcctgggaggtggtgaccagcgccacccccaggggcacctggtggaccagccccaagaaaaagagaaaagtctaagctgccttctgcggggcttgccttctggccatgcccttcttctctcccttgcacctgtacctcttggtctttgaataaagcctgagtaggaaggctagcaaaaaaaaaaaaaaaaaaaaaaaaaaaaaaaaaaaaaaaaaaaaaaaaaaaaaaaaaaaaaaaaaaaaaaaaaaaaaaaa

SEQ ID NO: 6599 - RNA, 5797 nt, synthetic construct
  source 1..5797: mol_type = other RNA
aggaaataagagagaaaagaagagtaagaagaaatataagagccaccatggcccctaagaagaagcgtaaagtgagccggatggaacgcctcgtctacgaggtgcggcagaagtgcagaaacatcgaggacatctgcatctcctgcggatctctgaacgtgaccctggagcacccactgttcatcggcggcatgtgccagaactgtaaaaactgttttctggagtgtgcctatcaatacgacgatgacggctaccagagctactgcaccatctgttgcggcggaagagaggtgctgatgtgtggaaataacaactgctgccggtgcttctgcgtggaatgcgtggacctgctggtgggccccggcgccgcccaggccgctattaaggaagatccttggaactgctacatgtgcggccacaagggcacatacggcctgctgagacggagagaggactggcctagcagactgcagatgttcttcgccaataaccacgaccaggagttcgacccccctaaggtgtaccctcccgtccccgccgagaagagaaagcccatccgggtcctgagcctgttcgatggcatcgccaccggtctgctggtgctgaaggacctgggcatccaggtggataggtacattgcctccgaggtgtgcgaggactccatcaccgtgggaatggtgcgtcatcagggcaagatcatgtacgtgggcgacgtgcggagcgtgacacagaagcatatccaggagtggggccctttcgacctggtgatcggcggcagcccttgcaatgacctgagcatcgtgaacccagcccggaagggcctgtacgagggaaccggcagactgttcttcgagttttacagactgctgcacgacgcccggcctaaggaaggcgacgaccggcccttcttttggctgttcgagaatgtggtggccatgggagtcagcgacaagcgggatattagccggttcctggagagcaaccccgtgatgatcgatgccaaggaagtgagcgccgcccaccgggccagatacttctggggcaatctgcctggcatgaacagacccctggccagcaccgtgaacgacaagctggagctgcaggagtgcctggagcacggccggatcgccaagttcagcaaggtgagaaccatcaccacccgaagcaacagcatcaaacaaggcaaggaccagcactttcctgtgttcatgaacgagaaggaggacatcctgtggtgtaccgagatggagagagtgttcgggttcccagtccactacacagatgtcagcaacatgtctagactggccagacagagactgctgggaagaagctggtccgtccctgtgatcagacacctgttcgcccctctgaaggagtacttcgcctgcgtgagcagcggcaacagcaacgccaacagccggggccccagcttctctagcggcctggtgccactgtccctgagagggagccacatgggccccatggagatctacaaaaccgtgagcgcctggaagcggcagcctgtgcgcgtgctgagcctgtttcggaatatcgataaagtcctgaaaagcctgggattcctggagagcggctctggctccggcggtggcaccctgaagtacgtggaggatgtgacaaacgtggtcagacgggatgtggagaagtggggccccttcgatctggtgtacggcagcacccaacccctgggcagctcttgtgaccggtgccctggctggtacatgtttcagttccaccggatcctgcagtacgccctgccgagacaggagtcccagcggccattcttttggattttcatggacaacttgctgctgaccgaggatgaccaggaaactaccactcggttcctgcagaccgaagccgtgaccctgcaggacgtgagaggccgggactaccagaacgccatgcgggtgtggtccaacatccctggactgaaaagcaagcacgcacctctgacccctaaagaagaggagtacctgcaggcccaggtgcggagcagaagcaagctggacgcccctaaggtggatctgctggtgaagaattgcctcctgcccctgagagagtacttcaagtatttcagccagaatagtctgcccctgggcggcccaagcagcggcgcccctcctcccagcggcggcagcccagccggctccccaacctctaccgaggagggcacctctgagtccgccacccccgagagcggccctggcacctccaccgagcccagcgagggcagcgcacccggcagccctgccggcagccccacctccacagaggagggaaccagcaccgagcccagcgaaggcagcgccccaggcaccagcaccgagcctagtgagggcggctctggcggcggcagcgcccaggagattaaacggatcaacaagatcagaagaagacttgtgaaagacagcaacaccaagaaggccggcaagacaggccccatgaaaaccctgctggttagagtgatgacacccgatctgagagagcggctggaaaacctgagaaagaagcctgaaaatatcccccagcccatcagcaatacatctagagccaacctgaataagctgctgaccgattacaccgaaatgaagaaggcgatcctgcatgtgtactgggaagagttccagaaggaccctgtgggcctgatgagccgggtggcccagcctgccagcaagaagatcgatcagaacaagctgaaacctgagatggacgagaagggcaacctgaccaccgccggctttgcctgctctcagtgtggccagcccctgttcgtgtacaagctggagcaggtgtctgagaagggcaaggcttacaccaactacttcggacggtgcaatgtggccgagcacgaaaagctgatcctgctggcccagctgaagcccgagaaggatagcgacgaagccgtgacatatagcctgggaaagtttgggcagagggccctggatttctacagcattcatgtgaccaaggagtccacccaccccgtgaagcccctggcccagatcgccggaaacagatacgcctccggacctgtgggaaaggccctgagcgacgcatgtatgggcacaatcgcctccttcctgtctaagtaccaggacatcatcatcgaacaccagaaggtggtgaagggcaaccagaagagactggagagcctgcgggagctggccggcaaggaaaacctggaataccctagcgtgaccctgccacctcagcctcacaccaaggagggcgttgatgcctacaacgaagtgatcgcccgggtgcgaatgtgggtgaacctgaacctgtggcagaagctgaagctaagcagagatgatgccaagcctctgctgagactgaagggattcccttcctttcctctggtcgagagacaggccaacgaagtggactggtgggacatggtgtgtaacgtgaagaagctgatcaacgagaaaaaggaggatggcaaggtgttttggcagaatctggctggctacaagagacaggaagccctgagaccatacctgagcagcgaggaagatcggaagaagggaaagaaattcgctcggtaccagctgggcgacctgctgctgcacctggaaaagaagcacggcgaggactggggaaaggtgtacgacgaggcctgggagcggattgacaagaaagtggaaggcctgagcaagcacatcaagctggaagaggaacggagaagcgaggacgcccagagcaaggccgccctgaccgactggctgcgggctaaggccagcttcgtgatcgagggcctgaaggaggccgacaaggacgagttctgcagatgcgagctgaagctgcagaagtggtacggggacctgcggggaaagcccttcgccatcgaagccgagaacagcatcctggacatcagcggcttcagcaagcagtacaactgtgccttcatctggcagaaggacggcgtgaagaagctgaacctgtacctgatcatcaactacttcaagggcggcaagctgcggttcaagaagatcaaacctgaagccttcgaagccaacagattctacaccgtgatcaacaaaaagagcggcgagatcgtgcccatggaggtgaacttcaacttcgacgaccccaacctgatcatcctgcctctggcctttggcaagagacagggcagagaattcatctggaacgacctgctgtccctggaaaccggcagcctgaagctggccaacggaagagtgatcgagaagacactgtacaacagaagaacccggcaggatgagcctgccctgttcgtggccctgaccttcgagcggcgggaggtcctggactcctccaatatcaaaccaatgaacctgatcggcgtggcaagaggcgaaaacatccccgccgtgatcgccctgaccgaccccgagggctgcccactgagccggtttaaggatagcctgggaaacccaacccacatcctgagaatcggcgagagctataaggagaagcagcggaccatccaggccaagaaggaggtggagcagcggagagccggcggctacagccggaagtacgccagcaaagccaagaatctggcagacgatatggtgagaaacaccgctagagatctgctgtactacgccgtgacccaggatgccatgctgatcttcgccaacctgagccggggcttcggccggcagggcaagcggaccttcatggccgagagacagtacacacggatggaggactggctgaccgccaagctggcctacgagggcctgagcaagacctacctgtccaagacactggcccagtacacctccaagacatgcagcaactgtgggtttaccatcaccagcgccgactacgacagggtgctggagaagctgaagaagacagcaacaggctggatgaccacaattaacggcaaggagctgaaggtggagggccagattacctactacaacagatacaagagacagaacgtagtcaaggacctgtccgtcgagctggatagactgagcgaagaatctgtgaacaacgacatctcctcctggacaaagggcagaagcggagaagctctgagcctcctgaagaaaagattctcccatagacccgtgcaggagaagttcgtgtgcctgaactgcggcttcgagacacacgcagccgagcaagccgccctgaacatcgccagatcctggctgttcctgcggagccaggagtacaagaaataccagacaaacaagacaaccggcaacaccgataagagagccttcgtcgagacctggcagtccttttaccggaagaagcttaaggaggtgtggaaacctgccgtgcggtctggcggatctggcggaggctccacaagcgagcccgtgagcttcgccgaggtggccgtgtacttcagcagggaggagtgggccctgctggaccccgcccagagggccctgtacagggacgtgatgctggagacctaccagtgcgtggccagcctggtgaccgagacccccgtgcccgcccccaagcccgtgctgatcagcctgctggagggcaggaaggagccctggatccccgacatgaggagccccgaggccatgcccggcgacctgagcaccagccccaagaaaaagagaaaagtctaagctgccttctgcggggcttgccttctggccatgcccttcttctctcccttgcacctgtacctcttggtctttgaataaagcctgagtaggaaggctagcaaaaaaaaaaaaaaaaaaaaaaaaaaaaaaaaaaaaaaaaaaaaaaaaaaaaaaaaaaaaaaaaaaaaaaaaaaaaaaaa

SEQ ID NO: 6600 - RNA, 5797 nt, synthetic construct
  source 1..5797: mol_type = other RNA
aggaaataagagagaaaagaagagtaagaagaaatataagagccaccatggcccctaagaagaagcgtaaagtgagccggatggaacgcctcgtctacgaggtgcggcagaagtgcagaaacatcgaggacatctgcatctcctgcggatctctgaacgtgaccctggagcacccactgttcatcggcggcatgtgccagaactgtaaaaactgttttctggagtgtgcctatcaatacgacgatgacggctaccagagctactgcaccatctgttgcggcggaagagaggtgctgatgtgtggaaataacaactgctgccggtgcttctgcgtggaatgcgtggacctgctggtgggccccggcgccgcccaggccgctattaaggaagatccttggaactgctacatgtgcggccacaagggcacatacggcctgctgagacggagagaggactggcctagcagactgcagatgttcttcgccaataaccacgaccaggagttcgacccccctaaggtgtaccctcccgtccccgccgagaagagaaagcccatccgggtcctgagcctgttcgatggcatcgccaccggtctgctggtgctgaaggacctgggcatccaggtggataggtacattgcctccgaggtgtgcgaggactccatcaccgtgggaatggtgcgtcatcagggcaagatcatgtacgtgggcgacgtgcggagcgtgacacagaagcatatccaggagtggggccctttcgacctggtgatcggcggcagcccttgcaatgacctgagcatcgtgaacccagcccggaagggcctgtacgagggaaccggcagactgttcttcgagttttacagactgctgcacgacgcccggcctaaggaaggcgacgaccggcccttcttttggctgttcgagaatgtggtggccatgggagtcagcgacaagcgggatattagccggttcctggagagcaaccccgtgatgatcgatgccaaggaagtgagcgccgcccaccgggccagatacttctggggcaatctgcctggcatgaacagacccctggccagcaccgtgaacgacaagctggagctgcaggagtgcctggagcacggccggatcgccaagttcagcaaggtgagaaccatcaccacccgaagcaacagcatcaaacaaggcaaggaccagcactttcctgtgttcatgaacgagaaggaggacatcctgtggtgtaccgagatggagagagtgttcgggttcccagtccactacacagatgtcagcaacatgtctagactggccagacagagactgctgggaagaagctggtccgtccctgtgatcagacacctgttcgcccctctgaaggagtacttcgcctgcgtgagcagcggcaacagcaacgccaacagccggggccccagcttctctagcggcctggtgccactgtccctgagagggagccacatgggccccatggagatctacaaaaccgtgagcgcctggaagcggcagcctgtgcgcgtgctgagcctgtttcggaatatcgataaagtcctgaaaagcctgggattcctggagagcggctctggctccggcggtggcaccctgaagtacgtggaggatgtgacaaacgtggtcagacgggatgtggagaagtggggccccttcgatctggtgtacggcagcacccaacccctgggcagctcttgtgaccggtgccctggctggtacatgtttcagttccaccggatcctgcagtacgccctgccgagacaggagtcccagcggccattcttttggattttcatggacaacttgctgctgaccgaggatgaccaggaaactaccactcggttcctgcagaccgaagccgtgaccctgcaggacgtgagaggccgggactaccagaacgccatgcgggtgtggtccaacatccctggactgaaaagcaagcacgcacctctgacccctaaagaagaggagtacctgcaggcccaggtgcggagcagaagcaagctggacgcccctaaggtggatctgctggtgaagaattgcctcctgcccctgagagagtacttcaagtatttcagccagaatagtctgcccctgggcggcccaagcagcggcgcccctcctcccagcggcggcagcccagccggctccccaacctctaccgaggagggcacctctgagtccgccacccccgagagcggccctggcacctccaccgagcccagcgagggcagcgcacccggcagccctgccggcagccccacctccacagaggagggaaccagcaccgagcccagcgaaggcagcgccccaggcaccagcaccgagcctagtgagggcggctctggcggcggcagcgcccaggagattaaacggatcaacaagatcagaagaagacttgtgaaagacagcaacaccaagaaggccggcaagacaggccccatgaaaaccctgctggttagagtgatgacacccgatctgagagagcggctggaaaacctgagaaagaagcctgaaaatatcccccagcccatcagcaatacatctagagccaacctgaataagctgctgaccgattacaccgaaatgaagaaggcgatcctgcatgtgtactgggaagagttccagaaggaccctgtgggcctgatgagccgggtggcccagcctgccagcaagaagatcgatcagaacaagctgaaacctgagatggacgagaagggcaacctgaccaccgccggctttgcctgctctcagtgtggccagcccctgttcgtgtacaagctggagcaggtgtctgagaagggcaaggcttacaccaactacttcggacggtgcaatgtggccgagcacgaaaagctgatcctgctggcccagctgaagcccgagaaggatagcgacgaagccgtgacatatagcctgggaaagtttgggcagagggccctggatttctacagcattcatgtgaccaaggagtccacccaccccgtgaagcccctggcccagatcgccggaaacagatacgcctccggacctgtgggaaaggccctgagcgacgcatgtatgggcacaatcgcctccttcctgtctaagtaccaggacatcatcatcgaacaccagaaggtggtgaagggcaaccagaagagactggagagcctgcgggagctggccggcaaggaaaacctggaataccctagcgtgaccctgccacctcagcctcacaccaaggagggcgttgatgcctacaacgaagtgatcgcccgggtgcgaatgtgggtgaacctgaacctgtggcagaagctgaagctaagcagagatgatgccaagcctctgctgagactgaagggattcccttcctttcctctggtcgagagacaggccaacgaagtggactggtgggacatggtgtgtaacgtgaagaagctgatcaacgagaaaaaggaggatggcaaggtgttttggcagaatctggctggctacaagagacaggaagccctgagaccatacctgagcagcgaggaagatcggaagaagggaaagaaattcgctcggtaccagctgggcgacctgctgctgcacctggaaaagaagcacggcgaggactggggaaaggtgtacgacgaggcctgggagcggattgacaagaaagtggaaggcctgagcaagcacatcaagctggaagaggaacggagaagcgaggacgcccagagcaaggccgccctgaccgactggctgcgggctaaggccagcttcgtgatcgagggcctgaaggaggccgacaaggacgagttctgcagatgcgagctgaagctgcagaagtggtacggggacctgcggggaaagcccttcgccatcgaagccgagaacagcatcctggacatcagcggcttcagcaagcagtacaactgtgccttcatctggcagaaggacggcgtgaagaagctgaacctgtacctgatcatcaactacttcaagggcggcaagctgcggttcaagaagatcaaacctgaagccttcgaagccaacagattctacaccgtgatcaacaaaaagagcggcgagatcgtgcccatggaggtgaacttcaacttcgacgaccccaacctgatcatcctgcctctggcctttggcaagagacagggcagagaattcatctggaacgacctgctgtccctggaaaccggcagcctgaagctggccaacggaagagtgatcgagaagacactgtacaacagaagaacccggcaggatgagcctgccctgttcgtggccctgaccttcgagcggcgggaggtcctggactcctccaatatcaaaccaatgaacctgatcggcgtggcaagaggcgaaaacatccccgccgtgatcgccctgaccgaccccgagggctgcccactgagccggtttaaggatagcctgggaaacccaacccacatcctgagaatcggcgagagctataaggagaagcagcggaccatccaggccaagaaggaggtggagcagcggagagccggcggctacagccggaagtacgccagcaaagccaagaatctggcagacgatatggtgagaaacaccgctagagatctgctgtactacgccgtgacccaggatgccatgctgatcttcgccaacctgagccggggcttcggccggcagggcaagcggaccttcatggccgagagacagtacacacggatggaggactggctgaccgccaagctggcctacgagggcctgagcaagacctacctgtccaagacactggcccagtacacctccaagacatgcagcaactgtgggtttaccatcaccagcgccgactacgacagggtgctggagaagctgaagaagacagcaacaggctggatgaccacaattaacggcaaggagctgaaggtggagggccagattacctactacaacagatacaagagacagaacgtagtcaaggacctgtccgtcgagctggatagactgagcgaagaatctgtgaacaacgacatctcctcctggacaaagggcagaagcggagaagctctgagcctcctgaagaaaagattctcccatagacccgtgcaggagaagttcgtgtgcctgaactgcggcttcgagacacacgcagccgagcaagccgccctgaacatcgccagatcctggctgttcctgcggagccaggagtacaagaaataccagacaaacaagacaaccggcaacaccgataagagagccttcgtcgagacctggcagtccttttaccggaagaagcttaaggaggtgtggaaacctgccgtgcggtctggcggatctggcggaggctccacaagcgtggccaggatgcagaccagggtgaccttcgacgacatcgccgtgagcttcagccaggaggagtgggagtacctggacgagggccagaaggagctgtacagggaggtgatggaggagaacctggagctgctgaccagcctgggcagcctggtggcccagcccgagcagatggaggagctgtacatgatggaccaccacgacatgggcctgaggggcaccctgctgagcctgtgcaccgaggacaccagccccaagaaaaagagaaaagtctaagctgccttctgcggggcttgccttctggccatgcccttcttctctcccttgcacctgtacctcttggtctttgaataaagcctgagtaggaaggctagcaaaaaaaaaaaaaaaaaaaaaaaaaaaaaaaaaaaaaaaaaaaaaaaaaaaaaaaaaaaaaaaaaaaaaaaaaaaaaaaa

SEQ ID NO: 6601 - RNA, 5797 nt, synthetic construct
  source 1..5797: mol_type = other RNA
aggaaataagagagaaaagaagagtaagaagaaatataagagccaccatggcccctaagaagaagcgtaaagtgagccggatggaacgcctcgtctacgaggtgcggcagaagtgcagaaacatcgaggacatctgcatctcctgcggatctctgaacgtgaccctggagcacccactgttcatcggcggcatgtgccagaactgtaaaaactgttttctggagtgtgcctatcaatacgacgatgacggctaccagagctactgcaccatctgttgcggcggaagagaggtgctgatgtgtggaaataacaactgctgccggtgcttctgcgtggaatgcgtggacctgctggtgggccccggcgccgcccaggccgctattaaggaagatccttggaactgctacatgtgcggccacaagggcacatacggcctgctgagacggagagaggactggcctagcagactgcagatgttcttcgccaataaccacgaccaggagttcgacccccctaaggtgtaccctcccgtccccgccgagaagagaaagcccatccgggtcctgagcctgttcgatggcatcgccaccggtctgctggtgctgaaggacctgggcatccaggtggataggtacattgcctccgaggtgtgcgaggactccatcaccgtgggaatggtgcgtcatcagggcaagatcatgtacgtgggcgacgtgcggagcgtgacacagaagcatatccaggagtggggccctttcgacctggtgatcggcggcagcccttgcaatgacctgagcatcgtgaacccagcccggaagggcctgtacgagggaaccggcagactgttcttcgagttttacagactgctgcacgacgcccggcctaaggaaggcgacgaccggcccttcttttggctgttcgagaatgtggtggccatgggagtcagcgacaagcgggatattagccggttcctggagagcaaccccgtgatgatcgatgccaaggaagtgagcgccgcccaccgggccagatacttctggggcaatctgcctggcatgaacagacccctggccagcaccgtgaacgacaagctggagctgcaggagtgcctggagcacggccggatcgccaagttcagcaaggtgagaaccatcaccacccgaagcaacagcatcaaacaaggcaaggaccagcactttcctgtgttcatgaacgagaaggaggacatcctgtggtgtaccgagatggagagagtgttcgggttcccagtccactacacagatgtcagcaacatgtctagactggccagacagagactgctgggaagaagctggtccgtccctgtgatcagacacctgttcgcccctctgaaggagtacttcgcctgcgtgagcagcggcaacagcaacgccaacagccggggccccagcttctctagcggcctggtgccactgtccctgagagggagccacatgggccccatggagatctacaaaaccgtgagcgcctggaagcggcagcctgtgcgcgtgctgagcctgtttcggaatatcgataaagtcctgaaaagcctgggattcctggagagcggctctggctccggcggtggcaccctgaagtacgtggaggatgtgacaaacgtggtcagacgggatgtggagaagtggggccccttcgatctggtgtacggcagcacccaacccctgggcagctcttgtgaccggtgccctggctggtacatgtttcagttccaccggatcctgcagtacgccctgccgagacaggagtcccagcggccattcttttggattttcatggacaacttgctgctgaccgaggatgaccaggaaactaccactcggttcctgcagaccgaagccgtgaccctgcaggacgtgagaggccgggactaccagaacgccatgcgggtgtggtccaacatccctggactgaaaagcaagcacgcacctctgacccctaaagaagaggagtacctgcaggcccaggtgcggagcagaagcaagctggacgcccctaaggtggatctgctggtgaagaattgcctcctgcccctgagagagtacttcaagtatttcagccagaatagtctgcccctgggcggcccaagcagcggcgcccctcctcccagcggcggcagcccagccggctccccaacctctaccgaggagggcacctctgagtccgccacccccgagagcggccctggcacctccaccgagcccagcgagggcagcgcacccggcagccctgccggcagccccacctccacagaggagggaaccagcaccgagcccagcgaaggcagcgccccaggcaccagcaccgagcctagtgagggcggctctggcggcggcagcgcccaggagattaaacggatcaacaagatcagaagaagacttgtgaaagacagcaacaccaagaaggccggcaagacaggccccatgaaaaccctgctggttagagtgatgacacccgatctgagagagcggctggaaaacctgagaaagaagcctgaaaatatcccccagcccatcagcaatacatctagagccaacctgaataagctgctgaccgattacaccgaaatgaagaaggcgatcctgcatgtgtactgggaagagttccagaaggaccctgtgggcctgatgagccgggtggcccagcctgccagcaagaagatcgatcagaacaagctgaaacctgagatggacgagaagggcaacctgaccaccgccggctttgcctgctctcagtgtggccagcccctgttcgtgtacaagctggagcaggtgtctgagaagggcaaggcttacaccaactacttcggacggtgcaatgtggccgagcacgaaaagctgatcctgctggcccagctgaagcccgagaaggatagcgacgaagccgtgacatatagcctgggaaagtttgggcagagggccctggatttctacagcattcatgtgaccaaggagtccacccaccccgtgaagcccctggcccagatcgccggaaacagatacgcctccggacctgtgggaaaggccctgagcgacgcatgtatgggcacaatcgcctccttcctgtctaagtaccaggacatcatcatcgaacaccagaaggtggtgaagggcaaccagaagagactggagagcctgcgggagctggccggcaaggaaaacctggaataccctagcgtgaccctgccacctcagcctcacaccaaggagggcgttgatgcctacaacgaagtgatcgcccgggtgcgaatgtgggtgaacctgaacctgtggcagaagctgaagctaagcagagatgatgccaagcctctgctgagactgaagggattcccttcctttcctctggtcgagagacaggccaacgaagtggactggtgggacatggtgtgtaacgtgaagaagctgatcaacgagaaaaaggaggatggcaaggtgttttggcagaatctggctggctacaagagacaggaagccctgagaccatacctgagcagcgaggaagatcggaagaagggaaagaaattcgctcggtaccagctgggcgacctgctgctgcacctggaaaagaagcacggcgaggactggggaaaggtgtacgacgaggcctgggagcggattgacaagaaagtggaaggcctgagcaagcacatcaagctggaagaggaacggagaagcgaggacgcccagagcaaggccgccctgaccgactggctgcgggctaaggccagcttcgtgatcgagggcctgaaggaggccgacaaggacgagttctgcagatgcgagctgaagctgcagaagtggtacggggacctgcggggaaagcccttcgccatcgaagccgagaacagcatcctggacatcagcggcttcagcaagcagtacaactgtgccttcatctggcagaaggacggcgtgaagaagctgaacctgtacctgatcatcaactacttcaagggcggcaagctgcggttcaagaagatcaaacctgaagccttcgaagccaacagattctacaccgtgatcaacaaaaagagcggcgagatcgtgcccatggaggtgaacttcaacttcgacgaccccaacctgatcatcctgcctctggcctttggcaagagacagggcagagaattcatctggaacgacctgctgtccctggaaaccggcagcctgaagctggccaacggaagagtgatcgagaagacactgtacaacagaagaacccggcaggatgagcctgccctgttcgtggccctgaccttcgagcggcgggaggtcctggactcctccaatatcaaaccaatgaacctgatcggcgtggcaagaggcgaaaacatccccgccgtgatcgccctgaccgaccccgagggctgcccactgagccggtttaaggatagcctgggaaacccaacccacatcctgagaatcggcgagagctataaggagaagcagcggaccatccaggccaagaaggaggtggagcagcggagagccggcggctacagccggaagtacgccagcaaagccaagaatctggcagacgatatggtgagaaacaccgctagagatctgctgtactacgccgtgacccaggatgccatgctgatcttcgccaacctgagccggggcttcggccggcagggcaagcggaccttcatggccgagagacagtacacacggatggaggactggctgaccgccaagctggcctacgagggcctgagcaagacctacctgtccaagacactggcccagtacacctccaagacatgcagcaactgtgggtttaccatcaccagcgccgactacgacagggtgctggagaagctgaagaagacagcaacaggctggatgaccacaattaacggcaaggagctgaaggtggagggccagattacctactacaacagatacaagagacagaacgtagtcaaggacctgtccgtcgagctggatagactgagcgaagaatctgtgaacaacgacatctcctcctggacaaagggcagaagcggagaagctctgagcctcctgaagaaaagattctcccatagacccgtgcaggagaagttcgtgtgcctgaactgcggcttcgagacacacgcagccgagcaagccgccctgaacatcgccagatcctggctgttcctgcggagccaggagtacaagaaataccagacaaacaagacaaccggcaacaccgataagagagccttcgtcgagacctggcagtccttttaccggaagaagcttaaggaggtgtggaaacctgccgtgcggtctggcggatctggcggaggctccacaagcttccaggaggccgtgaccttcaaggacgtggccgtggccttcaccgaggaggagctgggcctgctggacagcgcccagaggaagctgtacagggacgtgatgctggagaacttcaggaacctggtgagcgtgggcaggcagagcttcaagcccgacatgatcagccagctggagagggaggagaagctgtggatgaaggagttccagacccagaggggcaggcacagcggcgacaggaaccagaccagccccaagaaaaagagaaaagtctaagctgccttctgcggggcttgccttctggccatgcccttcttctctcccttgcacctgtacctcttggtctttgaataaagcctgagtaggaaggctagcaaaaaaaaaaaaaaaaaaaaaaaaaaaaaaaaaaaaaaaaaaaaaaaaaaaaaaaaaaaaaaaaaaaaaaaaaaaaaaaa

SEQ ID NO: 6602 - RNA, 5797 nt, synthetic construct
  source 1..5797: mol_type = other RNA
aggaaataagagagaaaagaagagtaagaagaaatataagagccaccatggcccctaagaagaagcgtaaagtgagccggatggaacgcctcgtctacgaggtgcggcagaagtgcagaaacatcgaggacatctgcatctcctgcggatctctgaacgtgaccctggagcacccactgttcatcggcggcatgtgccagaactgtaaaaactgttttctggagtgtgcctatcaatacgacgatgacggctaccagagctactgcaccatctgttgcggcggaagagaggtgctgatgtgtggaaataacaactgctgccggtgcttctgcgtggaatgcgtggacctgctggtgggccccggcgccgcccaggccgctattaaggaagatccttggaactgctacatgtgcggccacaagggcacatacggcctgctgagacggagagaggactggcctagcagactgcagatgttcttcgccaataaccacgaccaggagttcgacccccctaaggtgtaccctcccgtccccgccgagaagagaaagcccatccgggtcctgagcctgttcgatggcatcgccaccggtctgctggtgctgaaggacctgggcatccaggtggataggtacattgcctccgaggtgtgcgaggactccatcaccgtgggaatggtgcgtcatcagggcaagatcatgtacgtgggcgacgtgcggagcgtgacacagaagcatatccaggagtggggccctttcgacctggtgatcggcggcagcccttgcaatgacctgagcatcgtgaacccagcccggaagggcctgtacgagggaaccggcagactgttcttcgagttttacagactgctgcacgacgcccggcctaaggaaggcgacgaccggcccttcttttggctgttcgagaatgtggtggccatgggagtcagcgacaagcgggatattagccggttcctggagagcaaccccgtgatgatcgatgccaaggaagtgagcgccgcccaccgggccagatacttctggggcaatctgcctggcatgaacagacccctggccagcaccgtgaacgacaagctggagctgcaggagtgcctggagcacggccggatcgccaagttcagcaaggtgagaaccatcaccacccgaagcaacagcatcaaacaaggcaaggaccagcactttcctgtgttcatgaacgagaaggaggacatcctgtggtgtaccgagatggagagagtgttcgggttcccagtccactacacagatgtcagcaacatgtctagactggccagacagagactgctgggaagaagctggtccgtccctgtgatcagacacctgttcgcccctctgaaggagtacttcgcctgcgtgagcagcggcaacagcaacgccaacagccggggccccagcttctctagcggcctggtgccactgtccctgagagggagccacatgggccccatggagatctacaaaaccgtgagcgcctggaagcggcagcctgtgcgcgtgctgagcctgtttcggaatatcgataaagtcctgaaaagcctgggattcctggagagcggctctggctccggcggtggcaccctgaagtacgtggaggatgtgacaaacgtggtcagacgggatgtggagaagtggggccccttcgatctggtgtacggcagcacccaacccctgggcagctcttgtgaccggtgccctggctggtacatgtttcagttccaccggatcctgcagtacgccctgccgagacaggagtcccagcggccattcttttggattttcatggacaacttgctgctgaccgaggatgaccaggaaactaccactcggttcctgcagaccgaagccgtgaccctgcaggacgtgagaggccgggactaccagaacgccatgcgggtgtggtccaacatccctggactgaaaagcaagcacgcacctctgacccctaaagaagaggagtacctgcaggcccaggtgcggagcagaagcaagctggacgcccctaaggtggatctgctggtgaagaattgcctcctgcccctgagagagtacttcaagtatttcagccagaatagtctgcccctgggcggcccaagcagcggcgcccctcctcccagcggcggcagcccagccggctccccaacctctaccgaggagggcacctctgagtccgccacccccgagagcggccctggcacctccaccgagcccagcgagggcagcgcacccggcagccctgccggcagccccacctccacagaggagggaaccagcaccgagcccagcgaaggcagcgccccaggcaccagcaccgagcctagtgagggcggctctggcggcggcagcgcccaggagattaaacggatcaacaagatcagaagaagacttgtgaaagacagcaacaccaagaaggccggcaagacaggccccatgaaaaccctgctggttagagtgatgacacccgatctgagagagcggctggaaaacctgagaaagaagcctgaaaatatcccccagcccatcagcaatacatctagagccaacctgaataagctgctgaccgattacaccgaaatgaagaaggcgatcctgcatgtgtactgggaagagttccagaaggaccctgtgggcctgatgagccgggtggcccagcctgccagcaagaagatcgatcagaacaagctgaaacctgagatggacgagaagggcaacctgaccaccgccggctttgcctgctctcagtgtggccagcccctgttcgtgtacaagctggagcaggtgtctgagaagggcaaggcttacaccaactacttcggacggtgcaatgtggccgagcacgaaaagctgatcctgctggcccagctgaagcccgagaaggatagcgacgaagccgtgacatatagcctgggaaagtttgggcagagggccctggatttctacagcattcatgtgaccaaggagtccacccaccccgtgaagcccctggcccagatcgccggaaacagatacgcctccggacctgtgggaaaggccctgagcgacgcatgtatgggcacaatcgcctccttcctgtctaagtaccaggacatcatcatcgaacaccagaaggtggtgaagggcaaccagaagagactggagagcctgcgggagctggccggcaaggaaaacctggaataccctagcgtgaccctgccacctcagcctcacaccaaggagggcgttgatgcctacaacgaagtgatcgcccgggtgcgaatgtgggtgaacctgaacctgtggcagaagctgaagctaagcagagatgatgccaagcctctgctgagactgaagggattcccttcctttcctctggtcgagagacaggccaacgaagtggactggtgggacatggtgtgtaacgtgaagaagctgatcaacgagaaaaaggaggatggcaaggtgttttggcagaatctggctggctacaagagacaggaagccctgagaccatacctgagcagcgaggaagatcggaagaagggaaagaaattcgctcggtaccagctgggcgacctgctgctgcacctggaaaagaagcacggcgaggactggggaaaggtgtacgacgaggcctgggagcggattgacaagaaagtggaaggcctgagcaagcacatcaagctggaagaggaacggagaagcgaggacgcccagagcaaggccgccctgaccgactggctgcgggctaaggccagcttcgtgatcgagggcctgaaggaggccgacaaggacgagttctgcagatgcgagctgaagctgcagaagtggtacggggacctgcggggaaagcccttcgccatcgaagccgagaacagcatcctggacatcagcggcttcagcaagcagtacaactgtgccttcatctggcagaaggacggcgtgaagaagctgaacctgtacctgatcatcaactacttcaagggcggcaagctgcggttcaagaagatcaaacctgaagccttcgaagccaacagattctacaccgtgatcaacaaaaagagcggcgagatcgtgcccatggaggtgaacttcaacttcgacgaccccaacctgatcatcctgcctctggcctttggcaagagacagggcagagaattcatctggaacgacctgctgtccctggaaaccggcagcctgaagctggccaacggaagagtgatcgagaagacactgtacaacagaagaacccggcaggatgagcctgccctgttcgtggccctgaccttcgagcggcgggaggtcctggactcctccaatatcaaaccaatgaacctgatcggcgtggcaagaggcgaaaacatccccgccgtgatcgccctgaccgaccccgagggctgcccactgagccggtttaaggatagcctgggaaacccaacccacatcctgagaatcggcgagagctataaggagaagcagcggaccatccaggccaagaaggaggtggagcagcggagagccggcggctacagccggaagtacgccagcaaagccaagaatctggcagacgatatggtgagaaacaccgctagagatctgctgtactacgccgtgacccaggatgccatgctgatcttcgccaacctgagccggggcttcggccggcagggcaagcggaccttcatggccgagagacagtacacacggatggaggactggctgaccgccaagctggcctacgagggcctgagcaagacctacctgtccaagacactggcccagtacacctccaagacatgcagcaactgtgggtttaccatcaccagcgccgactacgacagggtgctggagaagctgaagaagacagcaacaggctggatgaccacaattaacggcaaggagctgaaggtggagggccagattacctactacaacagatacaagagacagaacgtagtcaaggacctgtccgtcgagctggatagactgagcgaagaatctgtgaacaacgacatctcctcctggacaaagggcagaagcggagaagctctgagcctcctgaagaaaagattctcccatagacccgtgcaggagaagttcgtgtgcctgaactgcggcttcgagacacacgcagccgagcaagccgccctgaacatcgccagatcctggctgttcctgcggagccaggagtacaagaaataccagacaaacaagacaaccggcaacaccgataagagagccttcgtcgagacctggcagtccttttaccggaagaagcttaaggaggtgtggaaacctgccgtgcggtctggcggatctggcggaggctccacaagcagcaagctgcccgaggccttcgaggacgtggccgtgtacttcaccaggaaggagtgggagctgctggaggccggcgacaagggcctgtaccaggaccagatgctgaggaactaccaggccctggtgagcctgggcctgcagggccccgcccccgacctgatctgcaggatgcagctgggcgagatggagctgtgggtgtgcgacgacgaggaggccggcgagagcagcctgagcgaggacttcaccagccccaagaaaaagagaaaagtctaagctgccttctgcggggcttgccttctggccatgcccttcttctctcccttgcacctgtacctcttggtctttgaataaagcctgagtaggaaggctagcaaaaaaaaaaaaaaaaaaaaaaaaaaaaaaaaaaaaaaaaaaaaaaaaaaaaaaaaaaaaaaaaaaaaaaaaaaaaaaaa

SEQ ID NO: 6603 - RNA, 5797 nt, synthetic construct
  source 1..5797: mol_type = other RNA
aggaaataagagagaaaagaagagtaagaagaaatataagagccaccatggcccctaagaagaagcgtaaagtgagccggatggaacgcctcgtctacgaggtgcggcagaagtgcagaaacatcgaggacatctgcatctcctgcggatctctgaacgtgaccctggagcacccactgttcatcggcggcatgtgccagaactgtaaaaactgttttctggagtgtgcctatcaatacgacgatgacggctaccagagctactgcaccatctgttgcggcggaagagaggtgctgatgtgtggaaataacaactgctgccggtgcttctgcgtggaatgcgtggacctgctggtgggccccggcgccgcccaggccgctattaaggaagatccttggaactgctacatgtgcggccacaagggcacatacggcctgctgagacggagagaggactggcctagcagactgcagatgttcttcgccaataaccacgaccaggagttcgacccccctaaggtgtaccctcccgtccccgccgagaagagaaagcccatccgggtcctgagcctgttcgatggcatcgccaccggtctgctggtgctgaaggacctgggcatccaggtggataggtacattgcctccgaggtgtgcgaggactccatcaccgtgggaatggtgcgtcatcagggcaagatcatgtacgtgggcgacgtgcggagcgtgacacagaagcatatccaggagtggggccctttcgacctggtgatcggcggcagcccttgcaatgacctgagcatcgtgaacccagcccggaagggcctgtacgagggaaccggcagactgttcttcgagttttacagactgctgcacgacgcccggcctaaggaaggcgacgaccggcccttcttttggctgttcgagaatgtggtggccatgggagtcagcgacaagcgggatattagccggttcctggagagcaaccccgtgatgatcgatgccaaggaagtgagcgccgcccaccgggccagatacttctggggcaatctgcctggcatgaacagacccctggccagcaccgtgaacgacaagctggagctgcaggagtgcctggagcacggccggatcgccaagttcagcaaggtgagaaccatcaccacccgaagcaacagcatcaaacaaggcaaggaccagcactttcctgtgttcatgaacgagaaggaggacatcctgtggtgtaccgagatggagagagtgttcgggttcccagtccactacacagatgtcagcaacatgtctagactggccagacagagactgctgggaagaagctggtccgtccctgtgatcagacacctgttcgcccctctgaaggagtacttcgcctgcgtgagcagcggcaacagcaacgccaacagccggggccccagcttctctagcggcctggtgccactgtccctgagagggagccacatgggccccatggagatctacaaaaccgtgagcgcctggaagcggcagcctgtgcgcgtgctgagcctgtttcggaatatcgataaagtcctgaaaagcctgggattcctggagagcggctctggctccggcggtggcaccctgaagtacgtggaggatgtgacaaacgtggtcagacgggatgtggagaagtggggccccttcgatctggtgtacggcagcacccaacccctgggcagctcttgtgaccggtgccctggctggtacatgtttcagttccaccggatcctgcagtacgccctgccgagacaggagtcccagcggccattcttttggattttcatggacaacttgctgctgaccgaggatgaccaggaaactaccactcggttcctgcagaccgaagccgtgaccctgcaggacgtgagaggccgggactaccagaacgccatgcgggtgtggtccaacatccctggactgaaaagcaagcacgcacctctgacccctaaagaagaggagtacctgcaggcccaggtgcggagcagaagcaagctggacgcccctaaggtggatctgctggtgaagaattgcctcctgcccctgagagagtacttcaagtatttcagccagaatagtctgcccctgggcggcccaagcagcggcgcccctcctcccagcggcggcagcccagccggctccccaacctctaccgaggagggcacctctgagtccgccacccccgagagcggccctggcacctccaccgagcccagcgagggcagcgcacccggcagccctgccggcagccccacctccacagaggagggaaccagcaccgagcccagcgaaggcagcgccccaggcaccagcaccgagcctagtgagggcggctctggcggcggcagcgcccaggagattaaacggatcaacaagatcagaagaagacttgtgaaagacagcaacaccaagaaggccggcaagacaggccccatgaaaaccctgctggttagagtgatgacacccgatctgagagagcggctggaaaacctgagaaagaagcctgaaaatatcccccagcccatcagcaatacatctagagccaacctgaataagctgctgaccgattacaccgaaatgaagaaggcgatcctgcatgtgtactgggaagagttccagaaggaccctgtgggcctgatgagccgggtggcccagcctgccagcaagaagatcgatcagaacaagctgaaacctgagatggacgagaagggcaacctgaccaccgccggctttgcctgctctcagtgtggccagcccctgttcgtgtacaagctggagcaggtgtctgagaagggcaaggcttacaccaactacttcggacggtgcaatgtggccgagcacgaaaagctgatcctgctggcccagctgaagcccgagaaggatagcgacgaagccgtgacatatagcctgggaaagtttgggcagagggccctggatttctacagcattcatgtgaccaaggagtccacccaccccgtgaagcccctggcccagatcgccggaaacagatacgcctccggacctgtgggaaaggccctgagcgacgcatgtatgggcacaatcgcctccttcctgtctaagtaccaggacatcatcatcgaacaccagaaggtggtgaagggcaaccagaagagactggagagcctgcgggagctggccggcaaggaaaacctggaataccctagcgtgaccctgccacctcagcctcacaccaaggagggcgttgatgcctacaacgaagtgatcgcccgggtgcgaatgtgggtgaacctgaacctgtggcagaagctgaagctaagcagagatgatgccaagcctctgctgagactgaagggattcccttcctttcctctggtcgagagacaggccaacgaagtggactggtgggacatggtgtgtaacgtgaagaagctgatcaacgagaaaaaggaggatggcaaggtgttttggcagaatctggctggctacaagagacaggaagccctgagaccatacctgagcagcgaggaagatcggaagaagggaaagaaattcgctcggtaccagctgggcgacctgctgctgcacctggaaaagaagcacggcgaggactggggaaaggtgtacgacgaggcctgggagcggattgacaagaaagtggaaggcctgagcaagcacatcaagctggaagaggaacggagaagcgaggacgcccagagcaaggccgccctgaccgactggctgcgggctaaggccagcttcgtgatcgagggcctgaaggaggccgacaaggacgagttctgcagatgcgagctgaagctgcagaagtggtacggggacctgcggggaaagcccttcgccatcgaagccgagaacagcatcctggacatcagcggcttcagcaagcagtacaactgtgccttcatctggcagaaggacggcgtgaagaagctgaacctgtacctgatcatcaactacttcaagggcggcaagctgcggttcaagaagatcaaacctgaagccttcgaagccaacagattctacaccgtgatcaacaaaaagagcggcgagatcgtgcccatggaggtgaacttcaacttcgacgaccccaacctgatcatcctgcctctggcctttggcaagagacagggcagagaattcatctggaacgacctgctgtccctggaaaccggcagcctgaagctggccaacggaagagtgatcgagaagacactgtacaacagaagaacccggcaggatgagcctgccctgttcgtggccctgaccttcgagcggcgggaggtcctggactcctccaatatcaaaccaatgaacctgatcggcgtggcaagaggcgaaaacatccccgccgtgatcgccctgaccgaccccgagggctgcccactgagccggtttaaggatagcctgggaaacccaacccacatcctgagaatcggcgagagctataaggagaagcagcggaccatccaggccaagaaggaggtggagcagcggagagccggcggctacagccggaagtacgccagcaaagccaagaatctggcagacgatatggtgagaaacaccgctagagatctgctgtactacgccgtgacccaggatgccatgctgatcttcgccaacctgagccggggcttcggccggcagggcaagcggaccttcatggccgagagacagtacacacggatggaggactggctgaccgccaagctggcctacgagggcctgagcaagacctacctgtccaagacactggcccagtacacctccaagacatgcagcaactgtgggtttaccatcaccagcgccgactacgacagggtgctggagaagctgaagaagacagcaacaggctggatgaccacaattaacggcaaggagctgaaggtggagggccagattacctactacaacagatacaagagacagaacgtagtcaaggacctgtccgtcgagctggatagactgagcgaagaatctgtgaacaacgacatctcctcctggacaaagggcagaagcggagaagctctgagcctcctgaagaaaagattctcccatagacccgtgcaggagaagttcgtgtgcctgaactgcggcttcgagacacacgcagccgagcaagccgccctgaacatcgccagatcctggctgttcctgcggagccaggagtacaagaaataccagacaaacaagacaaccggcaacaccgataagagagccttcgtcgagacctggcagtccttttaccggaagaagcttaaggaggtgtggaaacctgccgtgcggtctggcggatctggcggaggctccacaagcttccaggagcccgtgaccttcaaggacgtggccgtggagttcacctgggaggagtggaggcagctggaccccacccagagggccctgttcagggacgtgatgctggagaactacaggaacctggtgagcctgggcctggccgtgaccaagcccgacgtgatcttccagctggagagcggcgaggtgccctggatgctggagagggaggtgcccaggagcagccccaccgagtgcctgaacctgaccagccccaagaaaaagagaaaagtctaagctgccttctgcggggcttgccttctggccatgcccttcttctctcccttgcacctgtacctcttggtctttgaataaagcctgagtaggaaggctagcaaaaaaaaaaaaaaaaaaaaaaaaaaaaaaaaaaaaaaaaaaaaaaaaaaaaaaaaaaaaaaaaaaaaaaaaaaaaaaaa

SEQ ID NO: 6604 - RNA, 5797 nt, synthetic construct
  source 1..5797: mol_type = other RNA
aggaaataagagagaaaagaagagtaagaagaaatataagagccaccatggcccctaagaagaagcgtaaagtgagccggatggaacgcctcgtctacgaggtgcggcagaagtgcagaaacatcgaggacatctgcatctcctgcggatctctgaacgtgaccctggagcacccactgttcatcggcggcatgtgccagaactgtaaaaactgttttctggagtgtgcctatcaatacgacgatgacggctaccagagctactgcaccatctgttgcggcggaagagaggtgctgatgtgtggaaataacaactgctgccggtgcttctgcgtggaatgcgtggacctgctggtgggccccggcgccgcccaggccgctattaaggaagatccttggaactgctacatgtgcggccacaagggcacatacggcctgctgagacggagagaggactggcctagcagactgcagatgttcttcgccaataaccacgaccaggagttcgacccccctaaggtgtaccctcccgtccccgccgagaagagaaagcccatccgggtcctgagcctgttcgatggcatcgccaccggtctgctggtgctgaaggacctgggcatccaggtggataggtacattgcctccgaggtgtgcgaggactccatcaccgtgggaatggtgcgtcatcagggcaagatcatgtacgtgggcgacgtgcggagcgtgacacagaagcatatccaggagtggggccctttcgacctggtgatcggcggcagcccttgcaatgacctgagcatcgtgaacccagcccggaagggcctgtacgagggaaccggcagactgttcttcgagttttacagactgctgcacgacgcccggcctaaggaaggcgacgaccggcccttcttttggctgttcgagaatgtggtggccatgggagtcagcgacaagcgggatattagccggttcctggagagcaaccccgtgatgatcgatgccaaggaagtgagcgccgcccaccgggccagatacttctggggcaatctgcctggcatgaacagacccctggccagcaccgtgaacgacaagctggagctgcaggagtgcctggagcacggccggatcgccaagttcagcaaggtgagaaccatcaccacccgaagcaacagcatcaaacaaggcaaggaccagcactttcctgtgttcatgaacgagaaggaggacatcctgtggtgtaccgagatggagagagtgttcgggttcccagtccactacacagatgtcagcaacatgtctagactggccagacagagactgctgggaagaagctggtccgtccctgtgatcagacacctgttcgcccctctgaaggagtacttcgcctgcgtgagcagcggcaacagcaacgccaacagccggggccccagcttctctagcggcctggtgccactgtccctgagagggagccacatgggccccatggagatctacaaaaccgtgagcgcctggaagcggcagcctgtgcgcgtgctgagcctgtttcggaatatcgataaagtcctgaaaagcctgggattcctggagagcggctctggctccggcggtggcaccctgaagtacgtggaggatgtgacaaacgtggtcagacgggatgtggagaagtggggccccttcgatctggtgtacggcagcacccaacccctgggcagctcttgtgaccggtgccctggctggtacatgtttcagttccaccggatcctgcagtacgccctgccgagacaggagtcccagcggccattcttttggattttcatggacaacttgctgctgaccgaggatgaccaggaaactaccactcggttcctgcagaccgaagccgtgaccctgcaggacgtgagaggccgggactaccagaacgccatgcgggtgtggtccaacatccctggactgaaaagcaagcacgcacctctgacccctaaagaagaggagtacctgcaggcccaggtgcggagcagaagcaagctggacgcccctaaggtggatctgctggtgaagaattgcctcctgcccctgagagagtacttcaagtatttcagccagaatagtctgcccctgggcggcccaagcagcggcgcccctcctcccagcggcggcagcccagccggctccccaacctctaccgaggagggcacctctgagtccgccacccccgagagcggccctggcacctccaccgagcccagcgagggcagcgcacccggcagccctgccggcagccccacctccacagaggagggaaccagcaccgagcccagcgaaggcagcgccccaggcaccagcaccgagcctagtgagggcggctctggcggcggcagcgcccaggagattaaacggatcaacaagatcagaagaagacttgtgaaagacagcaacaccaagaaggccggcaagacaggccccatgaaaaccctgctggttagagtgatgacacccgatctgagagagcggctggaaaacctgagaaagaagcctgaaaatatcccccagcccatcagcaatacatctagagccaacctgaataagctgctgaccgattacaccgaaatgaagaaggcgatcctgcatgtgtactgggaagagttccagaaggaccctgtgggcctgatgagccgggtggcccagcctgccagcaagaagatcgatcagaacaagctgaaacctgagatggacgagaagggcaacctgaccaccgccggctttgcctgctctcagtgtggccagcccctgttcgtgtacaagctggagcaggtgtctgagaagggcaaggcttacaccaactacttcggacggtgcaatgtggccgagcacgaaaagctgatcctgctggcccagctgaagcccgagaaggatagcgacgaagccgtgacatatagcctgggaaagtttgggcagagggccctggatttctacagcattcatgtgaccaaggagtccacccaccccgtgaagcccctggcccagatcgccggaaacagatacgcctccggacctgtgggaaaggccctgagcgacgcatgtatgggcacaatcgcctccttcctgtctaagtaccaggacatcatcatcgaacaccagaaggtggtgaagggcaaccagaagagactggagagcctgcgggagctggccggcaaggaaaacctggaataccctagcgtgaccctgccacctcagcctcacaccaaggagggcgttgatgcctacaacgaagtgatcgcccgggtgcgaatgtgggtgaacctgaacctgtggcagaagctgaagctaagcagagatgatgccaagcctctgctgagactgaagggattcccttcctttcctctggtcgagagacaggccaacgaagtggactggtgggacatggtgtgtaacgtgaagaagctgatcaacgagaaaaaggaggatggcaaggtgttttggcagaatctggctggctacaagagacaggaagccctgagaccatacctgagcagcgaggaagatcggaagaagggaaagaaattcgctcggtaccagctgggcgacctgctgctgcacctggaaaagaagcacggcgaggactggggaaaggtgtacgacgaggcctgggagcggattgacaagaaagtggaaggcctgagcaagcacatcaagctggaagaggaacggagaagcgaggacgcccagagcaaggccgccctgaccgactggctgcgggctaaggccagcttcgtgatcgagggcctgaaggaggccgacaaggacgagttctgcagatgcgagctgaagctgcagaagtggtacggggacctgcggggaaagcccttcgccatcgaagccgagaacagcatcctggacatcagcggcttcagcaagcagtacaactgtgccttcatctggcagaaggacggcgtgaagaagctgaacctgtacctgatcatcaactacttcaagggcggcaagctgcggttcaagaagatcaaacctgaagccttcgaagccaacagattctacaccgtgatcaacaaaaagagcggcgagatcgtgcccatggaggtgaacttcaacttcgacgaccccaacctgatcatcctgcctctggcctttggcaagagacagggcagagaattcatctggaacgacctgctgtccctggaaaccggcagcctgaagctggccaacggaagagtgatcgagaagacactgtacaacagaagaacccggcaggatgagcctgccctgttcgtggccctgaccttcgagcggcgggaggtcctggactcctccaatatcaaaccaatgaacctgatcggcgtggcaagaggcgaaaacatccccgccgtgatcgccctgaccgaccccgagggctgcccactgagccggtttaaggatagcctgggaaacccaacccacatcctgagaatcggcgagagctataaggagaagcagcggaccatccaggccaagaaggaggtggagcagcggagagccggcggctacagccggaagtacgccagcaaagccaagaatctggcagacgatatggtgagaaacaccgctagagatctgctgtactacgccgtgacccaggatgccatgctgatcttcgccaacctgagccggggcttcggccggcagggcaagcggaccttcatggccgagagacagtacacacggatggaggactggctgaccgccaagctggcctacgagggcctgagcaagacctacctgtccaagacactggcccagtacacctccaagacatgcagcaactgtgggtttaccatcaccagcgccgactacgacagggtgctggagaagctgaagaagacagcaacaggctggatgaccacaattaacggcaaggagctgaaggtggagggccagattacctactacaacagatacaagagacagaacgtagtcaaggacctgtccgtcgagctggatagactgagcgaagaatctgtgaacaacgacatctcctcctggacaaagggcagaagcggagaagctctgagcctcctgaagaaaagattctcccatagacccgtgcaggagaagttcgtgtgcctgaactgcggcttcgagacacacgcagccgagcaagccgccctgaacatcgccagatcctggctgttcctgcggagccaggagtacaagaaataccagacaaacaagacaaccggcaacaccgataagagagccttcgtcgagacctggcagtccttttaccggaagaagcttaaggaggtgtggaaacctgccgtgcggtctggcggatctggcggaggctccacaagcagccagggcctggtgagcttcaaggacgtggccgtggacttcacccaggaggagtggcagcagctggaccccgcccagaggaccctgtacagggacgtgatgctggagaacttcagccacgtgatcagcctgggctaccccgtgagcaagcccgacgtgatcagcaagctggagcagggcgaggacccctggatcatcaagagggacgtgagcaactggatctacaccgacgagaaccaggccaccagccccaagaaaaagagaaaagtctaagctgccttctgcggggcttgccttctggccatgcccttcttctctcccttgcacctgtacctcttggtctttgaataaagcctgagtaggaaggctagcaaaaaaaaaaaaaaaaaaaaaaaaaaaaaaaaaaaaaaaaaaaaaaaaaaaaaaaaaaaaaaaaaaaaaaaaaaaaaaaa

SEQ ID NO: 6605 - RNA, 5797 nt, synthetic construct
  source 1..5797: mol_type = other RNA
aggaaataagagagaaaagaagagtaagaagaaatataagagccaccatggcccctaagaagaagcgtaaagtgagccggatggaacgcctcgtctacgaggtgcggcagaagtgcagaaacatcgaggacatctgcatctcctgcggatctctgaacgtgaccctggagcacccactgttcatcggcggcatgtgccagaactgtaaaaactgttttctggagtgtgcctatcaatacgacgatgacggctaccagagctactgcaccatctgttgcggcggaagagaggtgctgatgtgtggaaataacaactgctgccggtgcttctgcgtggaatgcgtggacctgctggtgggccccggcgccgcccaggccgctattaaggaagatccttggaactgctacatgtgcggccacaagggcacatacggcctgctgagacggagagaggactggcctagcagactgcagatgttcttcgccaataaccacgaccaggagttcgacccccctaaggtgtaccctcccgtccccgccgagaagagaaagcccatccgggtcctgagcctgttcgatggcatcgccaccggtctgctggtgctgaaggacctgggcatccaggtggataggtacattgcctccgaggtgtgcgaggactccatcaccgtgggaatggtgcgtcatcagggcaagatcatgtacgtgggcgacgtgcggagcgtgacacagaagcatatccaggagtggggccctttcgacctggtgatcggcggcagcccttgcaatgacctgagcatcgtgaacccagcccggaagggcctgtacgagggaaccggcagactgttcttcgagttttacagactgctgcacgacgcccggcctaaggaaggcgacgaccggcccttcttttggctgttcgagaatgtggtggccatgggagtcagcgacaagcgggatattagccggttcctggagagcaaccccgtgatgatcgatgccaaggaagtgagcgccgcccaccgggccagatacttctggggcaatctgcctggcatgaacagacccctggccagcaccgtgaacgacaagctggagctgcaggagtgcctggagcacggccggatcgccaagttcagcaaggtgagaaccatcaccacccgaagcaacagcatcaaacaaggcaaggaccagcactttcctgtgttcatgaacgagaaggaggacatcctgtggtgtaccgagatggagagagtgttcgggttcccagtccactacacagatgtcagcaacatgtctagactggccagacagagactgctgggaagaagctggtccgtccctgtgatcagacacctgttcgcccctctgaaggagtacttcgcctgcgtgagcagcggcaacagcaacgccaacagccggggccccagcttctctagcggcctggtgccactgtccctgagagggagccacatgggccccatggagatctacaaaaccgtgagcgcctggaagcggcagcctgtgcgcgtgctgagcctgtttcggaatatcgataaagtcctgaaaagcctgggattcctggagagcggctctggctccggcggtggcaccctgaagtacgtggaggatgtgacaaacgtggtcagacgggatgtggagaagtggggccccttcgatctggtgtacggcagcacccaacccctgggcagctcttgtgaccggtgccctggctggtacatgtttcagttccaccggatcctgcagtacgccctgccgagacaggagtcccagcggccattcttttggattttcatggacaacttgctgctgaccgaggatgaccaggaaactaccactcggttcctgcagaccgaagccgtgaccctgcaggacgtgagaggccgggactaccagaacgccatgcgggtgtggtccaacatccctggactgaaaagcaagcacgcacctctgacccctaaagaagaggagtacctgcaggcccaggtgcggagcagaagcaagctggacgcccctaaggtggatctgctggtgaagaattgcctcctgcccctgagagagtacttcaagtatttcagccagaatagtctgcccctgggcggcccaagcagcggcgcccctcctcccagcggcggcagcccagccggctccccaacctctaccgaggagggcacctctgagtccgccacccccgagagcggccctggcacctccaccgagcccagcgagggcagcgcacccggcagccctgccggcagccccacctccacagaggagggaaccagcaccgagcccagcgaaggcagcgccccaggcaccagcaccgagcctagtgagggcggctctggcggcggcagcgcccaggagattaaacggatcaacaagatcagaagaagacttgtgaaagacagcaacaccaagaaggccggcaagacaggccccatgaaaaccctgctggttagagtgatgacacccgatctgagagagcggctggaaaacctgagaaagaagcctgaaaatatcccccagcccatcagcaatacatctagagccaacctgaataagctgctgaccgattacaccgaaatgaagaaggcgatcctgcatgtgtactgggaagagttccagaaggaccctgtgggcctgatgagccgggtggcccagcctgccagcaagaagatcgatcagaacaagctgaaacctgagatggacgagaagggcaacctgaccaccgccggctttgcctgctctcagtgtggccagcccctgttcgtgtacaagctggagcaggtgtctgagaagggcaaggcttacaccaactacttcggacggtgcaatgtggccgagcacgaaaagctgatcctgctggcccagctgaagcccgagaaggatagcgacgaagccgtgacatatagcctgggaaagtttgggcagagggccctggatttctacagcattcatgtgaccaaggagtccacccaccccgtgaagcccctggcccagatcgccggaaacagatacgcctccggacctgtgggaaaggccctgagcgacgcatgtatgggcacaatcgcctccttcctgtctaagtaccaggacatcatcatcgaacaccagaaggtggtgaagggcaaccagaagagactggagagcctgcgggagctggccggcaaggaaaacctggaataccctagcgtgaccctgccacctcagcctcacaccaaggagggcgttgatgcctacaacgaagtgatcgcccgggtgcgaatgtgggtgaacctgaacctgtggcagaagctgaagctaagcagagatgatgccaagcctctgctgagactgaagggattcccttcctttcctctggtcgagagacaggccaacgaagtggactggtgggacatggtgtgtaacgtgaagaagctgatcaacgagaaaaaggaggatggcaaggtgttttggcagaatctggctggctacaagagacaggaagccctgagaccatacctgagcagcgaggaagatcggaagaagggaaagaaattcgctcggtaccagctgggcgacctgctgctgcacctggaaaagaagcacggcgaggactggggaaaggtgtacgacgaggcctgggagcggattgacaagaaagtggaaggcctgagcaagcacatcaagctggaagaggaacggagaagcgaggacgcccagagcaaggccgccctgaccgactggctgcgggctaaggccagcttcgtgatcgagggcctgaaggaggccgacaaggacgagttctgcagatgcgagctgaagctgcagaagtggtacggggacctgcggggaaagcccttcgccatcgaagccgagaacagcatcctggacatcagcggcttcagcaagcagtacaactgtgccttcatctggcagaaggacggcgtgaagaagctgaacctgtacctgatcatcaactacttcaagggcggcaagctgcggttcaagaagatcaaacctgaagccttcgaagccaacagattctacaccgtgatcaacaaaaagagcggcgagatcgtgcccatggaggtgaacttcaacttcgacgaccccaacctgatcatcctgcctctggcctttggcaagagacagggcagagaattcatctggaacgacctgctgtccctggaaaccggcagcctgaagctggccaacggaagagtgatcgagaagacactgtacaacagaagaacccggcaggatgagcctgccctgttcgtggccctgaccttcgagcggcgggaggtcctggactcctccaatatcaaaccaatgaacctgatcggcgtggcaagaggcgaaaacatccccgccgtgatcgccctgaccgaccccgagggctgcccactgagccggtttaaggatagcctgggaaacccaacccacatcctgagaatcggcgagagctataaggagaagcagcggaccatccaggccaagaaggaggtggagcagcggagagccggcggctacagccggaagtacgccagcaaagccaagaatctggcagacgatatggtgagaaacaccgctagagatctgctgtactacgccgtgacccaggatgccatgctgatcttcgccaacctgagccggggcttcggccggcagggcaagcggaccttcatggccgagagacagtacacacggatggaggactggctgaccgccaagctggcctacgagggcctgagcaagacctacctgtccaagacactggcccagtacacctccaagacatgcagcaactgtgggtttaccatcaccagcgccgactacgacagggtgctggagaagctgaagaagacagcaacaggctggatgaccacaattaacggcaaggagctgaaggtggagggccagattacctactacaacagatacaagagacagaacgtagtcaaggacctgtccgtcgagctggatagactgagcgaagaatctgtgaacaacgacatctcctcctggacaaagggcagaagcggagaagctctgagcctcctgaagaaaagattctcccatagacccgtgcaggagaagttcgtgtgcctgaactgcggcttcgagacacacgcagccgagcaagccgccctgaacatcgccagatcctggctgttcctgcggagccaggagtacaagaaataccagacaaacaagacaaccggcaacaccgataagagagccttcgtcgagacctggcagtccttttaccggaagaagcttaaggaggtgtggaaacctgccgtgcggtctggcggatctggcggaggctccacaagcgcccaggagagcgtgaccttcgaggacgtggccgtgaacttcaccgacagggagtggcagtgcctgacctacgcccagaggcacctgtacaaggacgtgatgctggagaactacggcaacatggtgagcgtgggcttccccttccccaagccccccctgatcagccacctggagaggggcgtggagctgtgcgtgcaggacccccaggacagggagagcctgagctgcagctgcctggtgagcaccagccccaagaaaaagagaaaagtctaagctgccttctgcggggcttgccttctggccatgcccttcttctctcccttgcacctgtacctcttggtctttgaataaagcctgagtaggaaggctagcaaaaaaaaaaaaaaaaaaaaaaaaaaaaaaaaaaaaaaaaaaaaaaaaaaaaaaaaaaaaaaaaaaaaaaaaaaaaaaaa

SEQ ID NO: 6606 - RNA, 5797 nt, synthetic construct
  source 1..5797: mol_type = other RNA
aggaaataagagagaaaagaagagtaagaagaaatataagagccaccatggcccctaagaagaagcgtaaagtgagccggatggaacgcctcgtctacgaggtgcggcagaagtgcagaaacatcgaggacatctgcatctcctgcggatctctgaacgtgaccctggagcacccactgttcatcggcggcatgtgccagaactgtaaaaactgttttctggagtgtgcctatcaatacgacgatgacggctaccagagctactgcaccatctgttgcggcggaagagaggtgctgatgtgtggaaataacaactgctgccggtgcttctgcgtggaatgcgtggacctgctggtgggccccggcgccgcccaggccgctattaaggaagatccttggaactgctacatgtgcggccacaagggcacatacggcctgctgagacggagagaggactggcctagcagactgcagatgttcttcgccaataaccacgaccaggagttcgacccccctaaggtgtaccctcccgtccccgccgagaagagaaagcccatccgggtcctgagcctgttcgatggcatcgccaccggtctgctggtgctgaaggacctgggcatccaggtggataggtacattgcctccgaggtgtgcgaggactccatcaccgtgggaatggtgcgtcatcagggcaagatcatgtacgtgggcgacgtgcggagcgtgacacagaagcatatccaggagtggggccctttcgacctggtgatcggcggcagcccttgcaatgacctgagcatcgtgaacccagcccggaagggcctgtacgagggaaccggcagactgttcttcgagttttacagactgctgcacgacgcccggcctaaggaaggcgacgaccggcccttcttttggctgttcgagaatgtggtggccatgggagtcagcgacaagcgggatattagccggttcctggagagcaaccccgtgatgatcgatgccaaggaagtgagcgccgcccaccgggccagatacttctggggcaatctgcctggcatgaacagacccctggccagcaccgtgaacgacaagctggagctgcaggagtgcctggagcacggccggatcgccaagttcagcaaggtgagaaccatcaccacccgaagcaacagcatcaaacaaggcaaggaccagcactttcctgtgttcatgaacgagaaggaggacatcctgtggtgtaccgagatggagagagtgttcgggttcccagtccactacacagatgtcagcaacatgtctagactggccagacagagactgctgggaagaagctggtccgtccctgtgatcagacacctgttcgcccctctgaaggagtacttcgcctgcgtgagcagcggcaacagcaacgccaacagccggggccccagcttctctagcggcctggtgccactgtccctgagagggagccacatgggccccatggagatctacaaaaccgtgagcgcctggaagcggcagcctgtgcgcgtgctgagcctgtttcggaatatcgataaagtcctgaaaagcctgggattcctggagagcggctctggctccggcggtggcaccctgaagtacgtggaggatgtgacaaacgtggtcagacgggatgtggagaagtggggccccttcgatctggtgtacggcagcacccaacccctgggcagctcttgtgaccggtgccctggctggtacatgtttcagttccaccggatcctgcagtacgccctgccgagacaggagtcccagcggccattcttttggattttcatggacaacttgctgctgaccgaggatgaccaggaaactaccactcggttcctgcagaccgaagccgtgaccctgcaggacgtgagaggccgggactaccagaacgccatgcgggtgtggtccaacatccctggactgaaaagcaagcacgcacctctgacccctaaagaagaggagtacctgcaggcccaggtgcggagcagaagcaagctggacgcccctaaggtggatctgctggtgaagaattgcctcctgcccctgagagagtacttcaagtatttcagccagaatagtctgcccctgggcggcccaagcagcggcgcccctcctcccagcggcggcagcccagccggctccccaacctctaccgaggagggcacctctgagtccgccacccccgagagcggccctggcacctccaccgagcccagcgagggcagcgcacccggcagccctgccggcagccccacctccacagaggagggaaccagcaccgagcccagcgaaggcagcgccccaggcaccagcaccgagcctagtgagggcggctctggcggcggcagcgcccaggagattaaacggatcaacaagatcagaagaagacttgtgaaagacagcaacaccaagaaggccggcaagacaggccccatgaaaaccctgctggttagagtgatgacacccgatctgagagagcggctggaaaacctgagaaagaagcctgaaaatatcccccagcccatcagcaatacatctagagccaacctgaataagctgctgaccgattacaccgaaatgaagaaggcgatcctgcatgtgtactgggaagagttccagaaggaccctgtgggcctgatgagccgggtggcccagcctgccagcaagaagatcgatcagaacaagctgaaacctgagatggacgagaagggcaacctgaccaccgccggctttgcctgctctcagtgtggccagcccctgttcgtgtacaagctggagcaggtgtctgagaagggcaaggcttacaccaactacttcggacggtgcaatgtggccgagcacgaaaagctgatcctgctggcccagctgaagcccgagaaggatagcgacgaagccgtgacatatagcctgggaaagtttgggcagagggccctggatttctacagcattcatgtgaccaaggagtccacccaccccgtgaagcccctggcccagatcgccggaaacagatacgcctccggacctgtgggaaaggccctgagcgacgcatgtatgggcacaatcgcctccttcctgtctaagtaccaggacatcatcatcgaacaccagaaggtggtgaagggcaaccagaagagactggagagcctgcgggagctggccggcaaggaaaacctggaataccctagcgtgaccctgccacctcagcctcacaccaaggagggcgttgatgcctacaacgaagtgatcgcccgggtgcgaatgtgggtgaacctgaacctgtggcagaagctgaagctaagcagagatgatgccaagcctctgctgagactgaagggattcccttcctttcctctggtcgagagacaggccaacgaagtggactggtgggacatggtgtgtaacgtgaagaagctgatcaacgagaaaaaggaggatggcaaggtgttttggcagaatctggctggctacaagagacaggaagccctgagaccatacctgagcagcgaggaagatcggaagaagggaaagaaattcgctcggtaccagctgggcgacctgctgctgcacctggaaaagaagcacggcgaggactggggaaaggtgtacgacgaggcctgggagcggattgacaagaaagtggaaggcctgagcaagcacatcaagctggaagaggaacggagaagcgaggacgcccagagcaaggccgccctgaccgactggctgcgggctaaggccagcttcgtgatcgagggcctgaaggaggccgacaaggacgagttctgcagatgcgagctgaagctgcagaagtggtacggggacctgcggggaaagcccttcgccatcgaagccgagaacagcatcctggacatcagcggcttcagcaagcagtacaactgtgccttcatctggcagaaggacggcgtgaagaagctgaacctgtacctgatcatcaactacttcaagggcggcaagctgcggttcaagaagatcaaacctgaagccttcgaagccaacagattctacaccgtgatcaacaaaaagagcggcgagatcgtgcccatggaggtgaacttcaacttcgacgaccccaacctgatcatcctgcctctggcctttggcaagagacagggcagagaattcatctggaacgacctgctgtccctggaaaccggcagcctgaagctggccaacggaagagtgatcgagaagacactgtacaacagaagaacccggcaggatgagcctgccctgttcgtggccctgaccttcgagcggcgggaggtcctggactcctccaatatcaaaccaatgaacctgatcggcgtggcaagaggcgaaaacatccccgccgtgatcgccctgaccgaccccgagggctgcccactgagccggtttaaggatagcctgggaaacccaacccacatcctgagaatcggcgagagctataaggagaagcagcggaccatccaggccaagaaggaggtggagcagcggagagccggcggctacagccggaagtacgccagcaaagccaagaatctggcagacgatatggtgagaaacaccgctagagatctgctgtactacgccgtgacccaggatgccatgctgatcttcgccaacctgagccggggcttcggccggcagggcaagcggaccttcatggccgagagacagtacacacggatggaggactggctgaccgccaagctggcctacgagggcctgagcaagacctacctgtccaagacactggcccagtacacctccaagacatgcagcaactgtgggtttaccatcaccagcgccgactacgacagggtgctggagaagctgaagaagacagcaacaggctggatgaccacaattaacggcaaggagctgaaggtggagggccagattacctactacaacagatacaagagacagaacgtagtcaaggacctgtccgtcgagctggatagactgagcgaagaatctgtgaacaacgacatctcctcctggacaaagggcagaagcggagaagctctgagcctcctgaagaaaagattctcccatagacccgtgcaggagaagttcgtgtgcctgaactgcggcttcgagacacacgcagccgagcaagccgccctgaacatcgccagatcctggctgttcctgcggagccaggagtacaagaaataccagacaaacaagacaaccggcaacaccgataagagagccttcgtcgagacctggcagtccttttaccggaagaagcttaaggaggtgtggaaacctgccgtgcggtctggcggatctggcggaggctccacaagcgcctacggcagcctgagcttcggcgaggtggccatcagcttcagccaggaggagtgggagtgcctggaccccgcccagagggccctgtacagggacgtgatgctggagacctacagcaacctggtgagcctggccggcagcagcatcagcaagcccgacgtgatcaccctgctggagcaggagaaggagccctgggtggtggtgaggagggagaccagcaggtggtaccccgacctggagagcaccagccccaagaaaaagagaaaagtctaagctgccttctgcggggcttgccttctggccatgcccttcttctctcccttgcacctgtacctcttggtctttgaataaagcctgagtaggaaggctagcaaaaaaaaaaaaaaaaaaaaaaaaaaaaaaaaaaaaaaaaaaaaaaaaaaaaaaaaaaaaaaaaaaaaaaaaaaaaaaaa

SEQ ID NO: 6607 - RNA, 5797 nt, synthetic construct
  source 1..5797: mol_type = other RNA
aggaaataagagagaaaagaagagtaagaagaaatataagagccaccatggcccctaagaagaagcgtaaagtgagccggatggaacgcctcgtctacgaggtgcggcagaagtgcagaaacatcgaggacatctgcatctcctgcggatctctgaacgtgaccctggagcacccactgttcatcggcggcatgtgccagaactgtaaaaactgttttctggagtgtgcctatcaatacgacgatgacggctaccagagctactgcaccatctgttgcggcggaagagaggtgctgatgtgtggaaataacaactgctgccggtgcttctgcgtggaatgcgtggacctgctggtgggccccggcgccgcccaggccgctattaaggaagatccttggaactgctacatgtgcggccacaagggcacatacggcctgctgagacggagagaggactggcctagcagactgcagatgttcttcgccaataaccacgaccaggagttcgacccccctaaggtgtaccctcccgtccccgccgagaagagaaagcccatccgggtcctgagcctgttcgatggcatcgccaccggtctgctggtgctgaaggacctgggcatccaggtggataggtacattgcctccgaggtgtgcgaggactccatcaccgtgggaatggtgcgtcatcagggcaagatcatgtacgtgggcgacgtgcggagcgtgacacagaagcatatccaggagtggggccctttcgacctggtgatcggcggcagcccttgcaatgacctgagcatcgtgaacccagcccggaagggcctgtacgagggaaccggcagactgttcttcgagttttacagactgctgcacgacgcccggcctaaggaaggcgacgaccggcccttcttttggctgttcgagaatgtggtggccatgggagtcagcgacaagcgggatattagccggttcctggagagcaaccccgtgatgatcgatgccaaggaagtgagcgccgcccaccgggccagatacttctggggcaatctgcctggcatgaacagacccctggccagcaccgtgaacgacaagctggagctgcaggagtgcctggagcacggccggatcgccaagttcagcaaggtgagaaccatcaccacccgaagcaacagcatcaaacaaggcaaggaccagcactttcctgtgttcatgaacgagaaggaggacatcctgtggtgtaccgagatggagagagtgttcgggttcccagtccactacacagatgtcagcaacatgtctagactggccagacagagactgctgggaagaagctggtccgtccctgtgatcagacacctgttcgcccctctgaaggagtacttcgcctgcgtgagcagcggcaacagcaacgccaacagccggggccccagcttctctagcggcctggtgccactgtccctgagagggagccacatgggccccatggagatctacaaaaccgtgagcgcctggaagcggcagcctgtgcgcgtgctgagcctgtttcggaatatcgataaagtcctgaaaagcctgggattcctggagagcggctctggctccggcggtggcaccctgaagtacgtggaggatgtgacaaacgtggtcagacgggatgtggagaagtggggccccttcgatctggtgtacggcagcacccaacccctgggcagctcttgtgaccggtgccctggctggtacatgtttcagttccaccggatcctgcagtacgccctgccgagacaggagtcccagcggccattcttttggattttcatggacaacttgctgctgaccgaggatgaccaggaaactaccactcggttcctgcagaccgaagccgtgaccctgcaggacgtgagaggccgggactaccagaacgccatgcgggtgtggtccaacatccctggactgaaaagcaagcacgcacctctgacccctaaagaagaggagtacctgcaggcccaggtgcggagcagaagcaagctggacgcccctaaggtggatctgctggtgaagaattgcctcctgcccctgagagagtacttcaagtatttcagccagaatagtctgcccctgggcggcccaagcagcggcgcccctcctcccagcggcggcagcccagccggctccccaacctctaccgaggagggcacctctgagtccgccacccccgagagcggccctggcacctccaccgagcccagcgagggcagcgcacccggcagccctgccggcagccccacctccacagaggagggaaccagcaccgagcccagcgaaggcagcgccccaggcaccagcaccgagcctagtgagggcggctctggcggcggcagcgcccaggagattaaacggatcaacaagatcagaagaagacttgtgaaagacagcaacaccaagaaggccggcaagacaggccccatgaaaaccctgctggttagagtgatgacacccgatctgagagagcggctggaaaacctgagaaagaagcctgaaaatatcccccagcccatcagcaatacatctagagccaacctgaataagctgctgaccgattacaccgaaatgaagaaggcgatcctgcatgtgtactgggaagagttccagaaggaccctgtgggcctgatgagccgggtggcccagcctgccagcaagaagatcgatcagaacaagctgaaacctgagatggacgagaagggcaacctgaccaccgccggctttgcctgctctcagtgtggccagcccctgttcgtgtacaagctggagcaggtgtctgagaagggcaaggcttacaccaactacttcggacggtgcaatgtggccgagcacgaaaagctgatcctgctggcccagctgaagcccgagaaggatagcgacgaagccgtgacatatagcctgggaaagtttgggcagagggccctggatttctacagcattcatgtgaccaaggagtccacccaccccgtgaagcccctggcccagatcgccggaaacagatacgcctccggacctgtgggaaaggccctgagcgacgcatgtatgggcacaatcgcctccttcctgtctaagtaccaggacatcatcatcgaacaccagaaggtggtgaagggcaaccagaagagactggagagcctgcgggagctggccggcaaggaaaacctggaataccctagcgtgaccctgccacctcagcctcacaccaaggagggcgttgatgcctacaacgaagtgatcgcccgggtgcgaatgtgggtgaacctgaacctgtggcagaagctgaagctaagcagagatgatgccaagcctctgctgagactgaagggattcccttcctttcctctggtcgagagacaggccaacgaagtggactggtgggacatggtgtgtaacgtgaagaagctgatcaacgagaaaaaggaggatggcaaggtgttttggcagaatctggctggctacaagagacaggaagccctgagaccatacctgagcagcgaggaagatcggaagaagggaaagaaattcgctcggtaccagctgggcgacctgctgctgcacctggaaaagaagcacggcgaggactggggaaaggtgtacgacgaggcctgggagcggattgacaagaaagtggaaggcctgagcaagcacatcaagctggaagaggaacggagaagcgaggacgcccagagcaaggccgccctgaccgactggctgcgggctaaggccagcttcgtgatcgagggcctgaaggaggccgacaaggacgagttctgcagatgcgagctgaagctgcagaagtggtacggggacctgcggggaaagcccttcgccatcgaagccgagaacagcatcctggacatcagcggcttcagcaagcagtacaactgtgccttcatctggcagaaggacggcgtgaagaagctgaacctgtacctgatcatcaactacttcaagggcggcaagctgcggttcaagaagatcaaacctgaagccttcgaagccaacagattctacaccgtgatcaacaaaaagagcggcgagatcgtgcccatggaggtgaacttcaacttcgacgaccccaacctgatcatcctgcctctggcctttggcaagagacagggcagagaattcatctggaacgacctgctgtccctggaaaccggcagcctgaagctggccaacggaagagtgatcgagaagacactgtacaacagaagaacccggcaggatgagcctgccctgttcgtggccctgaccttcgagcggcgggaggtcctggactcctccaatatcaaaccaatgaacctgatcggcgtggcaagaggcgaaaacatccccgccgtgatcgccctgaccgaccccgagggctgcccactgagccggtttaaggatagcctgggaaacccaacccacatcctgagaatcggcgagagctataaggagaagcagcggaccatccaggccaagaaggaggtggagcagcggagagccggcggctacagccggaagtacgccagcaaagccaagaatctggcagacgatatggtgagaaacaccgctagagatctgctgtactacgccgtgacccaggatgccatgctgatcttcgccaacctgagccggggcttcggccggcagggcaagcggaccttcatggccgagagacagtacacacggatggaggactggctgaccgccaagctggcctacgagggcctgagcaagacctacctgtccaagacactggcccagtacacctccaagacatgcagcaactgtgggtttaccatcaccagcgccgactacgacagggtgctggagaagctgaagaagacagcaacaggctggatgaccacaattaacggcaaggagctgaaggtggagggccagattacctactacaacagatacaagagacagaacgtagtcaaggacctgtccgtcgagctggatagactgagcgaagaatctgtgaacaacgacatctcctcctggacaaagggcagaagcggagaagctctgagcctcctgaagaaaagattctcccatagacccgtgcaggagaagttcgtgtgcctgaactgcggcttcgagacacacgcagccgagcaagccgccctgaacatcgccagatcctggctgttcctgcggagccaggagtacaagaaataccagacaaacaagacaaccggcaacaccgataagagagccttcgtcgagacctggcagtccttttaccggaagaagcttaaggaggtgtggaaacctgccgtgcggtctggcggatctggcggaggctccacaagccagctgaccttcgaggacgtggccctgagcttcagcaaggaggagtggcagatcatggaccccaaccagaagaccctgtacatcgacgtgatgagggagatctacgagaccgtgaccagcctgggcctgaagctgaagaacgacaccggcaacgaccagcccgtgagcctgagcaccagcgagatccagcccagcggctgcaaggtgctgaggaaggccaggatgaaggtggcccagaccaccaccagccccaagaaaaagagaaaagtctaagctgccttctgcggggcttgccttctggccatgcccttcttctctcccttgcacctgtacctcttggtctttgaataaagcctgagtaggaaggctagcaaaaaaaaaaaaaaaaaaaaaaaaaaaaaaaaaaaaaaaaaaaaaaaaaaaaaaaaaaaaaaaaaaaaaaaaaaaaaaaa

SEQ ID NO: 6608 - RNA, 5797 nt, synthetic construct
  source 1..5797: mol_type = other RNA
aggaaataagagagaaaagaagagtaagaagaaatataagagccaccatggcccctaagaagaagcgtaaagtgagccggatggaacgcctcgtctacgaggtgcggcagaagtgcagaaacatcgaggacatctgcatctcctgcggatctctgaacgtgaccctggagcacccactgttcatcggcggcatgtgccagaactgtaaaaactgttttctggagtgtgcctatcaatacgacgatgacggctaccagagctactgcaccatctgttgcggcggaagagaggtgctgatgtgtggaaataacaactgctgccggtgcttctgcgtggaatgcgtggacctgctggtgggccccggcgccgcccaggccgctattaaggaagatccttggaactgctacatgtgcggccacaagggcacatacggcctgctgagacggagagaggactggcctagcagactgcagatgttcttcgccaataaccacgaccaggagttcgacccccctaaggtgtaccctcccgtccccgccgagaagagaaagcccatccgggtcctgagcctgttcgatggcatcgccaccggtctgctggtgctgaaggacctgggcatccaggtggataggtacattgcctccgaggtgtgcgaggactccatcaccgtgggaatggtgcgtcatcagggcaagatcatgtacgtgggcgacgtgcggagcgtgacacagaagcatatccaggagtggggccctttcgacctggtgatcggcggcagcccttgcaatgacctgagcatcgtgaacccagcccggaagggcctgtacgagggaaccggcagactgttcttcgagttttacagactgctgcacgacgcccggcctaaggaaggcgacgaccggcccttcttttggctgttcgagaatgtggtggccatgggagtcagcgacaagcgggatattagccggttcctggagagcaaccccgtgatgatcgatgccaaggaagtgagcgccgcccaccgggccagatacttctggggcaatctgcctggcatgaacagacccctggccagcaccgtgaacgacaagctggagctgcaggagtgcctggagcacggccggatcgccaagttcagcaaggtgagaaccatcaccacccgaagcaacagcatcaaacaaggcaaggaccagcactttcctgtgttcatgaacgagaaggaggacatcctgtggtgtaccgagatggagagagtgttcgggttcccagtccactacacagatgtcagcaacatgtctagactggccagacagagactgctgggaagaagctggtccgtccctgtgatcagacacctgttcgcccctctgaaggagtacttcgcctgcgtgagcagcggcaacagcaacgccaacagccggggccccagcttctctagcggcctggtgccactgtccctgagagggagccacatgggccccatggagatctacaaaaccgtgagcgcctggaagcggcagcctgtgcgcgtgctgagcctgtttcggaatatcgataaagtcctgaaaagcctgggattcctggagagcggctctggctccggcggtggcaccctgaagtacgtggaggatgtgacaaacgtggtcagacgggatgtggagaagtggggccccttcgatctggtgtacggcagcacccaacccctgggcagctcttgtgaccggtgccctggctggtacatgtttcagttccaccggatcctgcagtacgccctgccgagacaggagtcccagcggccattcttttggattttcatggacaacttgctgctgaccgaggatgaccaggaaactaccactcggttcctgcagaccgaagccgtgaccctgcaggacgtgagaggccgggactaccagaacgccatgcgggtgtggtccaacatccctggactgaaaagcaagcacgcacctctgacccctaaagaagaggagtacctgcaggcccaggtgcggagcagaagcaagctggacgcccctaaggtggatctgctggtgaagaattgcctcctgcccctgagagagtacttcaagtatttcagccagaatagtctgcccctgggcggcccaagcagcggcgcccctcctcccagcggcggcagcccagccggctccccaacctctaccgaggagggcacctctgagtccgccacccccgagagcggccctggcacctccaccgagcccagcgagggcagcgcacccggcagccctgccggcagccccacctccacagaggagggaaccagcaccgagcccagcgaaggcagcgccccaggcaccagcaccgagcctagtgagggcggctctggcggcggcagcgcccaggagattaaacggatcaacaagatcagaagaagacttgtgaaagacagcaacaccaagaaggccggcaagacaggccccatgaaaaccctgctggttagagtgatgacacccgatctgagagagcggctggaaaacctgagaaagaagcctgaaaatatcccccagcccatcagcaatacatctagagccaacctgaataagctgctgaccgattacaccgaaatgaagaaggcgatcctgcatgtgtactgggaagagttccagaaggaccctgtgggcctgatgagccgggtggcccagcctgccagcaagaagatcgatcagaacaagctgaaacctgagatggacgagaagggcaacctgaccaccgccggctttgcctgctctcagtgtggccagcccctgttcgtgtacaagctggagcaggtgtctgagaagggcaaggcttacaccaactacttcggacggtgcaatgtggccgagcacgaaaagctgatcctgctggcccagctgaagcccgagaaggatagcgacgaagccgtgacatatagcctgggaaagtttgggcagagggccctggatttctacagcattcatgtgaccaaggagtccacccaccccgtgaagcccctggcccagatcgccggaaacagatacgcctccggacctgtgggaaaggccctgagcgacgcatgtatgggcacaatcgcctccttcctgtctaagtaccaggacatcatcatcgaacaccagaaggtggtgaagggcaaccagaagagactggagagcctgcgggagctggccggcaaggaaaacctggaataccctagcgtgaccctgccacctcagcctcacaccaaggagggcgttgatgcctacaacgaagtgatcgcccgggtgcgaatgtgggtgaacctgaacctgtggcagaagctgaagctaagcagagatgatgccaagcctctgctgagactgaagggattcccttcctttcctctggtcgagagacaggccaacgaagtggactggtgggacatggtgtgtaacgtgaagaagctgatcaacgagaaaaaggaggatggcaaggtgttttggcagaatctggctggctacaagagacaggaagccctgagaccatacctgagcagcgaggaagatcggaagaagggaaagaaattcgctcggtaccagctgggcgacctgctgctgcacctggaaaagaagcacggcgaggactggggaaaggtgtacgacgaggcctgggagcggattgacaagaaagtggaaggcctgagcaagcacatcaagctggaagaggaacggagaagcgaggacgcccagagcaaggccgccctgaccgactggctgcgggctaaggccagcttcgtgatcgagggcctgaaggaggccgacaaggacgagttctgcagatgcgagctgaagctgcagaagtggtacggggacctgcggggaaagcccttcgccatcgaagccgagaacagcatcctggacatcagcggcttcagcaagcagtacaactgtgccttcatctggcagaaggacggcgtgaagaagctgaacctgtacctgatcatcaactacttcaagggcggcaagctgcggttcaagaagatcaaacctgaagccttcgaagccaacagattctacaccgtgatcaacaaaaagagcggcgagatcgtgcccatggaggtgaacttcaacttcgacgaccccaacctgatcatcctgcctctggcctttggcaagagacagggcagagaattcatctggaacgacctgctgtccctggaaaccggcagcctgaagctggccaacggaagagtgatcgagaagacactgtacaacagaagaacccggcaggatgagcctgccctgttcgtggccctgaccttcgagcggcgggaggtcctggactcctccaatatcaaaccaatgaacctgatcggcgtggcaagaggcgaaaacatccccgccgtgatcgccctgaccgaccccgagggctgcccactgagccggtttaaggatagcctgggaaacccaacccacatcctgagaatcggcgagagctataaggagaagcagcggaccatccaggccaagaaggaggtggagcagcggagagccggcggctacagccggaagtacgccagcaaagccaagaatctggcagacgatatggtgagaaacaccgctagagatctgctgtactacgccgtgacccaggatgccatgctgatcttcgccaacctgagccggggcttcggccggcagggcaagcggaccttcatggccgagagacagtacacacggatggaggactggctgaccgccaagctggcctacgagggcctgagcaagacctacctgtccaagacactggcccagtacacctccaagacatgcagcaactgtgggtttaccatcaccagcgccgactacgacagggtgctggagaagctgaagaagacagcaacaggctggatgaccacaattaacggcaaggagctgaaggtggagggccagattacctactacaacagatacaagagacagaacgtagtcaaggacctgtccgtcgagctggatagactgagcgaagaatctgtgaacaacgacatctcctcctggacaaagggcagaagcggagaagctctgagcctcctgaagaaaagattctcccatagacccgtgcaggagaagttcgtgtgcctgaactgcggcttcgagacacacgcagccgagcaagccgccctgaacatcgccagatcctggctgttcctgcggagccaggagtacaagaaataccagacaaacaagacaaccggcaacaccgataagagagccttcgtcgagacctggcagtccttttaccggaagaagcttaaggaggtgtggaaacctgccgtgcggtctggcggatctggcggaggctccacaagcgagaagggccccctgaccttcagggacgtggtgatcgagttcagccaggaggagtggcagtgcctggacaccgcccagcaggacctgtacaggaaggtgatgctggagaacttcaggaacctggtgttcctgggcatcgacgtgagcaagcccgacctgatcacctgcctggagcagggcaagaacccctggaacatgaagaggcacagcatggtggccaccccccccggcgtgttcttcgtgaccagccccaagaaaaagagaaaagtctaagctgccttctgcggggcttgccttctggccatgcccttcttctctcccttgcacctgtacctcttggtctttgaataaagcctgagtaggaaggctagcaaaaaaaaaaaaaaaaaaaaaaaaaaaaaaaaaaaaaaaaaaaaaaaaaaaaaaaaaaaaaaaaaaaaaaaaaaaaaaaa

SEQ ID NO: 6609 - RNA, 5797 nt, synthetic construct
  source 1..5797: mol_type = other RNA
aggaaataagagagaaaagaagagtaagaagaaatataagagccaccatggcccctaagaagaagcgtaaagtgagccggatggaacgcctcgtctacgaggtgcggcagaagtgcagaaacatcgaggacatctgcatctcctgcggatctctgaacgtgaccctggagcacccactgttcatcggcggcatgtgccagaactgtaaaaactgttttctggagtgtgcctatcaatacgacgatgacggctaccagagctactgcaccatctgttgcggcggaagagaggtgctgatgtgtggaaataacaactgctgccggtgcttctgcgtggaatgcgtggacctgctggtgggccccggcgccgcccaggccgctattaaggaagatccttggaactgctacatgtgcggccacaagggcacatacggcctgctgagacggagagaggactggcctagcagactgcagatgttcttcgccaataaccacgaccaggagttcgacccccctaaggtgtaccctcccgtccccgccgagaagagaaagcccatccgggtcctgagcctgttcgatggcatcgccaccggtctgctggtgctgaaggacctgggcatccaggtggataggtacattgcctccgaggtgtgcgaggactccatcaccgtgggaatggtgcgtcatcagggcaagatcatgtacgtgggcgacgtgcggagcgtgacacagaagcatatccaggagtggggccctttcgacctggtgatcggcggcagcccttgcaatgacctgagcatcgtgaacccagcccggaagggcctgtacgagggaaccggcagactgttcttcgagttttacagactgctgcacgacgcccggcctaaggaaggcgacgaccggcccttcttttggctgttcgagaatgtggtggccatgggagtcagcgacaagcgggatattagccggttcctggagagcaaccccgtgatgatcgatgccaaggaagtgagcgccgcccaccgggccagatacttctggggcaatctgcctggcatgaacagacccctggccagcaccgtgaacgacaagctggagctgcaggagtgcctggagcacggccggatcgccaagttcagcaaggtgagaaccatcaccacccgaagcaacagcatcaaacaaggcaaggaccagcactttcctgtgttcatgaacgagaaggaggacatcctgtggtgtaccgagatggagagagtgttcgggttcccagtccactacacagatgtcagcaacatgtctagactggccagacagagactgctgggaagaagctggtccgtccctgtgatcagacacctgttcgcccctctgaaggagtacttcgcctgcgtgagcagcggcaacagcaacgccaacagccggggccccagcttctctagcggcctggtgccactgtccctgagagggagccacatgggccccatggagatctacaaaaccgtgagcgcctggaagcggcagcctgtgcgcgtgctgagcctgtttcggaatatcgataaagtcctgaaaagcctgggattcctggagagcggctctggctccggcggtggcaccctgaagtacgtggaggatgtgacaaacgtggtcagacgggatgtggagaagtggggccccttcgatctggtgtacggcagcacccaacccctgggcagctcttgtgaccggtgccctggctggtacatgtttcagttccaccggatcctgcagtacgccctgccgagacaggagtcccagcggccattcttttggattttcatggacaacttgctgctgaccgaggatgaccaggaaactaccactcggttcctgcagaccgaagccgtgaccctgcaggacgtgagaggccgggactaccagaacgccatgcgggtgtggtccaacatccctggactgaaaagcaagcacgcacctctgacccctaaagaagaggagtacctgcaggcccaggtgcggagcagaagcaagctggacgcccctaaggtggatctgctggtgaagaattgcctcctgcccctgagagagtacttcaagtatttcagccagaatagtctgcccctgggcggcccaagcagcggcgcccctcctcccagcggcggcagcccagccggctccccaacctctaccgaggagggcacctctgagtccgccacccccgagagcggccctggcacctccaccgagcccagcgagggcagcgcacccggcagccctgccggcagccccacctccacagaggagggaaccagcaccgagcccagcgaaggcagcgccccaggcaccagcaccgagcctagtgagggcggctctggcggcggcagcgcccaggagattaaacggatcaacaagatcagaagaagacttgtgaaagacagcaacaccaagaaggccggcaagacaggccccatgaaaaccctgctggttagagtgatgacacccgatctgagagagcggctggaaaacctgagaaagaagcctgaaaatatcccccagcccatcagcaatacatctagagccaacctgaataagctgctgaccgattacaccgaaatgaagaaggcgatcctgcatgtgtactgggaagagttccagaaggaccctgtgggcctgatgagccgggtggcccagcctgccagcaagaagatcgatcagaacaagctgaaacctgagatggacgagaagggcaacctgaccaccgccggctttgcctgctctcagtgtggccagcccctgttcgtgtacaagctggagcaggtgtctgagaagggcaaggcttacaccaactacttcggacggtgcaatgtggccgagcacgaaaagctgatcctgctggcccagctgaagcccgagaaggatagcgacgaagccgtgacatatagcctgggaaagtttgggcagagggccctggatttctacagcattcatgtgaccaaggagtccacccaccccgtgaagcccctggcccagatcgccggaaacagatacgcctccggacctgtgggaaaggccctgagcgacgcatgtatgggcacaatcgcctccttcctgtctaagtaccaggacatcatcatcgaacaccagaaggtggtgaagggcaaccagaagagactggagagcctgcgggagctggccggcaaggaaaacctggaataccctagcgtgaccctgccacctcagcctcacaccaaggagggcgttgatgcctacaacgaagtgatcgcccgggtgcgaatgtgggtgaacctgaacctgtggcagaagctgaagctaagcagagatgatgccaagcctctgctgagactgaagggattcccttcctttcctctggtcgagagacaggccaacgaagtggactggtgggacatggtgtgtaacgtgaagaagctgatcaacgagaaaaaggaggatggcaaggtgttttggcagaatctggctggctacaagagacaggaagccctgagaccatacctgagcagcgaggaagatcggaagaagggaaagaaattcgctcggtaccagctgggcgacctgctgctgcacctggaaaagaagcacggcgaggactggggaaaggtgtacgacgaggcctgggagcggattgacaagaaagtggaaggcctgagcaagcacatcaagctggaagaggaacggagaagcgaggacgcccagagcaaggccgccctgaccgactggctgcgggctaaggccagcttcgtgatcgagggcctgaaggaggccgacaaggacgagttctgcagatgcgagctgaagctgcagaagtggtacggggacctgcggggaaagcccttcgccatcgaagccgagaacagcatcctggacatcagcggcttcagcaagcagtacaactgtgccttcatctggcagaaggacggcgtgaagaagctgaacctgtacctgatcatcaactacttcaagggcggcaagctgcggttcaagaagatcaaacctgaagccttcgaagccaacagattctacaccgtgatcaacaaaaagagcggcgagatcgtgcccatggaggtgaacttcaacttcgacgaccccaacctgatcatcctgcctctggcctttggcaagagacagggcagagaattcatctggaacgacctgctgtccctggaaaccggcagcctgaagctggccaacggaagagtgatcgagaagacactgtacaacagaagaacccggcaggatgagcctgccctgttcgtggccctgaccttcgagcggcgggaggtcctggactcctccaatatcaaaccaatgaacctgatcggcgtggcaagaggcgaaaacatccccgccgtgatcgccctgaccgaccccgagggctgcccactgagccggtttaaggatagcctgggaaacccaacccacatcctgagaatcggcgagagctataaggagaagcagcggaccatccaggccaagaaggaggtggagcagcggagagccggcggctacagccggaagtacgccagcaaagccaagaatctggcagacgatatggtgagaaacaccgctagagatctgctgtactacgccgtgacccaggatgccatgctgatcttcgccaacctgagccggggcttcggccggcagggcaagcggaccttcatggccgagagacagtacacacggatggaggactggctgaccgccaagctggcctacgagggcctgagcaagacctacctgtccaagacactggcccagtacacctccaagacatgcagcaactgtgggtttaccatcaccagcgccgactacgacagggtgctggagaagctgaagaagacagcaacaggctggatgaccacaattaacggcaaggagctgaaggtggagggccagattacctactacaacagatacaagagacagaacgtagtcaaggacctgtccgtcgagctggatagactgagcgaagaatctgtgaacaacgacatctcctcctggacaaagggcagaagcggagaagctctgagcctcctgaagaaaagattctcccatagacccgtgcaggagaagttcgtgtgcctgaactgcggcttcgagacacacgcagccgagcaagccgccctgaacatcgccagatcctggctgttcctgcggagccaggagtacaagaaataccagacaaacaagacaaccggcaacaccgataagagagccttcgtcgagacctggcagtccttttaccggaagaagcttaaggaggtgtggaaacctgccgtgcggtctggcggatctggcggaggctccacaagcttccagcacctggtgatgttcagggacgtggccgtggacttcagccaggaggagtgggagtgcctgaacagctaccagaggaacctgtacagggacgtgatcctggagaactacagcaacctggtgagcgtgggctgcaccatcagcaagcccgacgtgatcaccctgctggagcagggcaaggagccctggatggtggtgagggacgagaggaggaggaggagcctggacctggaggccaggaccagccccaagaaaaagagaaaagtctaagctgccttctgcggggcttgccttctggccatgcccttcttctctcccttgcacctgtacctcttggtctttgaataaagcctgagtaggaaggctagcaaaaaaaaaaaaaaaaaaaaaaaaaaaaaaaaaaaaaaaaaaaaaaaaaaaaaaaaaaaaaaaaaaaaaaaaaaaaaaaa

SEQ ID NO: 6610 - RNA, 5806 nt, synthetic construct
  source 1..5806: mol_type = other RNA
aggaaataagagagaaaagaagagtaagaagaaatataagagccaccatggcccctaagaagaagcgtaaagtgagccggatggaacgcctcgtctacgaggtgcggcagaagtgcagaaacatcgaggacatctgcatctcctgcggatctctgaacgtgaccctggagcacccactgttcatcggcggcatgtgccagaactgtaaaaactgttttctggagtgtgcctatcaatacgacgatgacggctaccagagctactgcaccatctgttgcggcggaagagaggtgctgatgtgtggaaataacaactgctgccggtgcttctgcgtggaatgcgtggacctgctggtgggccccggcgccgcccaggccgctattaaggaagatccttggaactgctacatgtgcggccacaagggcacatacggcctgctgagacggagagaggactggcctagcagactgcagatgttcttcgccaataaccacgaccaggagttcgacccccctaaggtgtaccctcccgtccccgccgagaagagaaagcccatccgggtcctgagcctgttcgatggcatcgccaccggtctgctggtgctgaaggacctgggcatccaggtggataggtacattgcctccgaggtgtgcgaggactccatcaccgtgggaatggtgcgtcatcagggcaagatcatgtacgtgggcgacgtgcggagcgtgacacagaagcatatccaggagtggggccctttcgacctggtgatcggcggcagcccttgcaatgacctgagcatcgtgaacccagcccggaagggcctgtacgagggaaccggcagactgttcttcgagttttacagactgctgcacgacgcccggcctaaggaaggcgacgaccggcccttcttttggctgttcgagaatgtggtggccatgggagtcagcgacaagcgggatattagccggttcctggagagcaaccccgtgatgatcgatgccaaggaagtgagcgccgcccaccgggccagatacttctggggcaatctgcctggcatgaacagacccctggccagcaccgtgaacgacaagctggagctgcaggagtgcctggagcacggccggatcgccaagttcagcaaggtgagaaccatcaccacccgaagcaacagcatcaaacaaggcaaggaccagcactttcctgtgttcatgaacgagaaggaggacatcctgtggtgtaccgagatggagagagtgttcgggttcccagtccactacacagatgtcagcaacatgtctagactggccagacagagactgctgggaagaagctggtccgtccctgtgatcagacacctgttcgcccctctgaaggagtacttcgcctgcgtgagcagcggcaacagcaacgccaacagccggggccccagcttctctagcggcctggtgccactgtccctgagagggagccacatgggccccatggagatctacaaaaccgtgagcgcctggaagcggcagcctgtgcgcgtgctgagcctgtttcggaatatcgataaagtcctgaaaagcctgggattcctggagagcggctctggctccggcggtggcaccctgaagtacgtggaggatgtgacaaacgtggtcagacgggatgtggagaagtggggccccttcgatctggtgtacggcagcacccaacccctgggcagctcttgtgaccggtgccctggctggtacatgtttcagttccaccggatcctgcagtacgccctgccgagacaggagtcccagcggccattcttttggattttcatggacaacttgctgctgaccgaggatgaccaggaaactaccactcggttcctgcagaccgaagccgtgaccctgcaggacgtgagaggccgggactaccagaacgccatgcgggtgtggtccaacatccctggactgaaaagcaagcacgcacctctgacccctaaagaagaggagtacctgcaggcccaggtgcggagcagaagcaagctggacgcccctaaggtggatctgctggtgaagaattgcctcctgcccctgagagagtacttcaagtatttcagccagaatagtctgcccctgggcggcccaagcagcggcgcccctcctcccagcggcggcagcccagccggctccccaacctctaccgaggagggcacctctgagtccgccacccccgagagcggccctggcacctccaccgagcccagcgagggcagcgcacccggcagccctgccggcagccccacctccacagaggagggaaccagcaccgagcccagcgaaggcagcgccccaggcaccagcaccgagcctagtgagggcggctctggcggcggcagcgcccaggagattaaacggatcaacaagatcagaagaagacttgtgaaagacagcaacaccaagaaggccggcaagacaggccccatgaaaaccctgctggttagagtgatgacacccgatctgagagagcggctggaaaacctgagaaagaagcctgaaaatatcccccagcccatcagcaatacatctagagccaacctgaataagctgctgaccgattacaccgaaatgaagaaggcgatcctgcatgtgtactgggaagagttccagaaggaccctgtgggcctgatgagccgggtggcccagcctgccagcaagaagatcgatcagaacaagctgaaacctgagatggacgagaagggcaacctgaccaccgccggctttgcctgctctcagtgtggccagcccctgttcgtgtacaagctggagcaggtgtctgagaagggcaaggcttacaccaactacttcggacggtgcaatgtggccgagcacgaaaagctgatcctgctggcccagctgaagcccgagaaggatagcgacgaagccgtgacatatagcctgggaaagtttgggcagagggccctggatttctacagcattcatgtgaccaaggagtccacccaccccgtgaagcccctggcccagatcgccggaaacagatacgcctccggacctgtgggaaaggccctgagcgacgcatgtatgggcacaatcgcctccttcctgtctaagtaccaggacatcatcatcgaacaccagaaggtggtgaagggcaaccagaagagactggagagcctgcgggagctggccggcaaggaaaacctggaataccctagcgtgaccctgccacctcagcctcacaccaaggagggcgttgatgcctacaacgaagtgatcgcccgggtgcgaatgtgggtgaacctgaacctgtggcagaagctgaagctaagcagagatgatgccaagcctctgctgagactgaagggattcccttcctttcctctggtcgagagacaggccaacgaagtggactggtgggacatggtgtgtaacgtgaagaagctgatcaacgagaaaaaggaggatggcaaggtgttttggcagaatctggctggctacaagagacaggaagccctgagaccatacctgagcagcgaggaagatcggaagaagggaaagaaattcgctcggtaccagctgggcgacctgctgctgcacctggaaaagaagcacggcgaggactggggaaaggtgtacgacgaggcctgggagcggattgacaagaaagtggaaggcctgagcaagcacatcaagctggaagaggaacggagaagcgaggacgcccagagcaaggccgccctgaccgactggctgcgggctaaggccagcttcgtgatcgagggcctgaaggaggccgacaaggacgagttctgcagatgcgagctgaagctgcagaagtggtacggggacctgcggggaaagcccttcgccatcgaagccgagaacagcatcctggacatcagcggcttcagcaagcagtacaactgtgccttcatctggcagaaggacggcgtgaagaagctgaacctgtacctgatcatcaactacttcaagggcggcaagctgcggttcaagaagatcaaacctgaagccttcgaagccaacagattctacaccgtgatcaacaaaaagagcggcgagatcgtgcccatggaggtgaacttcaacttcgacgaccccaacctgatcatcctgcctctggcctttggcaagagacagggcagagaattcatctggaacgacctgctgtccctggaaaccggcagcctgaagctggccaacggaagagtgatcgagaagacactgtacaacagaagaacccggcaggatgagcctgccctgttcgtggccctgaccttcgagcggcgggaggtcctggactcctccaatatcaaaccaatgaacctgatcggcgtggcaagaggcgaaaacatccccgccgtgatcgccctgaccgaccccgagggctgcccactgagccggtttaaggatagcctgggaaacccaacccacatcctgagaatcggcgagagctataaggagaagcagcggaccatccaggccaagaaggaggtggagcagcggagagccggcggctacagccggaagtacgccagcaaagccaagaatctggcagacgatatggtgagaaacaccgctagagatctgctgtactacgccgtgacccaggatgccatgctgatcttcgccaacctgagccggggcttcggccggcagggcaagcggaccttcatggccgagagacagtacacacggatggaggactggctgaccgccaagctggcctacgagggcctgagcaagacctacctgtccaagacactggcccagtacacctccaagacatgcagcaactgtgggtttaccatcaccagcgccgactacgacagggtgctggagaagctgaagaagacagcaacaggctggatgaccacaattaacggcaaggagctgaaggtggagggccagattacctactacaacagatacaagagacagaacgtagtcaaggacctgtccgtcgagctggatagactgagcgaagaatctgtgaacaacgacatctcctcctggacaaagggcagaagcggagaagctctgagcctcctgaagaaaagattctcccatagacccgtgcaggagaagttcgtgtgcctgaactgcggcttcgagacacacgcagccgagcaagccgccctgaacatcgccagatcctggctgttcctgcggagccaggagtacaagaaataccagacaaacaagacaaccggcaacaccgataagagagccttcgtcgagacctggcagtccttttaccggaagaagcttaaggaggtgtggaaacctgccgtgcggtctggcggatctggcggaggctccacaagcctgaccttcgaggacgtggccgtgtacttcagcgaggaggagtggcagctgctgaaccccctggagaagaccctgtacaacgacgtgatgcaggacatctacgagaccgtgatcagcctgggcctgaagctgaagaacgacaccggcaacgaccaccccatcagcgtgagcaccagcgagatccagaccagcggctgcgaggtgagcaagaagaccaggatgaagatcgcccagaagaccatgggcagggagaccagccccaagaaaaagagaaaagtctaagctgccttctgcggggcttgccttctggccatgcccttcttctctcccttgcacctgtacctcttggtctttgaataaagcctgagtaggaaggctagcaaaaaaaaaaaaaaaaaaaaaaaaaaaaaaaaaaaaaaaaaaaaaaaaaaaaaaaaaaaaaaaaaaaaaaaaaaaaaaaa

SEQ ID NO: 6611 - RNA, 5797 nt, synthetic construct
  source 1..5797: mol_type = other RNA
aggaaataagagagaaaagaagagtaagaagaaatataagagccaccatggcccctaagaagaagcgtaaagtgagccggatggaacgcctcgtctacgaggtgcggcagaagtgcagaaacatcgaggacatctgcatctcctgcggatctctgaacgtgaccctggagcacccactgttcatcggcggcatgtgccagaactgtaaaaactgttttctggagtgtgcctatcaatacgacgatgacggctaccagagctactgcaccatctgttgcggcggaagagaggtgctgatgtgtggaaataacaactgctgccggtgcttctgcgtggaatgcgtggacctgctggtgggccccggcgccgcccaggccgctattaaggaagatccttggaactgctacatgtgcggccacaagggcacatacggcctgctgagacggagagaggactggcctagcagactgcagatgttcttcgccaataaccacgaccaggagttcgacccccctaaggtgtaccctcccgtccccgccgagaagagaaagcccatccgggtcctgagcctgttcgatggcatcgccaccggtctgctggtgctgaaggacctgggcatccaggtggataggtacattgcctccgaggtgtgcgaggactccatcaccgtgggaatggtgcgtcatcagggcaagatcatgtacgtgggcgacgtgcggagcgtgacacagaagcatatccaggagtggggccctttcgacctggtgatcggcggcagcccttgcaatgacctgagcatcgtgaacccagcccggaagggcctgtacgagggaaccggcagactgttcttcgagttttacagactgctgcacgacgcccggcctaaggaaggcgacgaccggcccttcttttggctgttcgagaatgtggtggccatgggagtcagcgacaagcgggatattagccggttcctggagagcaaccccgtgatgatcgatgccaaggaagtgagcgccgcccaccgggccagatacttctggggcaatctgcctggcatgaacagacccctggccagcaccgtgaacgacaagctggagctgcaggagtgcctggagcacggccggatcgccaagttcagcaaggtgagaaccatcaccacccgaagcaacagcatcaaacaaggcaaggaccagcactttcctgtgttcatgaacgagaaggaggacatcctgtggtgtaccgagatggagagagtgttcgggttcccagtccactacacagatgtcagcaacatgtctagactggccagacagagactgctgggaagaagctggtccgtccctgtgatcagacacctgttcgcccctctgaaggagtacttcgcctgcgtgagcagcggcaacagcaacgccaacagccggggccccagcttctctagcggcctggtgccactgtccctgagagggagccacatgggccccatggagatctacaaaaccgtgagcgcctggaagcggcagcctgtgcgcgtgctgagcctgtttcggaatatcgataaagtcctgaaaagcctgggattcctggagagcggctctggctccggcggtggcaccctgaagtacgtggaggatgtgacaaacgtggtcagacgggatgtggagaagtggggccccttcgatctggtgtacggcagcacccaacccctgggcagctcttgtgaccggtgccctggctggtacatgtttcagttccaccggatcctgcagtacgccctgccgagacaggagtcccagcggccattcttttggattttcatggacaacttgctgctgaccgaggatgaccaggaaactaccactcggttcctgcagaccgaagccgtgaccctgcaggacgtgagaggccgggactaccagaacgccatgcgggtgtggtccaacatccctggactgaaaagcaagcacgcacctctgacccctaaagaagaggagtacctgcaggcccaggtgcggagcagaagcaagctggacgcccctaaggtggatctgctggtgaagaattgcctcctgcccctgagagagtacttcaagtatttcagccagaatagtctgcccctgggcggcccaagcagcggcgcccctcctcccagcggcggcagcccagccggctccccaacctctaccgaggagggcacctctgagtccgccacccccgagagcggccctggcacctccaccgagcccagcgagggcagcgcacccggcagccctgccggcagccccacctccacagaggagggaaccagcaccgagcccagcgaaggcagcgccccaggcaccagcaccgagcctagtgagggcggctctggcggcggcagcgcccaggagattaaacggatcaacaagatcagaagaagacttgtgaaagacagcaacaccaagaaggccggcaagacaggccccatgaaaaccctgctggttagagtgatgacacccgatctgagagagcggctggaaaacctgagaaagaagcctgaaaatatcccccagcccatcagcaatacatctagagccaacctgaataagctgctgaccgattacaccgaaatgaagaaggcgatcctgcatgtgtactgggaagagttccagaaggaccctgtgggcctgatgagccgggtggcccagcctgccagcaagaagatcgatcagaacaagctgaaacctgagatggacgagaagggcaacctgaccaccgccggctttgcctgctctcagtgtggccagcccctgttcgtgtacaagctggagcaggtgtctgagaagggcaaggcttacaccaactacttcggacggtgcaatgtggccgagcacgaaaagctgatcctgctggcccagctgaagcccgagaaggatagcgacgaagccgtgacatatagcctgggaaagtttgggcagagggccctggatttctacagcattcatgtgaccaaggagtccacccaccccgtgaagcccctggcccagatcgccggaaacagatacgcctccggacctgtgggaaaggccctgagcgacgcatgtatgggcacaatcgcctccttcctgtctaagtaccaggacatcatcatcgaacaccagaaggtggtgaagggcaaccagaagagactggagagcctgcgggagctggccggcaaggaaaacctggaataccctagcgtgaccctgccacctcagcctcacaccaaggagggcgttgatgcctacaacgaagtgatcgcccgggtgcgaatgtgggtgaacctgaacctgtggcagaagctgaagctaagcagagatgatgccaagcctctgctgagactgaagggattcccttcctttcctctggtcgagagacaggccaacgaagtggactggtgggacatggtgtgtaacgtgaagaagctgatcaacgagaaaaaggaggatggcaaggtgttttggcagaatctggctggctacaagagacaggaagccctgagaccatacctgagcagcgaggaagatcggaagaagggaaagaaattcgctcggtaccagctgggcgacctgctgctgcacctggaaaagaagcacggcgaggactggggaaaggtgtacgacgaggcctgggagcggattgacaagaaagtggaaggcctgagcaagcacatcaagctggaagaggaacggagaagcgaggacgcccagagcaaggccgccctgaccgactggctgcgggctaaggccagcttcgtgatcgagggcctgaaggaggccgacaaggacgagttctgcagatgcgagctgaagctgcagaagtggtacggggacctgcggggaaagcccttcgccatcgaagccgagaacagcatcctggacatcagcggcttcagcaagcagtacaactgtgccttcatctggcagaaggacggcgtgaagaagctgaacctgtacctgatcatcaactacttcaagggcggcaagctgcggttcaagaagatcaaacctgaagccttcgaagccaacagattctacaccgtgatcaacaaaaagagcggcgagatcgtgcccatggaggtgaacttcaacttcgacgaccccaacctgatcatcctgcctctggcctttggcaagagacagggcagagaattcatctggaacgacctgctgtccctggaaaccggcagcctgaagctggccaacggaagagtgatcgagaagacactgtacaacagaagaacccggcaggatgagcctgccctgttcgtggccctgaccttcgagcggcgggaggtcctggactcctccaatatcaaaccaatgaacctgatcggcgtggcaagaggcgaaaacatccccgccgtgatcgccctgaccgaccccgagggctgcccactgagccggtttaaggatagcctgggaaacccaacccacatcctgagaatcggcgagagctataaggagaagcagcggaccatccaggccaagaaggaggtggagcagcggagagccggcggctacagccggaagtacgccagcaaagccaagaatctggcagacgatatggtgagaaacaccgctagagatctgctgtactacgccgtgacccaggatgccatgctgatcttcgccaacctgagccggggcttcggccggcagggcaagcggaccttcatggccgagagacagtacacacggatggaggactggctgaccgccaagctggcctacgagggcctgagcaagacctacctgtccaagacactggcccagtacacctccaagacatgcagcaactgtgggtttaccatcaccagcgccgactacgacagggtgctggagaagctgaagaagacagcaacaggctggatgaccacaattaacggcaaggagctgaaggtggagggccagattacctactacaacagatacaagagacagaacgtagtcaaggacctgtccgtcgagctggatagactgagcgaagaatctgtgaacaacgacatctcctcctggacaaagggcagaagcggagaagctctgagcctcctgaagaaaagattctcccatagacccgtgcaggagaagttcgtgtgcctgaactgcggcttcgagacacacgcagccgagcaagccgccctgaacatcgccagatcctggctgttcctgcggagccaggagtacaagaaataccagacaaacaagacaaccggcaacaccgataagagagccttcgtcgagacctggcagtccttttaccggaagaagcttaaggaggtgtggaaacctgccgtgcggtctggcggatctggcggaggctccacaagccccaggctgcccctgaccttcgaggacgtggccatctacttcagcgagcaggagtggcaggacctggaggcctggcagaaggagctgtacaagcacgtgatgaggagcaactacgagaccctggtgagcctggacgacggcctgcccaagcccgagctgatcagctggatcgagcacggcggcgagcccttcaggaactggagggagagccagaagagcaggaacatcatctgcagcagcagcaccagccccaagaaaaagagaaaagtctaagctgccttctgcggggcttgccttctggccatgcccttcttctctcccttgcacctgtacctcttggtctttgaataaagcctgagtaggaaggctagcaaaaaaaaaaaaaaaaaaaaaaaaaaaaaaaaaaaaaaaaaaaaaaaaaaaaaaaaaaaaaaaaaaaaaaaaaaaaaaaa

SEQ ID NO: 6612 - RNA, 5797 nt, synthetic construct
  source 1..5797: mol_type = other RNA
aggaaataagagagaaaagaagagtaagaagaaatataagagccaccatggcccctaagaagaagcgtaaagtgagccggatggaacgcctcgtctacgaggtgcggcagaagtgcagaaacatcgaggacatctgcatctcctgcggatctctgaacgtgaccctggagcacccactgttcatcggcggcatgtgccagaactgtaaaaactgttttctggagtgtgcctatcaatacgacgatgacggctaccagagctactgcaccatctgttgcggcggaagagaggtgctgatgtgtggaaataacaactgctgccggtgcttctgcgtggaatgcgtggacctgctggtgggccccggcgccgcccaggccgctattaaggaagatccttggaactgctacatgtgcggccacaagggcacatacggcctgctgagacggagagaggactggcctagcagactgcagatgttcttcgccaataaccacgaccaggagttcgacccccctaaggtgtaccctcccgtccccgccgagaagagaaagcccatccgggtcctgagcctgttcgatggcatcgccaccggtctgctggtgctgaaggacctgggcatccaggtggataggtacattgcctccgaggtgtgcgaggactccatcaccgtgggaatggtgcgtcatcagggcaagatcatgtacgtgggcgacgtgcggagcgtgacacagaagcatatccaggagtggggccctttcgacctggtgatcggcggcagcccttgcaatgacctgagcatcgtgaacccagcccggaagggcctgtacgagggaaccggcagactgttcttcgagttttacagactgctgcacgacgcccggcctaaggaaggcgacgaccggcccttcttttggctgttcgagaatgtggtggccatgggagtcagcgacaagcgggatattagccggttcctggagagcaaccccgtgatgatcgatgccaaggaagtgagcgccgcccaccgggccagatacttctggggcaatctgcctggcatgaacagacccctggccagcaccgtgaacgacaagctggagctgcaggagtgcctggagcacggccggatcgccaagttcagcaaggtgagaaccatcaccacccgaagcaacagcatcaaacaaggcaaggaccagcactttcctgtgttcatgaacgagaaggaggacatcctgtggtgtaccgagatggagagagtgttcgggttcccagtccactacacagatgtcagcaacatgtctagactggccagacagagactgctgggaagaagctggtccgtccctgtgatcagacacctgttcgcccctctgaaggagtacttcgcctgcgtgagcagcggcaacagcaacgccaacagccggggccccagcttctctagcggcctggtgccactgtccctgagagggagccacatgggccccatggagatctacaaaaccgtgagcgcctggaagcggcagcctgtgcgcgtgctgagcctgtttcggaatatcgataaagtcctgaaaagcctgggattcctggagagcggctctggctccggcggtggcaccctgaagtacgtggaggatgtgacaaacgtggtcagacgggatgtggagaagtggggccccttcgatctggtgtacggcagcacccaacccctgggcagctcttgtgaccggtgccctggctggtacatgtttcagttccaccggatcctgcagtacgccctgccgagacaggagtcccagcggccattcttttggattttcatggacaacttgctgctgaccgaggatgaccaggaaactaccactcggttcctgcagaccgaagccgtgaccctgcaggacgtgagaggccgggactaccagaacgccatgcgggtgtggtccaacatccctggactgaaaagcaagcacgcacctctgacccctaaagaagaggagtacctgcaggcccaggtgcggagcagaagcaagctggacgcccctaaggtggatctgctggtgaagaattgcctcctgcccctgagagagtacttcaagtatttcagccagaatagtctgcccctgggcggcccaagcagcggcgcccctcctcccagcggcggcagcccagccggctccccaacctctaccgaggagggcacctctgagtccgccacccccgagagcggccctggcacctccaccgagcccagcgagggcagcgcacccggcagccctgccggcagccccacctccacagaggagggaaccagcaccgagcccagcgaaggcagcgccccaggcaccagcaccgagcctagtgagggcggctctggcggcggcagcgcccaggagattaaacggatcaacaagatcagaagaagacttgtgaaagacagcaacaccaagaaggccggcaagacaggccccatgaaaaccctgctggttagagtgatgacacccgatctgagagagcggctggaaaacctgagaaagaagcctgaaaatatcccccagcccatcagcaatacatctagagccaacctgaataagctgctgaccgattacaccgaaatgaagaaggcgatcctgcatgtgtactgggaagagttccagaaggaccctgtgggcctgatgagccgggtggcccagcctgccagcaagaagatcgatcagaacaagctgaaacctgagatggacgagaagggcaacctgaccaccgccggctttgcctgctctcagtgtggccagcccctgttcgtgtacaagctggagcaggtgtctgagaagggcaaggcttacaccaactacttcggacggtgcaatgtggccgagcacgaaaagctgatcctgctggcccagctgaagcccgagaaggatagcgacgaagccgtgacatatagcctgggaaagtttgggcagagggccctggatttctacagcattcatgtgaccaaggagtccacccaccccgtgaagcccctggcccagatcgccggaaacagatacgcctccggacctgtgggaaaggccctgagcgacgcatgtatgggcacaatcgcctccttcctgtctaagtaccaggacatcatcatcgaacaccagaaggtggtgaagggcaaccagaagagactggagagcctgcgggagctggccggcaaggaaaacctggaataccctagcgtgaccctgccacctcagcctcacaccaaggagggcgttgatgcctacaacgaagtgatcgcccgggtgcgaatgtgggtgaacctgaacctgtggcagaagctgaagctaagcagagatgatgccaagcctctgctgagactgaagggattcccttcctttcctctggtcgagagacaggccaacgaagtggactggtgggacatggtgtgtaacgtgaagaagctgatcaacgagaaaaaggaggatggcaaggtgttttggcagaatctggctggctacaagagacaggaagccctgagaccatacctgagcagcgaggaagatcggaagaagggaaagaaattcgctcggtaccagctgggcgacctgctgctgcacctggaaaagaagcacggcgaggactggggaaaggtgtacgacgaggcctgggagcggattgacaagaaagtggaaggcctgagcaagcacatcaagctggaagaggaacggagaagcgaggacgcccagagcaaggccgccctgaccgactggctgcgggctaaggccagcttcgtgatcgagggcctgaaggaggccgacaaggacgagttctgcagatgcgagctgaagctgcagaagtggtacggggacctgcggggaaagcccttcgccatcgaagccgagaacagcatcctggacatcagcggcttcagcaagcagtacaactgtgccttcatctggcagaaggacggcgtgaagaagctgaacctgtacctgatcatcaactacttcaagggcggcaagctgcggttcaagaagatcaaacctgaagccttcgaagccaacagattctacaccgtgatcaacaaaaagagcggcgagatcgtgcccatggaggtgaacttcaacttcgacgaccccaacctgatcatcctgcctctggcctttggcaagagacagggcagagaattcatctggaacgacctgctgtccctggaaaccggcagcctgaagctggccaacggaagagtgatcgagaagacactgtacaacagaagaacccggcaggatgagcctgccctgttcgtggccctgaccttcgagcggcgggaggtcctggactcctccaatatcaaaccaatgaacctgatcggcgtggcaagaggcgaaaacatccccgccgtgatcgccctgaccgaccccgagggctgcccactgagccggtttaaggatagcctgggaaacccaacccacatcctgagaatcggcgagagctataaggagaagcagcggaccatccaggccaagaaggaggtggagcagcggagagccggcggctacagccggaagtacgccagcaaagccaagaatctggcagacgatatggtgagaaacaccgctagagatctgctgtactacgccgtgacccaggatgccatgctgatcttcgccaacctgagccggggcttcggccggcagggcaagcggaccttcatggccgagagacagtacacacggatggaggactggctgaccgccaagctggcctacgagggcctgagcaagacctacctgtccaagacactggcccagtacacctccaagacatgcagcaactgtgggtttaccatcaccagcgccgactacgacagggtgctggagaagctgaagaagacagcaacaggctggatgaccacaattaacggcaaggagctgaaggtggagggccagattacctactacaacagatacaagagacagaacgtagtcaaggacctgtccgtcgagctggatagactgagcgaagaatctgtgaacaacgacatctcctcctggacaaagggcagaagcggagaagctctgagcctcctgaagaaaagattctcccatagacccgtgcaggagaagttcgtgtgcctgaactgcggcttcgagacacacgcagccgagcaagccgccctgaacatcgccagatcctggctgttcctgcggagccaggagtacaagaaataccagacaaacaagacaaccggcaacaccgataagagagccttcgtcgagacctggcagtccttttaccggaagaagcttaaggaggtgtggaaacctgccgtgcggtctggcggatctggcggaggctccacaagcatgagccagggcagcgtgaccttcagggacgtggccatcgacttcagccaggaggagtggaagtggctgcagcccgcccagagggacctgtacaggtgcgtgatgctggagaactacggccacctggtgagcctgggcctgagcatcagcaagcccgacgtggtgagcctgctggagcagggcaaggagccctggctgggcaagagggacgtgaagagggacctgttccccgtgagcgagagcaccagccccaagaaaaagagaaaagtctaagctgccttctgcggggcttgccttctggccatgcccttcttctctcccttgcacctgtacctcttggtctttgaataaagcctgagtaggaaggctagcaaaaaaaaaaaaaaaaaaaaaaaaaaaaaaaaaaaaaaaaaaaaaaaaaaaaaaaaaaaaaaaaaaaaaaaaaaaaaaaa

SEQ ID NO: 6613 - RNA, 5797 nt, synthetic construct
  source 1..5797: mol_type = other RNA
aggaaataagagagaaaagaagagtaagaagaaatataagagccaccatggcccctaagaagaagcgtaaagtgagccggatggaacgcctcgtctacgaggtgcggcagaagtgcagaaacatcgaggacatctgcatctcctgcggatctctgaacgtgaccctggagcacccactgttcatcggcggcatgtgccagaactgtaaaaactgttttctggagtgtgcctatcaatacgacgatgacggctaccagagctactgcaccatctgttgcggcggaagagaggtgctgatgtgtggaaataacaactgctgccggtgcttctgcgtggaatgcgtggacctgctggtgggccccggcgccgcccaggccgctattaaggaagatccttggaactgctacatgtgcggccacaagggcacatacggcctgctgagacggagagaggactggcctagcagactgcagatgttcttcgccaataaccacgaccaggagttcgacccccctaaggtgtaccctcccgtccccgccgagaagagaaagcccatccgggtcctgagcctgttcgatggcatcgccaccggtctgctggtgctgaaggacctgggcatccaggtggataggtacattgcctccgaggtgtgcgaggactccatcaccgtgggaatggtgcgtcatcagggcaagatcatgtacgtgggcgacgtgcggagcgtgacacagaagcatatccaggagtggggccctttcgacctggtgatcggcggcagcccttgcaatgacctgagcatcgtgaacccagcccggaagggcctgtacgagggaaccggcagactgttcttcgagttttacagactgctgcacgacgcccggcctaaggaaggcgacgaccggcccttcttttggctgttcgagaatgtggtggccatgggagtcagcgacaagcgggatattagccggttcctggagagcaaccccgtgatgatcgatgccaaggaagtgagcgccgcccaccgggccagatacttctggggcaatctgcctggcatgaacagacccctggccagcaccgtgaacgacaagctggagctgcaggagtgcctggagcacggccggatcgccaagttcagcaaggtgagaaccatcaccacccgaagcaacagcatcaaacaaggcaaggaccagcactttcctgtgttcatgaacgagaaggaggacatcctgtggtgtaccgagatggagagagtgttcgggttcccagtccactacacagatgtcagcaacatgtctagactggccagacagagactgctgggaagaagctggtccgtccctgtgatcagacacctgttcgcccctctgaaggagtacttcgcctgcgtgagcagcggcaacagcaacgccaacagccggggccccagcttctctagcggcctggtgccactgtccctgagagggagccacatgggccccatggagatctacaaaaccgtgagcgcctggaagcggcagcctgtgcgcgtgctgagcctgtttcggaatatcgataaagtcctgaaaagcctgggattcctggagagcggctctggctccggcggtggcaccctgaagtacgtggaggatgtgacaaacgtggtcagacgggatgtggagaagtggggccccttcgatctggtgtacggcagcacccaacccctgggcagctcttgtgaccggtgccctggctggtacatgtttcagttccaccggatcctgcagtacgccctgccgagacaggagtcccagcggccattcttttggattttcatggacaacttgctgctgaccgaggatgaccaggaaactaccactcggttcctgcagaccgaagccgtgaccctgcaggacgtgagaggccgggactaccagaacgccatgcgggtgtggtccaacatccctggactgaaaagcaagcacgcacctctgacccctaaagaagaggagtacctgcaggcccaggtgcggagcagaagcaagctggacgcccctaaggtggatctgctggtgaagaattgcctcctgcccctgagagagtacttcaagtatttcagccagaatagtctgcccctgggcggcccaagcagcggcgcccctcctcccagcggcggcagcccagccggctccccaacctctaccgaggagggcacctctgagtccgccacccccgagagcggccctggcacctccaccgagcccagcgagggcagcgcacccggcagccctgccggcagccccacctccacagaggagggaaccagcaccgagcccagcgaaggcagcgccccaggcaccagcaccgagcctagtgagggcggctctggcggcggcagcgcccaggagattaaacggatcaacaagatcagaagaagacttgtgaaagacagcaacaccaagaaggccggcaagacaggccccatgaaaaccctgctggttagagtgatgacacccgatctgagagagcggctggaaaacctgagaaagaagcctgaaaatatcccccagcccatcagcaatacatctagagccaacctgaataagctgctgaccgattacaccgaaatgaagaaggcgatcctgcatgtgtactgggaagagttccagaaggaccctgtgggcctgatgagccgggtggcccagcctgccagcaagaagatcgatcagaacaagctgaaacctgagatggacgagaagggcaacctgaccaccgccggctttgcctgctctcagtgtggccagcccctgttcgtgtacaagctggagcaggtgtctgagaagggcaaggcttacaccaactacttcggacggtgcaatgtggccgagcacgaaaagctgatcctgctggcccagctgaagcccgagaaggatagcgacgaagccgtgacatatagcctgggaaagtttgggcagagggccctggatttctacagcattcatgtgaccaaggagtccacccaccccgtgaagcccctggcccagatcgccggaaacagatacgcctccggacctgtgggaaaggccctgagcgacgcatgtatgggcacaatcgcctccttcctgtctaagtaccaggacatcatcatcgaacaccagaaggtggtgaagggcaaccagaagagactggagagcctgcgggagctggccggcaaggaaaacctggaataccctagcgtgaccctgccacctcagcctcacaccaaggagggcgttgatgcctacaacgaagtgatcgcccgggtgcgaatgtgggtgaacctgaacctgtggcagaagctgaagctaagcagagatgatgccaagcctctgctgagactgaagggattcccttcctttcctctggtcgagagacaggccaacgaagtggactggtgggacatggtgtgtaacgtgaagaagctgatcaacgagaaaaaggaggatggcaaggtgttttggcagaatctggctggctacaagagacaggaagccctgagaccatacctgagcagcgaggaagatcggaagaagggaaagaaattcgctcggtaccagctgggcgacctgctgctgcacctggaaaagaagcacggcgaggactggggaaaggtgtacgacgaggcctgggagcggattgacaagaaagtggaaggcctgagcaagcacatcaagctggaagaggaacggagaagcgaggacgcccagagcaaggccgccctgaccgactggctgcgggctaaggccagcttcgtgatcgagggcctgaaggaggccgacaaggacgagttctgcagatgcgagctgaagctgcagaagtggtacggggacctgcggggaaagcccttcgccatcgaagccgagaacagcatcctggacatcagcggcttcagcaagcagtacaactgtgccttcatctggcagaaggacggcgtgaagaagctgaacctgtacctgatcatcaactacttcaagggcggcaagctgcggttcaagaagatcaaacctgaagccttcgaagccaacagattctacaccgtgatcaacaaaaagagcggcgagatcgtgcccatggaggtgaacttcaacttcgacgaccccaacctgatcatcctgcctctggcctttggcaagagacagggcagagaattcatctggaacgacctgctgtccctggaaaccggcagcctgaagctggccaacggaagagtgatcgagaagacactgtacaacagaagaacccggcaggatgagcctgccctgttcgtggccctgaccttcgagcggcgggaggtcctggactcctccaatatcaaaccaatgaacctgatcggcgtggcaagaggcgaaaacatccccgccgtgatcgccctgaccgaccccgagggctgcccactgagccggtttaaggatagcctgggaaacccaacccacatcctgagaatcggcgagagctataaggagaagcagcggaccatccaggccaagaaggaggtggagcagcggagagccggcggctacagccggaagtacgccagcaaagccaagaatctggcagacgatatggtgagaaacaccgctagagatctgctgtactacgccgtgacccaggatgccatgctgatcttcgccaacctgagccggggcttcggccggcagggcaagcggaccttcatggccgagagacagtacacacggatggaggactggctgaccgccaagctggcctacgagggcctgagcaagacctacctgtccaagacactggcccagtacacctccaagacatgcagcaactgtgggtttaccatcaccagcgccgactacgacagggtgctggagaagctgaagaagacagcaacaggctggatgaccacaattaacggcaaggagctgaaggtggagggccagattacctactacaacagatacaagagacagaacgtagtcaaggacctgtccgtcgagctggatagactgagcgaagaatctgtgaacaacgacatctcctcctggacaaagggcagaagcggagaagctctgagcctcctgaagaaaagattctcccatagacccgtgcaggagaagttcgtgtgcctgaactgcggcttcgagacacacgcagccgagcaagccgccctgaacatcgccagatcctggctgttcctgcggagccaggagtacaagaaataccagacaaacaagacaaccggcaacaccgataagagagccttcgtcgagacctggcagtccttttaccggaagaagcttaaggaggtgtggaaacctgccgtgcggtctggcggatctggcggaggctccacaagcgtggccttcgaggacgtggccgtgaacttcacccaggaggagtgggccctgctggaccccagccagaagaacctgtacagggaggtgatgcaggagaccctgaggaacctggccagcatcggccagaggtggagcaaccagaacgccgaggacaagcaccagaaccccaggaggaacctgaggaggctgatcggcgagaggctgttccagagcaaggagagccaccagcacgtggaggtgctgaccagccccaagaaaaagagaaaagtctaagctgccttctgcggggcttgccttctggccatgcccttcttctctcccttgcacctgtacctcttggtctttgaataaagcctgagtaggaaggctagcaaaaaaaaaaaaaaaaaaaaaaaaaaaaaaaaaaaaaaaaaaaaaaaaaaaaaaaaaaaaaaaaaaaaaaaaaaaaaaaa

SEQ ID NO: 6614 - RNA, 5797 nt, synthetic construct
  source 1..5797: mol_type = other RNA
aggaaataagagagaaaagaagagtaagaagaaatataagagccaccatggcccctaagaagaagcgtaaagtgagccggatggaacgcctcgtctacgaggtgcggcagaagtgcagaaacatcgaggacatctgcatctcctgcggatctctgaacgtgaccctggagcacccactgttcatcggcggcatgtgccagaactgtaaaaactgttttctggagtgtgcctatcaatacgacgatgacggctaccagagctactgcaccatctgttgcggcggaagagaggtgctgatgtgtggaaataacaactgctgccggtgcttctgcgtggaatgcgtggacctgctggtgggccccggcgccgcccaggccgctattaaggaagatccttggaactgctacatgtgcggccacaagggcacatacggcctgctgagacggagagaggactggcctagcagactgcagatgttcttcgccaataaccacgaccaggagttcgacccccctaaggtgtaccctcccgtccccgccgagaagagaaagcccatccgggtcctgagcctgttcgatggcatcgccaccggtctgctggtgctgaaggacctgggcatccaggtggataggtacattgcctccgaggtgtgcgaggactccatcaccgtgggaatggtgcgtcatcagggcaagatcatgtacgtgggcgacgtgcggagcgtgacacagaagcatatccaggagtggggccctttcgacctggtgatcggcggcagcccttgcaatgacctgagcatcgtgaacccagcccggaagggcctgtacgagggaaccggcagactgttcttcgagttttacagactgctgcacgacgcccggcctaaggaaggcgacgaccggcccttcttttggctgttcgagaatgtggtggccatgggagtcagcgacaagcgggatattagccggttcctggagagcaaccccgtgatgatcgatgccaaggaagtgagcgccgcccaccgggccagatacttctggggcaatctgcctggcatgaacagacccctggccagcaccgtgaacgacaagctggagctgcaggagtgcctggagcacggccggatcgccaagttcagcaaggtgagaaccatcaccacccgaagcaacagcatcaaacaaggcaaggaccagcactttcctgtgttcatgaacgagaaggaggacatcctgtggtgtaccgagatggagagagtgttcgggttcccagtccactacacagatgtcagcaacatgtctagactggccagacagagactgctgggaagaagctggtccgtccctgtgatcagacacctgttcgcccctctgaaggagtacttcgcctgcgtgagcagcggcaacagcaacgccaacagccggggccccagcttctctagcggcctggtgccactgtccctgagagggagccacatgggccccatggagatctacaaaaccgtgagcgcctggaagcggcagcctgtgcgcgtgctgagcctgtttcggaatatcgataaagtcctgaaaagcctgggattcctggagagcggctctggctccggcggtggcaccctgaagtacgtggaggatgtgacaaacgtggtcagacgggatgtggagaagtggggccccttcgatctggtgtacggcagcacccaacccctgggcagctcttgtgaccggtgccctggctggtacatgtttcagttccaccggatcctgcagtacgccctgccgagacaggagtcccagcggccattcttttggattttcatggacaacttgctgctgaccgaggatgaccaggaaactaccactcggttcctgcagaccgaagccgtgaccctgcaggacgtgagaggccgggactaccagaacgccatgcgggtgtggtccaacatccctggactgaaaagcaagcacgcacctctgacccctaaagaagaggagtacctgcaggcccaggtgcggagcagaagcaagctggacgcccctaaggtggatctgctggtgaagaattgcctcctgcccctgagagagtacttcaagtatttcagccagaatagtctgcccctgggcggcccaagcagcggcgcccctcctcccagcggcggcagcccagccggctccccaacctctaccgaggagggcacctctgagtccgccacccccgagagcggccctggcacctccaccgagcccagcgagggcagcgcacccggcagccctgccggcagccccacctccacagaggagggaaccagcaccgagcccagcgaaggcagcgccccaggcaccagcaccgagcctagtgagggcggctctggcggcggcagcgcccaggagattaaacggatcaacaagatcagaagaagacttgtgaaagacagcaacaccaagaaggccggcaagacaggccccatgaaaaccctgctggttagagtgatgacacccgatctgagagagcggctggaaaacctgagaaagaagcctgaaaatatcccccagcccatcagcaatacatctagagccaacctgaataagctgctgaccgattacaccgaaatgaagaaggcgatcctgcatgtgtactgggaagagttccagaaggaccctgtgggcctgatgagccgggtggcccagcctgccagcaagaagatcgatcagaacaagctgaaacctgagatggacgagaagggcaacctgaccaccgccggctttgcctgctctcagtgtggccagcccctgttcgtgtacaagctggagcaggtgtctgagaagggcaaggcttacaccaactacttcggacggtgcaatgtggccgagcacgaaaagctgatcctgctggcccagctgaagcccgagaaggatagcgacgaagccgtgacatatagcctgggaaagtttgggcagagggccctggatttctacagcattcatgtgaccaaggagtccacccaccccgtgaagcccctggcccagatcgccggaaacagatacgcctccggacctgtgggaaaggccctgagcgacgcatgtatgggcacaatcgcctccttcctgtctaagtaccaggacatcatcatcgaacaccagaaggtggtgaagggcaaccagaagagactggagagcctgcgggagctggccggcaaggaaaacctggaataccctagcgtgaccctgccacctcagcctcacaccaaggagggcgttgatgcctacaacgaagtgatcgcccgggtgcgaatgtgggtgaacctgaacctgtggcagaagctgaagctaagcagagatgatgccaagcctctgctgagactgaagggattcccttcctttcctctggtcgagagacaggccaacgaagtggactggtgggacatggtgtgtaacgtgaagaagctgatcaacgagaaaaaggaggatggcaaggtgttttggcagaatctggctggctacaagagacaggaagccctgagaccatacctgagcagcgaggaagatcggaagaagggaaagaaattcgctcggtaccagctgggcgacctgctgctgcacctggaaaagaagcacggcgaggactggggaaaggtgtacgacgaggcctgggagcggattgacaagaaagtggaaggcctgagcaagcacatcaagctggaagaggaacggagaagcgaggacgcccagagcaaggccgccctgaccgactggctgcgggctaaggccagcttcgtgatcgagggcctgaaggaggccgacaaggacgagttctgcagatgcgagctgaagctgcagaagtggtacggggacctgcggggaaagcccttcgccatcgaagccgagaacagcatcctggacatcagcggcttcagcaagcagtacaactgtgccttcatctggcagaaggacggcgtgaagaagctgaacctgtacctgatcatcaactacttcaagggcggcaagctgcggttcaagaagatcaaacctgaagccttcgaagccaacagattctacaccgtgatcaacaaaaagagcggcgagatcgtgcccatggaggtgaacttcaacttcgacgaccccaacctgatcatcctgcctctggcctttggcaagagacagggcagagaattcatctggaacgacctgctgtccctggaaaccggcagcctgaagctggccaacggaagagtgatcgagaagacactgtacaacagaagaacccggcaggatgagcctgccctgttcgtggccctgaccttcgagcggcgggaggtcctggactcctccaatatcaaaccaatgaacctgatcggcgtggcaagaggcgaaaacatccccgccgtgatcgccctgaccgaccccgagggctgcccactgagccggtttaaggatagcctgggaaacccaacccacatcctgagaatcggcgagagctataaggagaagcagcggaccatccaggccaagaaggaggtggagcagcggagagccggcggctacagccggaagtacgccagcaaagccaagaatctggcagacgatatggtgagaaacaccgctagagatctgctgtactacgccgtgacccaggatgccatgctgatcttcgccaacctgagccggggcttcggccggcagggcaagcggaccttcatggccgagagacagtacacacggatggaggactggctgaccgccaagctggcctacgagggcctgagcaagacctacctgtccaagacactggcccagtacacctccaagacatgcagcaactgtgggtttaccatcaccagcgccgactacgacagggtgctggagaagctgaagaagacagcaacaggctggatgaccacaattaacggcaaggagctgaaggtggagggccagattacctactacaacagatacaagagacagaacgtagtcaaggacctgtccgtcgagctggatagactgagcgaagaatctgtgaacaacgacatctcctcctggacaaagggcagaagcggagaagctctgagcctcctgaagaaaagattctcccatagacccgtgcaggagaagttcgtgtgcctgaactgcggcttcgagacacacgcagccgagcaagccgccctgaacatcgccagatcctggctgttcctgcggagccaggagtacaagaaataccagacaaacaagacaaccggcaacaccgataagagagccttcgtcgagacctggcagtccttttaccggaagaagcttaaggaggtgtggaaacctgccgtgcggtctggcggatctggcggaggctccacaagcgtggaggagcccgtgaccttcaaggacgtggccgtggccttcacccaggaggagtggggccagctggacctggtgcagaggaccctgtacagggacgtgatgctggagacctacggccacctgctgagcgtgggcaaccagatcgccaagcccgaggtgatcagcctgctggagcagggcgaggagccctggagcgtggagcagggctaccccaagagcagctgccccgagtggatgaggaacaccagccccaagaaaaagagaaaagtctaagctgccttctgcggggcttgccttctggccatgcccttcttctctcccttgcacctgtacctcttggtctttgaataaagcctgagtaggaaggctagcaaaaaaaaaaaaaaaaaaaaaaaaaaaaaaaaaaaaaaaaaaaaaaaaaaaaaaaaaaaaaaaaaaaaaaaaaaaaaaaa

SEQ ID NO: 6615 - RNA, 5797 nt, synthetic construct
  source 1..5797: mol_type = other RNA
aggaaataagagagaaaagaagagtaagaagaaatataagagccaccatggcccctaagaagaagcgtaaagtgagccggatggaacgcctcgtctacgaggtgcggcagaagtgcagaaacatcgaggacatctgcatctcctgcggatctctgaacgtgaccctggagcacccactgttcatcggcggcatgtgccagaactgtaaaaactgttttctggagtgtgcctatcaatacgacgatgacggctaccagagctactgcaccatctgttgcggcggaagagaggtgctgatgtgtggaaataacaactgctgccggtgcttctgcgtggaatgcgtggacctgctggtgggccccggcgccgcccaggccgctattaaggaagatccttggaactgctacatgtgcggccacaagggcacatacggcctgctgagacggagagaggactggcctagcagactgcagatgttcttcgccaataaccacgaccaggagttcgacccccctaaggtgtaccctcccgtccccgccgagaagagaaagcccatccgggtcctgagcctgttcgatggcatcgccaccggtctgctggtgctgaaggacctgggcatccaggtggataggtacattgcctccgaggtgtgcgaggactccatcaccgtgggaatggtgcgtcatcagggcaagatcatgtacgtgggcgacgtgcggagcgtgacacagaagcatatccaggagtggggccctttcgacctggtgatcggcggcagcccttgcaatgacctgagcatcgtgaacccagcccggaagggcctgtacgagggaaccggcagactgttcttcgagttttacagactgctgcacgacgcccggcctaaggaaggcgacgaccggcccttcttttggctgttcgagaatgtggtggccatgggagtcagcgacaagcgggatattagccggttcctggagagcaaccccgtgatgatcgatgccaaggaagtgagcgccgcccaccgggccagatacttctggggcaatctgcctggcatgaacagacccctggccagcaccgtgaacgacaagctggagctgcaggagtgcctggagcacggccggatcgccaagttcagcaaggtgagaaccatcaccacccgaagcaacagcatcaaacaaggcaaggaccagcactttcctgtgttcatgaacgagaaggaggacatcctgtggtgtaccgagatggagagagtgttcgggttcccagtccactacacagatgtcagcaacatgtctagactggccagacagagactgctgggaagaagctggtccgtccctgtgatcagacacctgttcgcccctctgaaggagtacttcgcctgcgtgagcagcggcaacagcaacgccaacagccggggccccagcttctctagcggcctggtgccactgtccctgagagggagccacatgggccccatggagatctacaaaaccgtgagcgcctggaagcggcagcctgtgcgcgtgctgagcctgtttcggaatatcgataaagtcctgaaaagcctgggattcctggagagcggctctggctccggcggtggcaccctgaagtacgtggaggatgtgacaaacgtggtcagacgggatgtggagaagtggggccccttcgatctggtgtacggcagcacccaacccctgggcagctcttgtgaccggtgccctggctggtacatgtttcagttccaccggatcctgcagtacgccctgccgagacaggagtcccagcggccattcttttggattttcatggacaacttgctgctgaccgaggatgaccaggaaactaccactcggttcctgcagaccgaagccgtgaccctgcaggacgtgagaggccgggactaccagaacgccatgcgggtgtggtccaacatccctggactgaaaagcaagcacgcacctctgacccctaaagaagaggagtacctgcaggcccaggtgcggagcagaagcaagctggacgcccctaaggtggatctgctggtgaagaattgcctcctgcccctgagagagtacttcaagtatttcagccagaatagtctgcccctgggcggcccaagcagcggcgcccctcctcccagcggcggcagcccagccggctccccaacctctaccgaggagggcacctctgagtccgccacccccgagagcggccctggcacctccaccgagcccagcgagggcagcgcacccggcagccctgccggcagccccacctccacagaggagggaaccagcaccgagcccagcgaaggcagcgccccaggcaccagcaccgagcctagtgagggcggctctggcggcggcagcgcccaggagattaaacggatcaacaagatcagaagaagacttgtgaaagacagcaacaccaagaaggccggcaagacaggccccatgaaaaccctgctggttagagtgatgacacccgatctgagagagcggctggaaaacctgagaaagaagcctgaaaatatcccccagcccatcagcaatacatctagagccaacctgaataagctgctgaccgattacaccgaaatgaagaaggcgatcctgcatgtgtactgggaagagttccagaaggaccctgtgggcctgatgagccgggtggcccagcctgccagcaagaagatcgatcagaacaagctgaaacctgagatggacgagaagggcaacctgaccaccgccggctttgcctgctctcagtgtggccagcccctgttcgtgtacaagctggagcaggtgtctgagaagggcaaggcttacaccaactacttcggacggtgcaatgtggccgagcacgaaaagctgatcctgctggcccagctgaagcccgagaaggatagcgacgaagccgtgacatatagcctgggaaagtttgggcagagggccctggatttctacagcattcatgtgaccaaggagtccacccaccccgtgaagcccctggcccagatcgccggaaacagatacgcctccggacctgtgggaaaggccctgagcgacgcatgtatgggcacaatcgcctccttcctgtctaagtaccaggacatcatcatcgaacaccagaaggtggtgaagggcaaccagaagagactggagagcctgcgggagctggccggcaaggaaaacctggaataccctagcgtgaccctgccacctcagcctcacaccaaggagggcgttgatgcctacaacgaagtgatcgcccgggtgcgaatgtgggtgaacctgaacctgtggcagaagctgaagctaagcagagatgatgccaagcctctgctgagactgaagggattcccttcctttcctctggtcgagagacaggccaacgaagtggactggtgggacatggtgtgtaacgtgaagaagctgatcaacgagaaaaaggaggatggcaaggtgttttggcagaatctggctggctacaagagacaggaagccctgagaccatacctgagcagcgaggaagatcggaagaagggaaagaaattcgctcggtaccagctgggcgacctgctgctgcacctggaaaagaagcacggcgaggactggggaaaggtgtacgacgaggcctgggagcggattgacaagaaagtggaaggcctgagcaagcacatcaagctggaagaggaacggagaagcgaggacgcccagagcaaggccgccctgaccgactggctgcgggctaaggccagcttcgtgatcgagggcctgaaggaggccgacaaggacgagttctgcagatgcgagctgaagctgcagaagtggtacggggacctgcggggaaagcccttcgccatcgaagccgagaacagcatcctggacatcagcggcttcagcaagcagtacaactgtgccttcatctggcagaaggacggcgtgaagaagctgaacctgtacctgatcatcaactacttcaagggcggcaagctgcggttcaagaagatcaaacctgaagccttcgaagccaacagattctacaccgtgatcaacaaaaagagcggcgagatcgtgcccatggaggtgaacttcaacttcgacgaccccaacctgatcatcctgcctctggcctttggcaagagacagggcagagaattcatctggaacgacctgctgtccctggaaaccggcagcctgaagctggccaacggaagagtgatcgagaagacactgtacaacagaagaacccggcaggatgagcctgccctgttcgtggccctgaccttcgagcggcgggaggtcctggactcctccaatatcaaaccaatgaacctgatcggcgtggcaagaggcgaaaacatccccgccgtgatcgccctgaccgaccccgagggctgcccactgagccggtttaaggatagcctgggaaacccaacccacatcctgagaatcggcgagagctataaggagaagcagcggaccatccaggccaagaaggaggtggagcagcggagagccggcggctacagccggaagtacgccagcaaagccaagaatctggcagacgatatggtgagaaacaccgctagagatctgctgtactacgccgtgacccaggatgccatgctgatcttcgccaacctgagccggggcttcggccggcagggcaagcggaccttcatggccgagagacagtacacacggatggaggactggctgaccgccaagctggcctacgagggcctgagcaagacctacctgtccaagacactggcccagtacacctccaagacatgcagcaactgtgggtttaccatcaccagcgccgactacgacagggtgctggagaagctgaagaagacagcaacaggctggatgaccacaattaacggcaaggagctgaaggtggagggccagattacctactacaacagatacaagagacagaacgtagtcaaggacctgtccgtcgagctggatagactgagcgaagaatctgtgaacaacgacatctcctcctggacaaagggcagaagcggagaagctctgagcctcctgaagaaaagattctcccatagacccgtgcaggagaagttcgtgtgcctgaactgcggcttcgagacacacgcagccgagcaagccgccctgaacatcgccagatcctggctgttcctgcggagccaggagtacaagaaataccagacaaacaagacaaccggcaacaccgataagagagccttcgtcgagacctggcagtccttttaccggaagaagcttaaggaggtgtggaaacctgccgtgcggtctggcggatctggcggaggctccacaagctgcgaggtgagcgtgagcttcgaggacgtgaccgtggacttcagcagggaggagtggcagcacctggaccccgcccagaggaggctgtacagggacgtgaccctggagaactacagccacctgtgcagcgtgggctaccaggtgcccaagcccgaggtgatcttcaagctggagcagggcgagggcccctggaccctggaggaggagaccccccaccagagctgcagcgacgaggacatgggcaccagccccaagaaaaagagaaaagtctaagctgccttctgcggggcttgccttctggccatgcccttcttctctcccttgcacctgtacctcttggtctttgaataaagcctgagtaggaaggctagcaaaaaaaaaaaaaaaaaaaaaaaaaaaaaaaaaaaaaaaaaaaaaaaaaaaaaaaaaaaaaaaaaaaaaaaaaaaaaaaa

SEQ ID NO: 6616 - RNA, 5797 nt, synthetic construct
  source 1..5797: mol_type = other RNA
aggaaataagagagaaaagaagagtaagaagaaatataagagccaccatggcccctaagaagaagcgtaaagtgagccggatggaacgcctcgtctacgaggtgcggcagaagtgcagaaacatcgaggacatctgcatctcctgcggatctctgaacgtgaccctggagcacccactgttcatcggcggcatgtgccagaactgtaaaaactgttttctggagtgtgcctatcaatacgacgatgacggctaccagagctactgcaccatctgttgcggcggaagagaggtgctgatgtgtggaaataacaactgctgccggtgcttctgcgtggaatgcgtggacctgctggtgggccccggcgccgcccaggccgctattaaggaagatccttggaactgctacatgtgcggccacaagggcacatacggcctgctgagacggagagaggactggcctagcagactgcagatgttcttcgccaataaccacgaccaggagttcgacccccctaaggtgtaccctcccgtccccgccgagaagagaaagcccatccgggtcctgagcctgttcgatggcatcgccaccggtctgctggtgctgaaggacctgggcatccaggtggataggtacattgcctccgaggtgtgcgaggactccatcaccgtgggaatggtgcgtcatcagggcaagatcatgtacgtgggcgacgtgcggagcgtgacacagaagcatatccaggagtggggccctttcgacctggtgatcggcggcagcccttgcaatgacctgagcatcgtgaacccagcccggaagggcctgtacgagggaaccggcagactgttcttcgagttttacagactgctgcacgacgcccggcctaaggaaggcgacgaccggcccttcttttggctgttcgagaatgtggtggccatgggagtcagcgacaagcgggatattagccggttcctggagagcaaccccgtgatgatcgatgccaaggaagtgagcgccgcccaccgggccagatacttctggggcaatctgcctggcatgaacagacccctggccagcaccgtgaacgacaagctggagctgcaggagtgcctggagcacggccggatcgccaagttcagcaaggtgagaaccatcaccacccgaagcaacagcatcaaacaaggcaaggaccagcactttcctgtgttcatgaacgagaaggaggacatcctgtggtgtaccgagatggagagagtgttcgggttcccagtccactacacagatgtcagcaacatgtctagactggccagacagagactgctgggaagaagctggtccgtccctgtgatcagacacctgttcgcccctctgaaggagtacttcgcctgcgtgagcagcggcaacagcaacgccaacagccggggccccagcttctctagcggcctggtgccactgtccctgagagggagccacatgggccccatggagatctacaaaaccgtgagcgcctggaagcggcagcctgtgcgcgtgctgagcctgtttcggaatatcgataaagtcctgaaaagcctgggattcctggagagcggctctggctccggcggtggcaccctgaagtacgtggaggatgtgacaaacgtggtcagacgggatgtggagaagtggggccccttcgatctggtgtacggcagcacccaacccctgggcagctcttgtgaccggtgccctggctggtacatgtttcagttccaccggatcctgcagtacgccctgccgagacaggagtcccagcggccattcttttggattttcatggacaacttgctgctgaccgaggatgaccaggaaactaccactcggttcctgcagaccgaagccgtgaccctgcaggacgtgagaggccgggactaccagaacgccatgcgggtgtggtccaacatccctggactgaaaagcaagcacgcacctctgacccctaaagaagaggagtacctgcaggcccaggtgcggagcagaagcaagctggacgcccctaaggtggatctgctggtgaagaattgcctcctgcccctgagagagtacttcaagtatttcagccagaatagtctgcccctgggcggcccaagcagcggcgcccctcctcccagcggcggcagcccagccggctccccaacctctaccgaggagggcacctctgagtccgccacccccgagagcggccctggcacctccaccgagcccagcgagggcagcgcacccggcagccctgccggcagccccacctccacagaggagggaaccagcaccgagcccagcgaaggcagcgccccaggcaccagcaccgagcctagtgagggcggctctggcggcggcagcgcccaggagattaaacggatcaacaagatcagaagaagacttgtgaaagacagcaacaccaagaaggccggcaagacaggccccatgaaaaccctgctggttagagtgatgacacccgatctgagagagcggctggaaaacctgagaaagaagcctgaaaatatcccccagcccatcagcaatacatctagagccaacctgaataagctgctgaccgattacaccgaaatgaagaaggcgatcctgcatgtgtactgggaagagttccagaaggaccctgtgggcctgatgagccgggtggcccagcctgccagcaagaagatcgatcagaacaagctgaaacctgagatggacgagaagggcaacctgaccaccgccggctttgcctgctctcagtgtggccagcccctgttcgtgtacaagctggagcaggtgtctgagaagggcaaggcttacaccaactacttcggacggtgcaatgtggccgagcacgaaaagctgatcctgctggcccagctgaagcccgagaaggatagcgacgaagccgtgacatatagcctgggaaagtttgggcagagggccctggatttctacagcattcatgtgaccaaggagtccacccaccccgtgaagcccctggcccagatcgccggaaacagatacgcctccggacctgtgggaaaggccctgagcgacgcatgtatgggcacaatcgcctccttcctgtctaagtaccaggacatcatcatcgaacaccagaaggtggtgaagggcaaccagaagagactggagagcctgcgggagctggccggcaaggaaaacctggaataccctagcgtgaccctgccacctcagcctcacaccaaggagggcgttgatgcctacaacgaagtgatcgcccgggtgcgaatgtgggtgaacctgaacctgtggcagaagctgaagctaagcagagatgatgccaagcctctgctgagactgaagggattcccttcctttcctctggtcgagagacaggccaacgaagtggactggtgggacatggtgtgtaacgtgaagaagctgatcaacgagaaaaaggaggatggcaaggtgttttggcagaatctggctggctacaagagacaggaagccctgagaccatacctgagcagcgaggaagatcggaagaagggaaagaaattcgctcggtaccagctgggcgacctgctgctgcacctggaaaagaagcacggcgaggactggggaaaggtgtacgacgaggcctgggagcggattgacaagaaagtggaaggcctgagcaagcacatcaagctggaagaggaacggagaagcgaggacgcccagagcaaggccgccctgaccgactggctgcgggctaaggccagcttcgtgatcgagggcctgaaggaggccgacaaggacgagttctgcagatgcgagctgaagctgcagaagtggtacggggacctgcggggaaagcccttcgccatcgaagccgagaacagcatcctggacatcagcggcttcagcaagcagtacaactgtgccttcatctggcagaaggacggcgtgaagaagctgaacctgtacctgatcatcaactacttcaagggcggcaagctgcggttcaagaagatcaaacctgaagccttcgaagccaacagattctacaccgtgatcaacaaaaagagcggcgagatcgtgcccatggaggtgaacttcaacttcgacgaccccaacctgatcatcctgcctctggcctttggcaagagacagggcagagaattcatctggaacgacctgctgtccctggaaaccggcagcctgaagctggccaacggaagagtgatcgagaagacactgtacaacagaagaacccggcaggatgagcctgccctgttcgtggccctgaccttcgagcggcgggaggtcctggactcctccaatatcaaaccaatgaacctgatcggcgtggcaagaggcgaaaacatccccgccgtgatcgccctgaccgaccccgagggctgcccactgagccggtttaaggatagcctgggaaacccaacccacatcctgagaatcggcgagagctataaggagaagcagcggaccatccaggccaagaaggaggtggagcagcggagagccggcggctacagccggaagtacgccagcaaagccaagaatctggcagacgatatggtgagaaacaccgctagagatctgctgtactacgccgtgacccaggatgccatgctgatcttcgccaacctgagccggggcttcggccggcagggcaagcggaccttcatggccgagagacagtacacacggatggaggactggctgaccgccaagctggcctacgagggcctgagcaagacctacctgtccaagacactggcccagtacacctccaagacatgcagcaactgtgggtttaccatcaccagcgccgactacgacagggtgctggagaagctgaagaagacagcaacaggctggatgaccacaattaacggcaaggagctgaaggtggagggccagattacctactacaacagatacaagagacagaacgtagtcaaggacctgtccgtcgagctggatagactgagcgaagaatctgtgaacaacgacatctcctcctggacaaagggcagaagcggagaagctctgagcctcctgaagaaaagattctcccatagacccgtgcaggagaagttcgtgtgcctgaactgcggcttcgagacacacgcagccgagcaagccgccctgaacatcgccagatcctggctgttcctgcggagccaggagtacaagaaataccagacaaacaagacaaccggcaacaccgataagagagccttcgtcgagacctggcagtccttttaccggaagaagcttaaggaggtgtggaaacctgccgtgcggtctggcggatctggcggaggctccacaagcttcggcaacctgctgggcgtgccctgggcccagggcaacagcgccctgcccgagggcctgctgagcttcaaggacatcagcatggagttcacctgggacgagtggcagctgctggacagcacccagaagtacctgtacagggacgtgatcctggagaactaccacaacctgatcagcgtgggctaccacggcaccaagcccgacctgatcttcaagctggagcagggcgaggacccctggatcaccagccccaagaaaaagagaaaagtctaagctgccttctgcggggcttgccttctggccatgcccttcttctctcccttgcacctgtacctcttggtctttgaataaagcctgagtaggaaggctagcaaaaaaaaaaaaaaaaaaaaaaaaaaaaaaaaaaaaaaaaaaaaaaaaaaaaaaaaaaaaaaaaaaaaaaaaaaaaaaaa

SEQ ID NO: 6617 - RNA, 5797 nt, synthetic construct
  source 1..5797: mol_type = other RNA
aggaaataagagagaaaagaagagtaagaagaaatataagagccaccatggcccctaagaagaagcgtaaagtgagccggatggaacgcctcgtctacgaggtgcggcagaagtgcagaaacatcgaggacatctgcatctcctgcggatctctgaacgtgaccctggagcacccactgttcatcggcggcatgtgccagaactgtaaaaactgttttctggagtgtgcctatcaatacgacgatgacggctaccagagctactgcaccatctgttgcggcggaagagaggtgctgatgtgtggaaataacaactgctgccggtgcttctgcgtggaatgcgtggacctgctggtgggccccggcgccgcccaggccgctattaaggaagatccttggaactgctacatgtgcggccacaagggcacatacggcctgctgagacggagagaggactggcctagcagactgcagatgttcttcgccaataaccacgaccaggagttcgacccccctaaggtgtaccctcccgtccccgccgagaagagaaagcccatccgggtcctgagcctgttcgatggcatcgccaccggtctgctggtgctgaaggacctgggcatccaggtggataggtacattgcctccgaggtgtgcgaggactccatcaccgtgggaatggtgcgtcatcagggcaagatcatgtacgtgggcgacgtgcggagcgtgacacagaagcatatccaggagtggggccctttcgacctggtgatcggcggcagcccttgcaatgacctgagcatcgtgaacccagcccggaagggcctgtacgagggaaccggcagactgttcttcgagttttacagactgctgcacgacgcccggcctaaggaaggcgacgaccggcccttcttttggctgttcgagaatgtggtggccatgggagtcagcgacaagcgggatattagccggttcctggagagcaaccccgtgatgatcgatgccaaggaagtgagcgccgcccaccgggccagatacttctggggcaatctgcctggcatgaacagacccctggccagcaccgtgaacgacaagctggagctgcaggagtgcctggagcacggccggatcgccaagttcagcaaggtgagaaccatcaccacccgaagcaacagcatcaaacaaggcaaggaccagcactttcctgtgttcatgaacgagaaggaggacatcctgtggtgtaccgagatggagagagtgttcgggttcccagtccactacacagatgtcagcaacatgtctagactggccagacagagactgctgggaagaagctggtccgtccctgtgatcagacacctgttcgcccctctgaaggagtacttcgcctgcgtgagcagcggcaacagcaacgccaacagccggggccccagcttctctagcggcctggtgccactgtccctgagagggagccacatgggccccatggagatctacaaaaccgtgagcgcctggaagcggcagcctgtgcgcgtgctgagcctgtttcggaatatcgataaagtcctgaaaagcctgggattcctggagagcggctctggctccggcggtggcaccctgaagtacgtggaggatgtgacaaacgtggtcagacgggatgtggagaagtggggccccttcgatctggtgtacggcagcacccaacccctgggcagctcttgtgaccggtgccctggctggtacatgtttcagttccaccggatcctgcagtacgccctgccgagacaggagtcccagcggccattcttttggattttcatggacaacttgctgctgaccgaggatgaccaggaaactaccactcggttcctgcagaccgaagccgtgaccctgcaggacgtgagaggccgggactaccagaacgccatgcgggtgtggtccaacatccctggactgaaaagcaagcacgcacctctgacccctaaagaagaggagtacctgcaggcccaggtgcggagcagaagcaagctggacgcccctaaggtggatctgctggtgaagaattgcctcctgcccctgagagagtacttcaagtatttcagccagaatagtctgcccctgggcggcccaagcagcggcgcccctcctcccagcggcggcagcccagccggctccccaacctctaccgaggagggcacctctgagtccgccacccccgagagcggccctggcacctccaccgagcccagcgagggcagcgcacccggcagccctgccggcagccccacctccacagaggagggaaccagcaccgagcccagcgaaggcagcgccccaggcaccagcaccgagcctagtgagggcggctctggcggcggcagcgcccaggagattaaacggatcaacaagatcagaagaagacttgtgaaagacagcaacaccaagaaggccggcaagacaggccccatgaaaaccctgctggttagagtgatgacacccgatctgagagagcggctggaaaacctgagaaagaagcctgaaaatatcccccagcccatcagcaatacatctagagccaacctgaataagctgctgaccgattacaccgaaatgaagaaggcgatcctgcatgtgtactgggaagagttccagaaggaccctgtgggcctgatgagccgggtggcccagcctgccagcaagaagatcgatcagaacaagctgaaacctgagatggacgagaagggcaacctgaccaccgccggctttgcctgctctcagtgtggccagcccctgttcgtgtacaagctggagcaggtgtctgagaagggcaaggcttacaccaactacttcggacggtgcaatgtggccgagcacgaaaagctgatcctgctggcccagctgaagcccgagaaggatagcgacgaagccgtgacatatagcctgggaaagtttgggcagagggccctggatttctacagcattcatgtgaccaaggagtccacccaccccgtgaagcccctggcccagatcgccggaaacagatacgcctccggacctgtgggaaaggccctgagcgacgcatgtatgggcacaatcgcctccttcctgtctaagtaccaggacatcatcatcgaacaccagaaggtggtgaagggcaaccagaagagactggagagcctgcgggagctggccggcaaggaaaacctggaataccctagcgtgaccctgccacctcagcctcacaccaaggagggcgttgatgcctacaacgaagtgatcgcccgggtgcgaatgtgggtgaacctgaacctgtggcagaagctgaagctaagcagagatgatgccaagcctctgctgagactgaagggattcccttcctttcctctggtcgagagacaggccaacgaagtggactggtgggacatggtgtgtaacgtgaagaagctgatcaacgagaaaaaggaggatggcaaggtgttttggcagaatctggctggctacaagagacaggaagccctgagaccatacctgagcagcgaggaagatcggaagaagggaaagaaattcgctcggtaccagctgggcgacctgctgctgcacctggaaaagaagcacggcgaggactggggaaaggtgtacgacgaggcctgggagcggattgacaagaaagtggaaggcctgagcaagcacatcaagctggaagaggaacggagaagcgaggacgcccagagcaaggccgccctgaccgactggctgcgggctaaggccagcttcgtgatcgagggcctgaaggaggccgacaaggacgagttctgcagatgcgagctgaagctgcagaagtggtacggggacctgcggggaaagcccttcgccatcgaagccgagaacagcatcctggacatcagcggcttcagcaagcagtacaactgtgccttcatctggcagaaggacggcgtgaagaagctgaacctgtacctgatcatcaactacttcaagggcggcaagctgcggttcaagaagatcaaacctgaagccttcgaagccaacagattctacaccgtgatcaacaaaaagagcggcgagatcgtgcccatggaggtgaacttcaacttcgacgaccccaacctgatcatcctgcctctggcctttggcaagagacagggcagagaattcatctggaacgacctgctgtccctggaaaccggcagcctgaagctggccaacggaagagtgatcgagaagacactgtacaacagaagaacccggcaggatgagcctgccctgttcgtggccctgaccttcgagcggcgggaggtcctggactcctccaatatcaaaccaatgaacctgatcggcgtggcaagaggcgaaaacatccccgccgtgatcgccctgaccgaccccgagggctgcccactgagccggtttaaggatagcctgggaaacccaacccacatcctgagaatcggcgagagctataaggagaagcagcggaccatccaggccaagaaggaggtggagcagcggagagccggcggctacagccggaagtacgccagcaaagccaagaatctggcagacgatatggtgagaaacaccgctagagatctgctgtactacgccgtgacccaggatgccatgctgatcttcgccaacctgagccggggcttcggccggcagggcaagcggaccttcatggccgagagacagtacacacggatggaggactggctgaccgccaagctggcctacgagggcctgagcaagacctacctgtccaagacactggcccagtacacctccaagacatgcagcaactgtgggtttaccatcaccagcgccgactacgacagggtgctggagaagctgaagaagacagcaacaggctggatgaccacaattaacggcaaggagctgaaggtggagggccagattacctactacaacagatacaagagacagaacgtagtcaaggacctgtccgtcgagctggatagactgagcgaagaatctgtgaacaacgacatctcctcctggacaaagggcagaagcggagaagctctgagcctcctgaagaaaagattctcccatagacccgtgcaggagaagttcgtgtgcctgaactgcggcttcgagacacacgcagccgagcaagccgccctgaacatcgccagatcctggctgttcctgcggagccaggagtacaagaaataccagacaaacaagacaaccggcaacaccgataagagagccttcgtcgagacctggcagtccttttaccggaagaagcttaaggaggtgtggaaacctgccgtgcggtctggcggatctggcggaggctccacaagcatgggcagcgtgagcttcgaggacatcagcctggacttcacctgggacgagtggcaggacctggacagcgcccagaggaccctgtacagggacgtgatgctggagaactacagcagcctgatgttcctgggccactgcaccaccaagcccgagctgatcttcaagctggagcacggcttcggcccctggagcctggccgaggccagcatccagagcctgcccggcgtgcacaagatgaccgtgaccagccccaagaaaaagagaaaagtctaagctgccttctgcggggcttgccttctggccatgcccttcttctctcccttgcacctgtacctcttggtctttgaataaagcctgagtaggaaggctagcaaaaaaaaaaaaaaaaaaaaaaaaaaaaaaaaaaaaaaaaaaaaaaaaaaaaaaaaaaaaaaaaaaaaaaaaaaaaaaaa

SEQ ID NO: 6618 - RNA, 5797 nt, synthetic construct
  source 1..5797: mol_type = other RNA
aggaaataagagagaaaagaagagtaagaagaaatataagagccaccatggcccctaagaagaagcgtaaagtgagccggatggaacgcctcgtctacgaggtgcggcagaagtgcagaaacatcgaggacatctgcatctcctgcggatctctgaacgtgaccctggagcacccactgttcatcggcggcatgtgccagaactgtaaaaactgttttctggagtgtgcctatcaatacgacgatgacggctaccagagctactgcaccatctgttgcggcggaagagaggtgctgatgtgtggaaataacaactgctgccggtgcttctgcgtggaatgcgtggacctgctggtgggccccggcgccgcccaggccgctattaaggaagatccttggaactgctacatgtgcggccacaagggcacatacggcctgctgagacggagagaggactggcctagcagactgcagatgttcttcgccaataaccacgaccaggagttcgacccccctaaggtgtaccctcccgtccccgccgagaagagaaagcccatccgggtcctgagcctgttcgatggcatcgccaccggtctgctggtgctgaaggacctgggcatccaggtggataggtacattgcctccgaggtgtgcgaggactccatcaccgtgggaatggtgcgtcatcagggcaagatcatgtacgtgggcgacgtgcggagcgtgacacagaagcatatccaggagtggggccctttcgacctggtgatcggcggcagcccttgcaatgacctgagcatcgtgaacccagcccggaagggcctgtacgagggaaccggcagactgttcttcgagttttacagactgctgcacgacgcccggcctaaggaaggcgacgaccggcccttcttttggctgttcgagaatgtggtggccatgggagtcagcgacaagcgggatattagccggttcctggagagcaaccccgtgatgatcgatgccaaggaagtgagcgccgcccaccgggccagatacttctggggcaatctgcctggcatgaacagacccctggccagcaccgtgaacgacaagctggagctgcaggagtgcctggagcacggccggatcgccaagttcagcaaggtgagaaccatcaccacccgaagcaacagcatcaaacaaggcaaggaccagcactttcctgtgttcatgaacgagaaggaggacatcctgtggtgtaccgagatggagagagtgttcgggttcccagtccactacacagatgtcagcaacatgtctagactggccagacagagactgctgggaagaagctggtccgtccctgtgatcagacacctgttcgcccctctgaaggagtacttcgcctgcgtgagcagcggcaacagcaacgccaacagccggggccccagcttctctagcggcctggtgccactgtccctgagagggagccacatgggccccatggagatctacaaaaccgtgagcgcctggaagcggcagcctgtgcgcgtgctgagcctgtttcggaatatcgataaagtcctgaaaagcctgggattcctggagagcggctctggctccggcggtggcaccctgaagtacgtggaggatgtgacaaacgtggtcagacgggatgtggagaagtggggccccttcgatctggtgtacggcagcacccaacccctgggcagctcttgtgaccggtgccctggctggtacatgtttcagttccaccggatcctgcagtacgccctgccgagacaggagtcccagcggccattcttttggattttcatggacaacttgctgctgaccgaggatgaccaggaaactaccactcggttcctgcagaccgaagccgtgaccctgcaggacgtgagaggccgggactaccagaacgccatgcgggtgtggtccaacatccctggactgaaaagcaagcacgcacctctgacccctaaagaagaggagtacctgcaggcccaggtgcggagcagaagcaagctggacgcccctaaggtggatctgctggtgaagaattgcctcctgcccctgagagagtacttcaagtatttcagccagaatagtctgcccctgggcggcccaagcagcggcgcccctcctcccagcggcggcagcccagccggctccccaacctctaccgaggagggcacctctgagtccgccacccccgagagcggccctggcacctccaccgagcccagcgagggcagcgcacccggcagccctgccggcagccccacctccacagaggagggaaccagcaccgagcccagcgaaggcagcgccccaggcaccagcaccgagcctagtgagggcggctctggcggcggcagcgcccaggagattaaacggatcaacaagatcagaagaagacttgtgaaagacagcaacaccaagaaggccggcaagacaggccccatgaaaaccctgctggttagagtgatgacacccgatctgagagagcggctggaaaacctgagaaagaagcctgaaaatatcccccagcccatcagcaatacatctagagccaacctgaataagctgctgaccgattacaccgaaatgaagaaggcgatcctgcatgtgtactgggaagagttccagaaggaccctgtgggcctgatgagccgggtggcccagcctgccagcaagaagatcgatcagaacaagctgaaacctgagatggacgagaagggcaacctgaccaccgccggctttgcctgctctcagtgtggccagcccctgttcgtgtacaagctggagcaggtgtctgagaagggcaaggcttacaccaactacttcggacggtgcaatgtggccgagcacgaaaagctgatcctgctggcccagctgaagcccgagaaggatagcgacgaagccgtgacatatagcctgggaaagtttgggcagagggccctggatttctacagcattcatgtgaccaaggagtccacccaccccgtgaagcccctggcccagatcgccggaaacagatacgcctccggacctgtgggaaaggccctgagcgacgcatgtatgggcacaatcgcctccttcctgtctaagtaccaggacatcatcatcgaacaccagaaggtggtgaagggcaaccagaagagactggagagcctgcgggagctggccggcaaggaaaacctggaataccctagcgtgaccctgccacctcagcctcacaccaaggagggcgttgatgcctacaacgaagtgatcgcccgggtgcgaatgtgggtgaacctgaacctgtggcagaagctgaagctaagcagagatgatgccaagcctctgctgagactgaagggattcccttcctttcctctggtcgagagacaggccaacgaagtggactggtgggacatggtgtgtaacgtgaagaagctgatcaacgagaaaaaggaggatggcaaggtgttttggcagaatctggctggctacaagagacaggaagccctgagaccatacctgagcagcgaggaagatcggaagaagggaaagaaattcgctcggtaccagctgggcgacctgctgctgcacctggaaaagaagcacggcgaggactggggaaaggtgtacgacgaggcctgggagcggattgacaagaaagtggaaggcctgagcaagcacatcaagctggaagaggaacggagaagcgaggacgcccagagcaaggccgccctgaccgactggctgcgggctaaggccagcttcgtgatcgagggcctgaaggaggccgacaaggacgagttctgcagatgcgagctgaagctgcagaagtggtacggggacctgcggggaaagcccttcgccatcgaagccgagaacagcatcctggacatcagcggcttcagcaagcagtacaactgtgccttcatctggcagaaggacggcgtgaagaagctgaacctgtacctgatcatcaactacttcaagggcggcaagctgcggttcaagaagatcaaacctgaagccttcgaagccaacagattctacaccgtgatcaacaaaaagagcggcgagatcgtgcccatggaggtgaacttcaacttcgacgaccccaacctgatcatcctgcctctggcctttggcaagagacagggcagagaattcatctggaacgacctgctgtccctggaaaccggcagcctgaagctggccaacggaagagtgatcgagaagacactgtacaacagaagaacccggcaggatgagcctgccctgttcgtggccctgaccttcgagcggcgggaggtcctggactcctccaatatcaaaccaatgaacctgatcggcgtggcaagaggcgaaaacatccccgccgtgatcgccctgaccgaccccgagggctgcccactgagccggtttaaggatagcctgggaaacccaacccacatcctgagaatcggcgagagctataaggagaagcagcggaccatccaggccaagaaggaggtggagcagcggagagccggcggctacagccggaagtacgccagcaaagccaagaatctggcagacgatatggtgagaaacaccgctagagatctgctgtactacgccgtgacccaggatgccatgctgatcttcgccaacctgagccggggcttcggccggcagggcaagcggaccttcatggccgagagacagtacacacggatggaggactggctgaccgccaagctggcctacgagggcctgagcaagacctacctgtccaagacactggcccagtacacctccaagacatgcagcaactgtgggtttaccatcaccagcgccgactacgacagggtgctggagaagctgaagaagacagcaacaggctggatgaccacaattaacggcaaggagctgaaggtggagggccagattacctactacaacagatacaagagacagaacgtagtcaaggacctgtccgtcgagctggatagactgagcgaagaatctgtgaacaacgacatctcctcctggacaaagggcagaagcggagaagctctgagcctcctgaagaaaagattctcccatagacccgtgcaggagaagttcgtgtgcctgaactgcggcttcgagacacacgcagccgagcaagccgccctgaacatcgccagatcctggctgttcctgcggagccaggagtacaagaaataccagacaaacaagacaaccggcaacaccgataagagagccttcgtcgagacctggcagtccttttaccggaagaagcttaaggaggtgtggaaacctgccgtgcggtctggcggatctggcggaggctccacaagcgtgcccgagcccgtgaccttcgaggacgtggccgtggacttcacccaggaggagtggggccagctggacctggtgcagaggaccctgtacagggacgtgatgctggagacctacggccacctgctgagcgtgggcaaccagatcgccaagcccgaggtgatcagcctgctggagcagggcgaggagccctggctggtggagcagacctgccccgagagcagctgccccgagtggatgagggacaccagccccaagaaaaagagaaaagtctaagctgccttctgcggggcttgccttctggccatgcccttcttctctcccttgcacctgtacctcttggtctttgaataaagcctgagtaggaaggctagcaaaaaaaaaaaaaaaaaaaaaaaaaaaaaaaaaaaaaaaaaaaaaaaaaaaaaaaaaaaaaaaaaaaaaaaaaaaaaaaa

SEQ ID NO: 6619 - RNA, 5797 nt, synthetic construct
  source 1..5797: mol_type = other RNA
aggaaataagagagaaaagaagagtaagaagaaatataagagccaccatggcccctaagaagaagcgtaaagtgagccggatggaacgcctcgtctacgaggtgcggcagaagtgcagaaacatcgaggacatctgcatctcctgcggatctctgaacgtgaccctggagcacccactgttcatcggcggcatgtgccagaactgtaaaaactgttttctggagtgtgcctatcaatacgacgatgacggctaccagagctactgcaccatctgttgcggcggaagagaggtgctgatgtgtggaaataacaactgctgccggtgcttctgcgtggaatgcgtggacctgctggtgggccccggcgccgcccaggccgctattaaggaagatccttggaactgctacatgtgcggccacaagggcacatacggcctgctgagacggagagaggactggcctagcagactgcagatgttcttcgccaataaccacgaccaggagttcgacccccctaaggtgtaccctcccgtccccgccgagaagagaaagcccatccgggtcctgagcctgttcgatggcatcgccaccggtctgctggtgctgaaggacctgggcatccaggtggataggtacattgcctccgaggtgtgcgaggactccatcaccgtgggaatggtgcgtcatcagggcaagatcatgtacgtgggcgacgtgcggagcgtgacacagaagcatatccaggagtggggccctttcgacctggtgatcggcggcagcccttgcaatgacctgagcatcgtgaacccagcccggaagggcctgtacgagggaaccggcagactgttcttcgagttttacagactgctgcacgacgcccggcctaaggaaggcgacgaccggcccttcttttggctgttcgagaatgtggtggccatgggagtcagcgacaagcgggatattagccggttcctggagagcaaccccgtgatgatcgatgccaaggaagtgagcgccgcccaccgggccagatacttctggggcaatctgcctggcatgaacagacccctggccagcaccgtgaacgacaagctggagctgcaggagtgcctggagcacggccggatcgccaagttcagcaaggtgagaaccatcaccacccgaagcaacagcatcaaacaaggcaaggaccagcactttcctgtgttcatgaacgagaaggaggacatcctgtggtgtaccgagatggagagagtgttcgggttcccagtccactacacagatgtcagcaacatgtctagactggccagacagagactgctgggaagaagctggtccgtccctgtgatcagacacctgttcgcccctctgaaggagtacttcgcctgcgtgagcagcggcaacagcaacgccaacagccggggccccagcttctctagcggcctggtgccactgtccctgagagggagccacatgggccccatggagatctacaaaaccgtgagcgcctggaagcggcagcctgtgcgcgtgctgagcctgtttcggaatatcgataaagtcctgaaaagcctgggattcctggagagcggctctggctccggcggtggcaccctgaagtacgtggaggatgtgacaaacgtggtcagacgggatgtggagaagtggggccccttcgatctggtgtacggcagcacccaacccctgggcagctcttgtgaccggtgccctggctggtacatgtttcagttccaccggatcctgcagtacgccctgccgagacaggagtcccagcggccattcttttggattttcatggacaacttgctgctgaccgaggatgaccaggaaactaccactcggttcctgcagaccgaagccgtgaccctgcaggacgtgagaggccgggactaccagaacgccatgcgggtgtggtccaacatccctggactgaaaagcaagcacgcacctctgacccctaaagaagaggagtacctgcaggcccaggtgcggagcagaagcaagctggacgcccctaaggtggatctgctggtgaagaattgcctcctgcccctgagagagtacttcaagtatttcagccagaatagtctgcccctgggcggcccaagcagcggcgcccctcctcccagcggcggcagcccagccggctccccaacctctaccgaggagggcacctctgagtccgccacccccgagagcggccctggcacctccaccgagcccagcgagggcagcgcacccggcagccctgccggcagccccacctccacagaggagggaaccagcaccgagcccagcgaaggcagcgccccaggcaccagcaccgagcctagtgagggcggctctggcggcggcagcgcccaggagattaaacggatcaacaagatcagaagaagacttgtgaaagacagcaacaccaagaaggccggcaagacaggccccatgaaaaccctgctggttagagtgatgacacccgatctgagagagcggctggaaaacctgagaaagaagcctgaaaatatcccccagcccatcagcaatacatctagagccaacctgaataagctgctgaccgattacaccgaaatgaagaaggcgatcctgcatgtgtactgggaagagttccagaaggaccctgtgggcctgatgagccgggtggcccagcctgccagcaagaagatcgatcagaacaagctgaaacctgagatggacgagaagggcaacctgaccaccgccggctttgcctgctctcagtgtggccagcccctgttcgtgtacaagctggagcaggtgtctgagaagggcaaggcttacaccaactacttcggacggtgcaatgtggccgagcacgaaaagctgatcctgctggcccagctgaagcccgagaaggatagcgacgaagccgtgacatatagcctgggaaagtttgggcagagggccctggatttctacagcattcatgtgaccaaggagtccacccaccccgtgaagcccctggcccagatcgccggaaacagatacgcctccggacctgtgggaaaggccctgagcgacgcatgtatgggcacaatcgcctccttcctgtctaagtaccaggacatcatcatcgaacaccagaaggtggtgaagggcaaccagaagagactggagagcctgcgggagctggccggcaaggaaaacctggaataccctagcgtgaccctgccacctcagcctcacaccaaggagggcgttgatgcctacaacgaagtgatcgcccgggtgcgaatgtgggtgaacctgaacctgtggcagaagctgaagctaagcagagatgatgccaagcctctgctgagactgaagggattcccttcctttcctctggtcgagagacaggccaacgaagtggactggtgggacatggtgtgtaacgtgaagaagctgatcaacgagaaaaaggaggatggcaaggtgttttggcagaatctggctggctacaagagacaggaagccctgagaccatacctgagcagcgaggaagatcggaagaagggaaagaaattcgctcggtaccagctgggcgacctgctgctgcacctggaaaagaagcacggcgaggactggggaaaggtgtacgacgaggcctgggagcggattgacaagaaagtggaaggcctgagcaagcacatcaagctggaagaggaacggagaagcgaggacgcccagagcaaggccgccctgaccgactggctgcgggctaaggccagcttcgtgatcgagggcctgaaggaggccgacaaggacgagttctgcagatgcgagctgaagctgcagaagtggtacggggacctgcggggaaagcccttcgccatcgaagccgagaacagcatcctggacatcagcggcttcagcaagcagtacaactgtgccttcatctggcagaaggacggcgtgaagaagctgaacctgtacctgatcatcaactacttcaagggcggcaagctgcggttcaagaagatcaaacctgaagccttcgaagccaacagattctacaccgtgatcaacaaaaagagcggcgagatcgtgcccatggaggtgaacttcaacttcgacgaccccaacctgatcatcctgcctctggcctttggcaagagacagggcagagaattcatctggaacgacctgctgtccctggaaaccggcagcctgaagctggccaacggaagagtgatcgagaagacactgtacaacagaagaacccggcaggatgagcctgccctgttcgtggccctgaccttcgagcggcgggaggtcctggactcctccaatatcaaaccaatgaacctgatcggcgtggcaagaggcgaaaacatccccgccgtgatcgccctgaccgaccccgagggctgcccactgagccggtttaaggatagcctgggaaacccaacccacatcctgagaatcggcgagagctataaggagaagcagcggaccatccaggccaagaaggaggtggagcagcggagagccggcggctacagccggaagtacgccagcaaagccaagaatctggcagacgatatggtgagaaacaccgctagagatctgctgtactacgccgtgacccaggatgccatgctgatcttcgccaacctgagccggggcttcggccggcagggcaagcggaccttcatggccgagagacagtacacacggatggaggactggctgaccgccaagctggcctacgagggcctgagcaagacctacctgtccaagacactggcccagtacacctccaagacatgcagcaactgtgggtttaccatcaccagcgccgactacgacagggtgctggagaagctgaagaagacagcaacaggctggatgaccacaattaacggcaaggagctgaaggtggagggccagattacctactacaacagatacaagagacagaacgtagtcaaggacctgtccgtcgagctggatagactgagcgaagaatctgtgaacaacgacatctcctcctggacaaagggcagaagcggagaagctctgagcctcctgaagaaaagattctcccatagacccgtgcaggagaagttcgtgtgcctgaactgcggcttcgagacacacgcagccgagcaagccgccctgaacatcgccagatcctggctgttcctgcggagccaggagtacaagaaataccagacaaacaagacaaccggcaacaccgataagagagccttcgtcgagacctggcagtccttttaccggaagaagcttaaggaggtgtggaaacctgccgtgcggtctggcggatctggcggaggctccacaagcttccaggagagcgtgaccttcaaggacgtggccgtggagttcaccggcgaggagtggaggcagctggacagggcccagaggagcctgttcagggacgtgatgctggagaactacaggaacctggtgagcctgggcctgaccgtggccaagcccaacctgatcttcctgctggagaggggcgaggccccctggaccctgcagaggcagatccccggcggcaccagcagcgactgcccctgctggaccagccccaagaaaaagagaaaagtctaagctgccttctgcggggcttgccttctggccatgcccttcttctctcccttgcacctgtacctcttggtctttgaataaagcctgagtaggaaggctagcaaaaaaaaaaaaaaaaaaaaaaaaaaaaaaaaaaaaaaaaaaaaaaaaaaaaaaaaaaaaaaaaaaaaaaaaaaaaaaaa

SEQ ID NO: 6620 - RNA, 5797 nt, synthetic construct
  source 1..5797: mol_type = other RNA
aggaaataagagagaaaagaagagtaagaagaaatataagagccaccatggcccctaagaagaagcgtaaagtgagccggatggaacgcctcgtctacgaggtgcggcagaagtgcagaaacatcgaggacatctgcatctcctgcggatctctgaacgtgaccctggagcacccactgttcatcggcggcatgtgccagaactgtaaaaactgttttctggagtgtgcctatcaatacgacgatgacggctaccagagctactgcaccatctgttgcggcggaagagaggtgctgatgtgtggaaataacaactgctgccggtgcttctgcgtggaatgcgtggacctgctggtgggccccggcgccgcccaggccgctattaaggaagatccttggaactgctacatgtgcggccacaagggcacatacggcctgctgagacggagagaggactggcctagcagactgcagatgttcttcgccaataaccacgaccaggagttcgacccccctaaggtgtaccctcccgtccccgccgagaagagaaagcccatccgggtcctgagcctgttcgatggcatcgccaccggtctgctggtgctgaaggacctgggcatccaggtggataggtacattgcctccgaggtgtgcgaggactccatcaccgtgggaatggtgcgtcatcagggcaagatcatgtacgtgggcgacgtgcggagcgtgacacagaagcatatccaggagtggggccctttcgacctggtgatcggcggcagcccttgcaatgacctgagcatcgtgaacccagcccggaagggcctgtacgagggaaccggcagactgttcttcgagttttacagactgctgcacgacgcccggcctaaggaaggcgacgaccggcccttcttttggctgttcgagaatgtggtggccatgggagtcagcgacaagcgggatattagccggttcctggagagcaaccccgtgatgatcgatgccaaggaagtgagcgccgcccaccgggccagatacttctggggcaatctgcctggcatgaacagacccctggccagcaccgtgaacgacaagctggagctgcaggagtgcctggagcacggccggatcgccaagttcagcaaggtgagaaccatcaccacccgaagcaacagcatcaaacaaggcaaggaccagcactttcctgtgttcatgaacgagaaggaggacatcctgtggtgtaccgagatggagagagtgttcgggttcccagtccactacacagatgtcagcaacatgtctagactggccagacagagactgctgggaagaagctggtccgtccctgtgatcagacacctgttcgcccctctgaaggagtacttcgcctgcgtgagcagcggcaacagcaacgccaacagccggggccccagcttctctagcggcctggtgccactgtccctgagagggagccacatgggccccatggagatctacaaaaccgtgagcgcctggaagcggcagcctgtgcgcgtgctgagcctgtttcggaatatcgataaagtcctgaaaagcctgggattcctggagagcggctctggctccggcggtggcaccctgaagtacgtggaggatgtgacaaacgtggtcagacgggatgtggagaagtggggccccttcgatctggtgtacggcagcacccaacccctgggcagctcttgtgaccggtgccctggctggtacatgtttcagttccaccggatcctgcagtacgccctgccgagacaggagtcccagcggccattcttttggattttcatggacaacttgctgctgaccgaggatgaccaggaaactaccactcggttcctgcagaccgaagccgtgaccctgcaggacgtgagaggccgggactaccagaacgccatgcgggtgtggtccaacatccctggactgaaaagcaagcacgcacctctgacccctaaagaagaggagtacctgcaggcccaggtgcggagcagaagcaagctggacgcccctaaggtggatctgctggtgaagaattgcctcctgcccctgagagagtacttcaagtatttcagccagaatagtctgcccctgggcggcccaagcagcggcgcccctcctcccagcggcggcagcccagccggctccccaacctctaccgaggagggcacctctgagtccgccacccccgagagcggccctggcacctccaccgagcccagcgagggcagcgcacccggcagccctgccggcagccccacctccacagaggagggaaccagcaccgagcccagcgaaggcagcgccccaggcaccagcaccgagcctagtgagggcggctctggcggcggcagcgcccaggagattaaacggatcaacaagatcagaagaagacttgtgaaagacagcaacaccaagaaggccggcaagacaggccccatgaaaaccctgctggttagagtgatgacacccgatctgagagagcggctggaaaacctgagaaagaagcctgaaaatatcccccagcccatcagcaatacatctagagccaacctgaataagctgctgaccgattacaccgaaatgaagaaggcgatcctgcatgtgtactgggaagagttccagaaggaccctgtgggcctgatgagccgggtggcccagcctgccagcaagaagatcgatcagaacaagctgaaacctgagatggacgagaagggcaacctgaccaccgccggctttgcctgctctcagtgtggccagcccctgttcgtgtacaagctggagcaggtgtctgagaagggcaaggcttacaccaactacttcggacggtgcaatgtggccgagcacgaaaagctgatcctgctggcccagctgaagcccgagaaggatagcgacgaagccgtgacatatagcctgggaaagtttgggcagagggccctggatttctacagcattcatgtgaccaaggagtccacccaccccgtgaagcccctggcccagatcgccggaaacagatacgcctccggacctgtgggaaaggccctgagcgacgcatgtatgggcacaatcgcctccttcctgtctaagtaccaggacatcatcatcgaacaccagaaggtggtgaagggcaaccagaagagactggagagcctgcgggagctggccggcaaggaaaacctggaataccctagcgtgaccctgccacctcagcctcacaccaaggagggcgttgatgcctacaacgaagtgatcgcccgggtgcgaatgtgggtgaacctgaacctgtggcagaagctgaagctaagcagagatgatgccaagcctctgctgagactgaagggattcccttcctttcctctggtcgagagacaggccaacgaagtggactggtgggacatggtgtgtaacgtgaagaagctgatcaacgagaaaaaggaggatggcaaggtgttttggcagaatctggctggctacaagagacaggaagccctgagaccatacctgagcagcgaggaagatcggaagaagggaaagaaattcgctcggtaccagctgggcgacctgctgctgcacctggaaaagaagcacggcgaggactggggaaaggtgtacgacgaggcctgggagcggattgacaagaaagtggaaggcctgagcaagcacatcaagctggaagaggaacggagaagcgaggacgcccagagcaaggccgccctgaccgactggctgcgggctaaggccagcttcgtgatcgagggcctgaaggaggccgacaaggacgagttctgcagatgcgagctgaagctgcagaagtggtacggggacctgcggggaaagcccttcgccatcgaagccgagaacagcatcctggacatcagcggcttcagcaagcagtacaactgtgccttcatctggcagaaggacggcgtgaagaagctgaacctgtacctgatcatcaactacttcaagggcggcaagctgcggttcaagaagatcaaacctgaagccttcgaagccaacagattctacaccgtgatcaacaaaaagagcggcgagatcgtgcccatggaggtgaacttcaacttcgacgaccccaacctgatcatcctgcctctggcctttggcaagagacagggcagagaattcatctggaacgacctgctgtccctggaaaccggcagcctgaagctggccaacggaagagtgatcgagaagacactgtacaacagaagaacccggcaggatgagcctgccctgttcgtggccctgaccttcgagcggcgggaggtcctggactcctccaatatcaaaccaatgaacctgatcggcgtggcaagaggcgaaaacatccccgccgtgatcgccctgaccgaccccgagggctgcccactgagccggtttaaggatagcctgggaaacccaacccacatcctgagaatcggcgagagctataaggagaagcagcggaccatccaggccaagaaggaggtggagcagcggagagccggcggctacagccggaagtacgccagcaaagccaagaatctggcagacgatatggtgagaaacaccgctagagatctgctgtactacgccgtgacccaggatgccatgctgatcttcgccaacctgagccggggcttcggccggcagggcaagcggaccttcatggccgagagacagtacacacggatggaggactggctgaccgccaagctggcctacgagggcctgagcaagacctacctgtccaagacactggcccagtacacctccaagacatgcagcaactgtgggtttaccatcaccagcgccgactacgacagggtgctggagaagctgaagaagacagcaacaggctggatgaccacaattaacggcaaggagctgaaggtggagggccagattacctactacaacagatacaagagacagaacgtagtcaaggacctgtccgtcgagctggatagactgagcgaagaatctgtgaacaacgacatctcctcctggacaaagggcagaagcggagaagctctgagcctcctgaagaaaagattctcccatagacccgtgcaggagaagttcgtgtgcctgaactgcggcttcgagacacacgcagccgagcaagccgccctgaacatcgccagatcctggctgttcctgcggagccaggagtacaagaaataccagacaaacaagacaaccggcaacaccgataagagagccttcgtcgagacctggcagtccttttaccggaagaagcttaaggaggtgtggaaacctgccgtgcggtctggcggatctggcggaggctccacaagcctgcagggcagcgtgagcttcaaggacgtgaccgtggacttcacccaggaggagtggcaccagctgaaccccgcccagaaggccctgtacagggacgtgatgctggagaactactgccacttcatcagcgtgggcttccacatgaccaagcccgacatgatcaggaagctggagcagggcgaggagctgtggaccgagaggatcttcagcaggcagagccacctggaggaggacggcaaggccaccagccccaagaaaaagagaaaagtctaagctgccttctgcggggcttgccttctggccatgcccttcttctctcccttgcacctgtacctcttggtctttgaataaagcctgagtaggaaggctagcaaaaaaaaaaaaaaaaaaaaaaaaaaaaaaaaaaaaaaaaaaaaaaaaaaaaaaaaaaaaaaaaaaaaaaaaaaaaaaaa

SEQ ID NO: 6621 - RNA, 5797 nt, synthetic construct
  source 1..5797: mol_type = other RNA
aggaaataagagagaaaagaagagtaagaagaaatataagagccaccatggcccctaagaagaagcgtaaagtgagccggatggaacgcctcgtctacgaggtgcggcagaagtgcagaaacatcgaggacatctgcatctcctgcggatctctgaacgtgaccctggagcacccactgttcatcggcggcatgtgccagaactgtaaaaactgttttctggagtgtgcctatcaatacgacgatgacggctaccagagctactgcaccatctgttgcggcggaagagaggtgctgatgtgtggaaataacaactgctgccggtgcttctgcgtggaatgcgtggacctgctggtgggccccggcgccgcccaggccgctattaaggaagatccttggaactgctacatgtgcggccacaagggcacatacggcctgctgagacggagagaggactggcctagcagactgcagatgttcttcgccaataaccacgaccaggagttcgacccccctaaggtgtaccctcccgtccccgccgagaagagaaagcccatccgggtcctgagcctgttcgatggcatcgccaccggtctgctggtgctgaaggacctgggcatccaggtggataggtacattgcctccgaggtgtgcgaggactccatcaccgtgggaatggtgcgtcatcagggcaagatcatgtacgtgggcgacgtgcggagcgtgacacagaagcatatccaggagtggggccctttcgacctggtgatcggcggcagcccttgcaatgacctgagcatcgtgaacccagcccggaagggcctgtacgagggaaccggcagactgttcttcgagttttacagactgctgcacgacgcccggcctaaggaaggcgacgaccggcccttcttttggctgttcgagaatgtggtggccatgggagtcagcgacaagcgggatattagccggttcctggagagcaaccccgtgatgatcgatgccaaggaagtgagcgccgcccaccgggccagatacttctggggcaatctgcctggcatgaacagacccctggccagcaccgtgaacgacaagctggagctgcaggagtgcctggagcacggccggatcgccaagttcagcaaggtgagaaccatcaccacccgaagcaacagcatcaaacaaggcaaggaccagcactttcctgtgttcatgaacgagaaggaggacatcctgtggtgtaccgagatggagagagtgttcgggttcccagtccactacacagatgtcagcaacatgtctagactggccagacagagactgctgggaagaagctggtccgtccctgtgatcagacacctgttcgcccctctgaaggagtacttcgcctgcgtgagcagcggcaacagcaacgccaacagccggggccccagcttctctagcggcctggtgccactgtccctgagagggagccacatgggccccatggagatctacaaaaccgtgagcgcctggaagcggcagcctgtgcgcgtgctgagcctgtttcggaatatcgataaagtcctgaaaagcctgggattcctggagagcggctctggctccggcggtggcaccctgaagtacgtggaggatgtgacaaacgtggtcagacgggatgtggagaagtggggccccttcgatctggtgtacggcagcacccaacccctgggcagctcttgtgaccggtgccctggctggtacatgtttcagttccaccggatcctgcagtacgccctgccgagacaggagtcccagcggccattcttttggattttcatggacaacttgctgctgaccgaggatgaccaggaaactaccactcggttcctgcagaccgaagccgtgaccctgcaggacgtgagaggccgggactaccagaacgccatgcgggtgtggtccaacatccctggactgaaaagcaagcacgcacctctgacccctaaagaagaggagtacctgcaggcccaggtgcggagcagaagcaagctggacgcccctaaggtggatctgctggtgaagaattgcctcctgcccctgagagagtacttcaagtatttcagccagaatagtctgcccctgggcggcccaagcagcggcgcccctcctcccagcggcggcagcccagccggctccccaacctctaccgaggagggcacctctgagtccgccacccccgagagcggccctggcacctccaccgagcccagcgagggcagcgcacccggcagccctgccggcagccccacctccacagaggagggaaccagcaccgagcccagcgaaggcagcgccccaggcaccagcaccgagcctagtgagggcggctctggcggcggcagcgcccaggagattaaacggatcaacaagatcagaagaagacttgtgaaagacagcaacaccaagaaggccggcaagacaggccccatgaaaaccctgctggttagagtgatgacacccgatctgagagagcggctggaaaacctgagaaagaagcctgaaaatatcccccagcccatcagcaatacatctagagccaacctgaataagctgctgaccgattacaccgaaatgaagaaggcgatcctgcatgtgtactgggaagagttccagaaggaccctgtgggcctgatgagccgggtggcccagcctgccagcaagaagatcgatcagaacaagctgaaacctgagatggacgagaagggcaacctgaccaccgccggctttgcctgctctcagtgtggccagcccctgttcgtgtacaagctggagcaggtgtctgagaagggcaaggcttacaccaactacttcggacggtgcaatgtggccgagcacgaaaagctgatcctgctggcccagctgaagcccgagaaggatagcgacgaagccgtgacatatagcctgggaaagtttgggcagagggccctggatttctacagcattcatgtgaccaaggagtccacccaccccgtgaagcccctggcccagatcgccggaaacagatacgcctccggacctgtgggaaaggccctgagcgacgcatgtatgggcacaatcgcctccttcctgtctaagtaccaggacatcatcatcgaacaccagaaggtggtgaagggcaaccagaagagactggagagcctgcgggagctggccggcaaggaaaacctggaataccctagcgtgaccctgccacctcagcctcacaccaaggagggcgttgatgcctacaacgaagtgatcgcccgggtgcgaatgtgggtgaacctgaacctgtggcagaagctgaagctaagcagagatgatgccaagcctctgctgagactgaagggattcccttcctttcctctggtcgagagacaggccaacgaagtggactggtgggacatggtgtgtaacgtgaagaagctgatcaacgagaaaaaggaggatggcaaggtgttttggcagaatctggctggctacaagagacaggaagccctgagaccatacctgagcagcgaggaagatcggaagaagggaaagaaattcgctcggtaccagctgggcgacctgctgctgcacctggaaaagaagcacggcgaggactggggaaaggtgtacgacgaggcctgggagcggattgacaagaaagtggaaggcctgagcaagcacatcaagctggaagaggaacggagaagcgaggacgcccagagcaaggccgccctgaccgactggctgcgggctaaggccagcttcgtgatcgagggcctgaaggaggccgacaaggacgagttctgcagatgcgagctgaagctgcagaagtggtacggggacctgcggggaaagcccttcgccatcgaagccgagaacagcatcctggacatcagcggcttcagcaagcagtacaactgtgccttcatctggcagaaggacggcgtgaagaagctgaacctgtacctgatcatcaactacttcaagggcggcaagctgcggttcaagaagatcaaacctgaagccttcgaagccaacagattctacaccgtgatcaacaaaaagagcggcgagatcgtgcccatggaggtgaacttcaacttcgacgaccccaacctgatcatcctgcctctggcctttggcaagagacagggcagagaattcatctggaacgacctgctgtccctggaaaccggcagcctgaagctggccaacggaagagtgatcgagaagacactgtacaacagaagaacccggcaggatgagcctgccctgttcgtggccctgaccttcgagcggcgggaggtcctggactcctccaatatcaaaccaatgaacctgatcggcgtggcaagaggcgaaaacatccccgccgtgatcgccctgaccgaccccgagggctgcccactgagccggtttaaggatagcctgggaaacccaacccacatcctgagaatcggcgagagctataaggagaagcagcggaccatccaggccaagaaggaggtggagcagcggagagccggcggctacagccggaagtacgccagcaaagccaagaatctggcagacgatatggtgagaaacaccgctagagatctgctgtactacgccgtgacccaggatgccatgctgatcttcgccaacctgagccggggcttcggccggcagggcaagcggaccttcatggccgagagacagtacacacggatggaggactggctgaccgccaagctggcctacgagggcctgagcaagacctacctgtccaagacactggcccagtacacctccaagacatgcagcaactgtgggtttaccatcaccagcgccgactacgacagggtgctggagaagctgaagaagacagcaacaggctggatgaccacaattaacggcaaggagctgaaggtggagggccagattacctactacaacagatacaagagacagaacgtagtcaaggacctgtccgtcgagctggatagactgagcgaagaatctgtgaacaacgacatctcctcctggacaaagggcagaagcggagaagctctgagcctcctgaagaaaagattctcccatagacccgtgcaggagaagttcgtgtgcctgaactgcggcttcgagacacacgcagccgagcaagccgccctgaacatcgccagatcctggctgttcctgcggagccaggagtacaagaaataccagacaaacaagacaaccggcaacaccgataagagagccttcgtcgagacctggcagtccttttaccggaagaagcttaaggaggtgtggaaacctgccgtgcggtctggcggatctggcggaggctccacaagcgccagcgtggtgttcgaggacgtggccgtgaacttcacccccgaggagtgggccctgctgaaccccggccagaggaagctgtacagggacgtgatgctggagacctgcaggaacctgagcgccgtgggctgcaggagccagggcaacaccagcacccccaggccccagtggagcatcctgctgaacgagccccccggcgaggacaagaccggcatcttcaccaggaaggacagctgcagcgtgaccagccccaagaaaaagagaaaagtctaagctgccttctgcggggcttgccttctggccatgcccttcttctctcccttgcacctgtacctcttggtctttgaataaagcctgagtaggaaggctagcaaaaaaaaaaaaaaaaaaaaaaaaaaaaaaaaaaaaaaaaaaaaaaaaaaaaaaaaaaaaaaaaaaaaaaaaaaaaaaaa

SEQ ID NO: 6622 - RNA, 5797 nt, synthetic construct
  source 1..5797: mol_type = other RNA
aggaaataagagagaaaagaagagtaagaagaaatataagagccaccatggcccctaagaagaagcgtaaagtgagccggatggaacgcctcgtctacgaggtgcggcagaagtgcagaaacatcgaggacatctgcatctcctgcggatctctgaacgtgaccctggagcacccactgttcatcggcggcatgtgccagaactgtaaaaactgttttctggagtgtgcctatcaatacgacgatgacggctaccagagctactgcaccatctgttgcggcggaagagaggtgctgatgtgtggaaataacaactgctgccggtgcttctgcgtggaatgcgtggacctgctggtgggccccggcgccgcccaggccgctattaaggaagatccttggaactgctacatgtgcggccacaagggcacatacggcctgctgagacggagagaggactggcctagcagactgcagatgttcttcgccaataaccacgaccaggagttcgacccccctaaggtgtaccctcccgtccccgccgagaagagaaagcccatccgggtcctgagcctgttcgatggcatcgccaccggtctgctggtgctgaaggacctgggcatccaggtggataggtacattgcctccgaggtgtgcgaggactccatcaccgtgggaatggtgcgtcatcagggcaagatcatgtacgtgggcgacgtgcggagcgtgacacagaagcatatccaggagtggggccctttcgacctggtgatcggcggcagcccttgcaatgacctgagcatcgtgaacccagcccggaagggcctgtacgagggaaccggcagactgttcttcgagttttacagactgctgcacgacgcccggcctaaggaaggcgacgaccggcccttcttttggctgttcgagaatgtggtggccatgggagtcagcgacaagcgggatattagccggttcctggagagcaaccccgtgatgatcgatgccaaggaagtgagcgccgcccaccgggccagatacttctggggcaatctgcctggcatgaacagacccctggccagcaccgtgaacgacaagctggagctgcaggagtgcctggagcacggccggatcgccaagttcagcaaggtgagaaccatcaccacccgaagcaacagcatcaaacaaggcaaggaccagcactttcctgtgttcatgaacgagaaggaggacatcctgtggtgtaccgagatggagagagtgttcgggttcccagtccactacacagatgtcagcaacatgtctagactggccagacagagactgctgggaagaagctggtccgtccctgtgatcagacacctgttcgcccctctgaaggagtacttcgcctgcgtgagcagcggcaacagcaacgccaacagccggggccccagcttctctagcggcctggtgccactgtccctgagagggagccacatgggccccatggagatctacaaaaccgtgagcgcctggaagcggcagcctgtgcgcgtgctgagcctgtttcggaatatcgataaagtcctgaaaagcctgggattcctggagagcggctctggctccggcggtggcaccctgaagtacgtggaggatgtgacaaacgtggtcagacgggatgtggagaagtggggccccttcgatctggtgtacggcagcacccaacccctgggcagctcttgtgaccggtgccctggctggtacatgtttcagttccaccggatcctgcagtacgccctgccgagacaggagtcccagcggccattcttttggattttcatggacaacttgctgctgaccgaggatgaccaggaaactaccactcggttcctgcagaccgaagccgtgaccctgcaggacgtgagaggccgggactaccagaacgccatgcgggtgtggtccaacatccctggactgaaaagcaagcacgcacctctgacccctaaagaagaggagtacctgcaggcccaggtgcggagcagaagcaagctggacgcccctaaggtggatctgctggtgaagaattgcctcctgcccctgagagagtacttcaagtatttcagccagaatagtctgcccctgggcggcccaagcagcggcgcccctcctcccagcggcggcagcccagccggctccccaacctctaccgaggagggcacctctgagtccgccacccccgagagcggccctggcacctccaccgagcccagcgagggcagcgcacccggcagccctgccggcagccccacctccacagaggagggaaccagcaccgagcccagcgaaggcagcgccccaggcaccagcaccgagcctagtgagggcggctctggcggcggcagcgcccaggagattaaacggatcaacaagatcagaagaagacttgtgaaagacagcaacaccaagaaggccggcaagacaggccccatgaaaaccctgctggttagagtgatgacacccgatctgagagagcggctggaaaacctgagaaagaagcctgaaaatatcccccagcccatcagcaatacatctagagccaacctgaataagctgctgaccgattacaccgaaatgaagaaggcgatcctgcatgtgtactgggaagagttccagaaggaccctgtgggcctgatgagccgggtggcccagcctgccagcaagaagatcgatcagaacaagctgaaacctgagatggacgagaagggcaacctgaccaccgccggctttgcctgctctcagtgtggccagcccctgttcgtgtacaagctggagcaggtgtctgagaagggcaaggcttacaccaactacttcggacggtgcaatgtggccgagcacgaaaagctgatcctgctggcccagctgaagcccgagaaggatagcgacgaagccgtgacatatagcctgggaaagtttgggcagagggccctggatttctacagcattcatgtgaccaaggagtccacccaccccgtgaagcccctggcccagatcgccggaaacagatacgcctccggacctgtgggaaaggccctgagcgacgcatgtatgggcacaatcgcctccttcctgtctaagtaccaggacatcatcatcgaacaccagaaggtggtgaagggcaaccagaagagactggagagcctgcgggagctggccggcaaggaaaacctggaataccctagcgtgaccctgccacctcagcctcacaccaaggagggcgttgatgcctacaacgaagtgatcgcccgggtgcgaatgtgggtgaacctgaacctgtggcagaagctgaagctaagcagagatgatgccaagcctctgctgagactgaagggattcccttcctttcctctggtcgagagacaggccaacgaagtggactggtgggacatggtgtgtaacgtgaagaagctgatcaacgagaaaaaggaggatggcaaggtgttttggcagaatctggctggctacaagagacaggaagccctgagaccatacctgagcagcgaggaagatcggaagaagggaaagaaattcgctcggtaccagctgggcgacctgctgctgcacctggaaaagaagcacggcgaggactggggaaaggtgtacgacgaggcctgggagcggattgacaagaaagtggaaggcctgagcaagcacatcaagctggaagaggaacggagaagcgaggacgcccagagcaaggccgccctgaccgactggctgcgggctaaggccagcttcgtgatcgagggcctgaaggaggccgacaaggacgagttctgcagatgcgagctgaagctgcagaagtggtacggggacctgcggggaaagcccttcgccatcgaagccgagaacagcatcctggacatcagcggcttcagcaagcagtacaactgtgccttcatctggcagaaggacggcgtgaagaagctgaacctgtacctgatcatcaactacttcaagggcggcaagctgcggttcaagaagatcaaacctgaagccttcgaagccaacagattctacaccgtgatcaacaaaaagagcggcgagatcgtgcccatggaggtgaacttcaacttcgacgaccccaacctgatcatcctgcctctggcctttggcaagagacagggcagagaattcatctggaacgacctgctgtccctggaaaccggcagcctgaagctggccaacggaagagtgatcgagaagacactgtacaacagaagaacccggcaggatgagcctgccctgttcgtggccctgaccttcgagcggcgggaggtcctggactcctccaatatcaaaccaatgaacctgatcggcgtggcaagaggcgaaaacatccccgccgtgatcgccctgaccgaccccgagggctgcccactgagccggtttaaggatagcctgggaaacccaacccacatcctgagaatcggcgagagctataaggagaagcagcggaccatccaggccaagaaggaggtggagcagcggagagccggcggctacagccggaagtacgccagcaaagccaagaatctggcagacgatatggtgagaaacaccgctagagatctgctgtactacgccgtgacccaggatgccatgctgatcttcgccaacctgagccggggcttcggccggcagggcaagcggaccttcatggccgagagacagtacacacggatggaggactggctgaccgccaagctggcctacgagggcctgagcaagacctacctgtccaagacactggcccagtacacctccaagacatgcagcaactgtgggtttaccatcaccagcgccgactacgacagggtgctggagaagctgaagaagacagcaacaggctggatgaccacaattaacggcaaggagctgaaggtggagggccagattacctactacaacagatacaagagacagaacgtagtcaaggacctgtccgtcgagctggatagactgagcgaagaatctgtgaacaacgacatctcctcctggacaaagggcagaagcggagaagctctgagcctcctgaagaaaagattctcccatagacccgtgcaggagaagttcgtgtgcctgaactgcggcttcgagacacacgcagccgagcaagccgccctgaacatcgccagatcctggctgttcctgcggagccaggagtacaagaaataccagacaaacaagacaaccggcaacaccgataagagagccttcgtcgagacctggcagtccttttaccggaagaagcttaaggaggtgtggaaacctgccgtgcggtctggcggatctggcggaggctccacaagcagcctgaccctggaggacgtggccgtggacttcacctgggaggagtggcagctgctgggccccgcccagaaggacctgtacagggacgtgatgctggagaactacagcaacctggtggccgtgggctaccaggccagcaagcccgacgccctgagcaagctggagcagggcgaggagccctgcaccaccgaggacgagatctacaccaggatctgctgcggcggccagccccagacctgcagcaccagccccaagaaaaagagaaaagtctaagctgccttctgcggggcttgccttctggccatgcccttcttctctcccttgcacctgtacctcttggtctttgaataaagcctgagtaggaaggctagcaaaaaaaaaaaaaaaaaaaaaaaaaaaaaaaaaaaaaaaaaaaaaaaaaaaaaaaaaaaaaaaaaaaaaaaaaaaaaaaa

SEQ ID NO: 6623 - RNA, 5797 nt, synthetic construct
  source 1..5797: mol_type = other RNA
aggaaataagagagaaaagaagagtaagaagaaatataagagccaccatggcccctaagaagaagcgtaaagtgagccggatggaacgcctcgtctacgaggtgcggcagaagtgcagaaacatcgaggacatctgcatctcctgcggatctctgaacgtgaccctggagcacccactgttcatcggcggcatgtgccagaactgtaaaaactgttttctggagtgtgcctatcaatacgacgatgacggctaccagagctactgcaccatctgttgcggcggaagagaggtgctgatgtgtggaaataacaactgctgccggtgcttctgcgtggaatgcgtggacctgctggtgggccccggcgccgcccaggccgctattaaggaagatccttggaactgctacatgtgcggccacaagggcacatacggcctgctgagacggagagaggactggcctagcagactgcagatgttcttcgccaataaccacgaccaggagttcgacccccctaaggtgtaccctcccgtccccgccgagaagagaaagcccatccgggtcctgagcctgttcgatggcatcgccaccggtctgctggtgctgaaggacctgggcatccaggtggataggtacattgcctccgaggtgtgcgaggactccatcaccgtgggaatggtgcgtcatcagggcaagatcatgtacgtgggcgacgtgcggagcgtgacacagaagcatatccaggagtggggccctttcgacctggtgatcggcggcagcccttgcaatgacctgagcatcgtgaacccagcccggaagggcctgtacgagggaaccggcagactgttcttcgagttttacagactgctgcacgacgcccggcctaaggaaggcgacgaccggcccttcttttggctgttcgagaatgtggtggccatgggagtcagcgacaagcgggatattagccggttcctggagagcaaccccgtgatgatcgatgccaaggaagtgagcgccgcccaccgggccagatacttctggggcaatctgcctggcatgaacagacccctggccagcaccgtgaacgacaagctggagctgcaggagtgcctggagcacggccggatcgccaagttcagcaaggtgagaaccatcaccacccgaagcaacagcatcaaacaaggcaaggaccagcactttcctgtgttcatgaacgagaaggaggacatcctgtggtgtaccgagatggagagagtgttcgggttcccagtccactacacagatgtcagcaacatgtctagactggccagacagagactgctgggaagaagctggtccgtccctgtgatcagacacctgttcgcccctctgaaggagtacttcgcctgcgtgagcagcggcaacagcaacgccaacagccggggccccagcttctctagcggcctggtgccactgtccctgagagggagccacatgggccccatggagatctacaaaaccgtgagcgcctggaagcggcagcctgtgcgcgtgctgagcctgtttcggaatatcgataaagtcctgaaaagcctgggattcctggagagcggctctggctccggcggtggcaccctgaagtacgtggaggatgtgacaaacgtggtcagacgggatgtggagaagtggggccccttcgatctggtgtacggcagcacccaacccctgggcagctcttgtgaccggtgccctggctggtacatgtttcagttccaccggatcctgcagtacgccctgccgagacaggagtcccagcggccattcttttggattttcatggacaacttgctgctgaccgaggatgaccaggaaactaccactcggttcctgcagaccgaagccgtgaccctgcaggacgtgagaggccgggactaccagaacgccatgcgggtgtggtccaacatccctggactgaaaagcaagcacgcacctctgacccctaaagaagaggagtacctgcaggcccaggtgcggagcagaagcaagctggacgcccctaaggtggatctgctggtgaagaattgcctcctgcccctgagagagtacttcaagtatttcagccagaatagtctgcccctgggcggcccaagcagcggcgcccctcctcccagcggcggcagcccagccggctccccaacctctaccgaggagggcacctctgagtccgccacccccgagagcggccctggcacctccaccgagcccagcgagggcagcgcacccggcagccctgccggcagccccacctccacagaggagggaaccagcaccgagcccagcgaaggcagcgccccaggcaccagcaccgagcctagtgagggcggctctggcggcggcagcgcccaggagattaaacggatcaacaagatcagaagaagacttgtgaaagacagcaacaccaagaaggccggcaagacaggccccatgaaaaccctgctggttagagtgatgacacccgatctgagagagcggctggaaaacctgagaaagaagcctgaaaatatcccccagcccatcagcaatacatctagagccaacctgaataagctgctgaccgattacaccgaaatgaagaaggcgatcctgcatgtgtactgggaagagttccagaaggaccctgtgggcctgatgagccgggtggcccagcctgccagcaagaagatcgatcagaacaagctgaaacctgagatggacgagaagggcaacctgaccaccgccggctttgcctgctctcagtgtggccagcccctgttcgtgtacaagctggagcaggtgtctgagaagggcaaggcttacaccaactacttcggacggtgcaatgtggccgagcacgaaaagctgatcctgctggcccagctgaagcccgagaaggatagcgacgaagccgtgacatatagcctgggaaagtttgggcagagggccctggatttctacagcattcatgtgaccaaggagtccacccaccccgtgaagcccctggcccagatcgccggaaacagatacgcctccggacctgtgggaaaggccctgagcgacgcatgtatgggcacaatcgcctccttcctgtctaagtaccaggacatcatcatcgaacaccagaaggtggtgaagggcaaccagaagagactggagagcctgcgggagctggccggcaaggaaaacctggaataccctagcgtgaccctgccacctcagcctcacaccaaggagggcgttgatgcctacaacgaagtgatcgcccgggtgcgaatgtgggtgaacctgaacctgtggcagaagctgaagctaagcagagatgatgccaagcctctgctgagactgaagggattcccttcctttcctctggtcgagagacaggccaacgaagtggactggtgggacatggtgtgtaacgtgaagaagctgatcaacgagaaaaaggaggatggcaaggtgttttggcagaatctggctggctacaagagacaggaagccctgagaccatacctgagcagcgaggaagatcggaagaagggaaagaaattcgctcggtaccagctgggcgacctgctgctgcacctggaaaagaagcacggcgaggactggggaaaggtgtacgacgaggcctgggagcggattgacaagaaagtggaaggcctgagcaagcacatcaagctggaagaggaacggagaagcgaggacgcccagagcaaggccgccctgaccgactggctgcgggctaaggccagcttcgtgatcgagggcctgaaggaggccgacaaggacgagttctgcagatgcgagctgaagctgcagaagtggtacggggacctgcggggaaagcccttcgccatcgaagccgagaacagcatcctggacatcagcggcttcagcaagcagtacaactgtgccttcatctggcagaaggacggcgtgaagaagctgaacctgtacctgatcatcaactacttcaagggcggcaagctgcggttcaagaagatcaaacctgaagccttcgaagccaacagattctacaccgtgatcaacaaaaagagcggcgagatcgtgcccatggaggtgaacttcaacttcgacgaccccaacctgatcatcctgcctctggcctttggcaagagacagggcagagaattcatctggaacgacctgctgtccctggaaaccggcagcctgaagctggccaacggaagagtgatcgagaagacactgtacaacagaagaacccggcaggatgagcctgccctgttcgtggccctgaccttcgagcggcgggaggtcctggactcctccaatatcaaaccaatgaacctgatcggcgtggcaagaggcgaaaacatccccgccgtgatcgccctgaccgaccccgagggctgcccactgagccggtttaaggatagcctgggaaacccaacccacatcctgagaatcggcgagagctataaggagaagcagcggaccatccaggccaagaaggaggtggagcagcggagagccggcggctacagccggaagtacgccagcaaagccaagaatctggcagacgatatggtgagaaacaccgctagagatctgctgtactacgccgtgacccaggatgccatgctgatcttcgccaacctgagccggggcttcggccggcagggcaagcggaccttcatggccgagagacagtacacacggatggaggactggctgaccgccaagctggcctacgagggcctgagcaagacctacctgtccaagacactggcccagtacacctccaagacatgcagcaactgtgggtttaccatcaccagcgccgactacgacagggtgctggagaagctgaagaagacagcaacaggctggatgaccacaattaacggcaaggagctgaaggtggagggccagattacctactacaacagatacaagagacagaacgtagtcaaggacctgtccgtcgagctggatagactgagcgaagaatctgtgaacaacgacatctcctcctggacaaagggcagaagcggagaagctctgagcctcctgaagaaaagattctcccatagacccgtgcaggagaagttcgtgtgcctgaactgcggcttcgagacacacgcagccgagcaagccgccctgaacatcgccagatcctggctgttcctgcggagccaggagtacaagaaataccagacaaacaagacaaccggcaacaccgataagagagccttcgtcgagacctggcagtccttttaccggaagaagcttaaggaggtgtggaaacctgccgtgcggtctggcggatctggcggaggctccacaagcttccaggccagcgtgagcttccaggacgtgaccgtggagttcagccaggaggagtggcagcacctgggccccgtggagaggaccctgtacagggacgtgatgctggagaactacagccacctggtgagcgtgggctactgcttcaccaagcccgagctgatcttcaccctggagcagggcgaggacccctggctgctggagaaggagaagggcttcctgagcaggaacagccccgaggacagcaccagccccaagaaaaagagaaaagtctaagctgccttctgcggggcttgccttctggccatgcccttcttctctcccttgcacctgtacctcttggtctttgaataaagcctgagtaggaaggctagcaaaaaaaaaaaaaaaaaaaaaaaaaaaaaaaaaaaaaaaaaaaaaaaaaaaaaaaaaaaaaaaaaaaaaaaaaaaaaaaa

SEQ ID NO: 6624 - RNA, 5797 nt, synthetic construct
  source 1..5797: mol_type = other RNA
aggaaataagagagaaaagaagagtaagaagaaatataagagccaccatggcccctaagaagaagcgtaaagtgagccggatggaacgcctcgtctacgaggtgcggcagaagtgcagaaacatcgaggacatctgcatctcctgcggatctctgaacgtgaccctggagcacccactgttcatcggcggcatgtgccagaactgtaaaaactgttttctggagtgtgcctatcaatacgacgatgacggctaccagagctactgcaccatctgttgcggcggaagagaggtgctgatgtgtggaaataacaactgctgccggtgcttctgcgtggaatgcgtggacctgctggtgggccccggcgccgcccaggccgctattaaggaagatccttggaactgctacatgtgcggccacaagggcacatacggcctgctgagacggagagaggactggcctagcagactgcagatgttcttcgccaataaccacgaccaggagttcgacccccctaaggtgtaccctcccgtccccgccgagaagagaaagcccatccgggtcctgagcctgttcgatggcatcgccaccggtctgctggtgctgaaggacctgggcatccaggtggataggtacattgcctccgaggtgtgcgaggactccatcaccgtgggaatggtgcgtcatcagggcaagatcatgtacgtgggcgacgtgcggagcgtgacacagaagcatatccaggagtggggccctttcgacctggtgatcggcggcagcccttgcaatgacctgagcatcgtgaacccagcccggaagggcctgtacgagggaaccggcagactgttcttcgagttttacagactgctgcacgacgcccggcctaaggaaggcgacgaccggcccttcttttggctgttcgagaatgtggtggccatgggagtcagcgacaagcgggatattagccggttcctggagagcaaccccgtgatgatcgatgccaaggaagtgagcgccgcccaccgggccagatacttctggggcaatctgcctggcatgaacagacccctggccagcaccgtgaacgacaagctggagctgcaggagtgcctggagcacggccggatcgccaagttcagcaaggtgagaaccatcaccacccgaagcaacagcatcaaacaaggcaaggaccagcactttcctgtgttcatgaacgagaaggaggacatcctgtggtgtaccgagatggagagagtgttcgggttcccagtccactacacagatgtcagcaacatgtctagactggccagacagagactgctgggaagaagctggtccgtccctgtgatcagacacctgttcgcccctctgaaggagtacttcgcctgcgtgagcagcggcaacagcaacgccaacagccggggccccagcttctctagcggcctggtgccactgtccctgagagggagccacatgggccccatggagatctacaaaaccgtgagcgcctggaagcggcagcctgtgcgcgtgctgagcctgtttcggaatatcgataaagtcctgaaaagcctgggattcctggagagcggctctggctccggcggtggcaccctgaagtacgtggaggatgtgacaaacgtggtcagacgggatgtggagaagtggggccccttcgatctggtgtacggcagcacccaacccctgggcagctcttgtgaccggtgccctggctggtacatgtttcagttccaccggatcctgcagtacgccctgccgagacaggagtcccagcggccattcttttggattttcatggacaacttgctgctgaccgaggatgaccaggaaactaccactcggttcctgcagaccgaagccgtgaccctgcaggacgtgagaggccgggactaccagaacgccatgcgggtgtggtccaacatccctggactgaaaagcaagcacgcacctctgacccctaaagaagaggagtacctgcaggcccaggtgcggagcagaagcaagctggacgcccctaaggtggatctgctggtgaagaattgcctcctgcccctgagagagtacttcaagtatttcagccagaatagtctgcccctgggcggcccaagcagcggcgcccctcctcccagcggcggcagcccagccggctccccaacctctaccgaggagggcacctctgagtccgccacccccgagagcggccctggcacctccaccgagcccagcgagggcagcgcacccggcagccctgccggcagccccacctccacagaggagggaaccagcaccgagcccagcgaaggcagcgccccaggcaccagcaccgagcctagtgagggcggctctggcggcggcagcgcccaggagattaaacggatcaacaagatcagaagaagacttgtgaaagacagcaacaccaagaaggccggcaagacaggccccatgaaaaccctgctggttagagtgatgacacccgatctgagagagcggctggaaaacctgagaaagaagcctgaaaatatcccccagcccatcagcaatacatctagagccaacctgaataagctgctgaccgattacaccgaaatgaagaaggcgatcctgcatgtgtactgggaagagttccagaaggaccctgtgggcctgatgagccgggtggcccagcctgccagcaagaagatcgatcagaacaagctgaaacctgagatggacgagaagggcaacctgaccaccgccggctttgcctgctctcagtgtggccagcccctgttcgtgtacaagctggagcaggtgtctgagaagggcaaggcttacaccaactacttcggacggtgcaatgtggccgagcacgaaaagctgatcctgctggcccagctgaagcccgagaaggatagcgacgaagccgtgacatatagcctgggaaagtttgggcagagggccctggatttctacagcattcatgtgaccaaggagtccacccaccccgtgaagcccctggcccagatcgccggaaacagatacgcctccggacctgtgggaaaggccctgagcgacgcatgtatgggcacaatcgcctccttcctgtctaagtaccaggacatcatcatcgaacaccagaaggtggtgaagggcaaccagaagagactggagagcctgcgggagctggccggcaaggaaaacctggaataccctagcgtgaccctgccacctcagcctcacaccaaggagggcgttgatgcctacaacgaagtgatcgcccgggtgcgaatgtgggtgaacctgaacctgtggcagaagctgaagctaagcagagatgatgccaagcctctgctgagactgaagggattcccttcctttcctctggtcgagagacaggccaacgaagtggactggtgggacatggtgtgtaacgtgaagaagctgatcaacgagaaaaaggaggatggcaaggtgttttggcagaatctggctggctacaagagacaggaagccctgagaccatacctgagcagcgaggaagatcggaagaagggaaagaaattcgctcggtaccagctgggcgacctgctgctgcacctggaaaagaagcacggcgaggactggggaaaggtgtacgacgaggcctgggagcggattgacaagaaagtggaaggcctgagcaagcacatcaagctggaagaggaacggagaagcgaggacgcccagagcaaggccgccctgaccgactggctgcgggctaaggccagcttcgtgatcgagggcctgaaggaggccgacaaggacgagttctgcagatgcgagctgaagctgcagaagtggtacggggacctgcggggaaagcccttcgccatcgaagccgagaacagcatcctggacatcagcggcttcagcaagcagtacaactgtgccttcatctggcagaaggacggcgtgaagaagctgaacctgtacctgatcatcaactacttcaagggcggcaagctgcggttcaagaagatcaaacctgaagccttcgaagccaacagattctacaccgtgatcaacaaaaagagcggcgagatcgtgcccatggaggtgaacttcaacttcgacgaccccaacctgatcatcctgcctctggcctttggcaagagacagggcagagaattcatctggaacgacctgctgtccctggaaaccggcagcctgaagctggccaacggaagagtgatcgagaagacactgtacaacagaagaacccggcaggatgagcctgccctgttcgtggccctgaccttcgagcggcgggaggtcctggactcctccaatatcaaaccaatgaacctgatcggcgtggcaagaggcgaaaacatccccgccgtgatcgccctgaccgaccccgagggctgcccactgagccggtttaaggatagcctgggaaacccaacccacatcctgagaatcggcgagagctataaggagaagcagcggaccatccaggccaagaaggaggtggagcagcggagagccggcggctacagccggaagtacgccagcaaagccaagaatctggcagacgatatggtgagaaacaccgctagagatctgctgtactacgccgtgacccaggatgccatgctgatcttcgccaacctgagccggggcttcggccggcagggcaagcggaccttcatggccgagagacagtacacacggatggaggactggctgaccgccaagctggcctacgagggcctgagcaagacctacctgtccaagacactggcccagtacacctccaagacatgcagcaactgtgggtttaccatcaccagcgccgactacgacagggtgctggagaagctgaagaagacagcaacaggctggatgaccacaattaacggcaaggagctgaaggtggagggccagattacctactacaacagatacaagagacagaacgtagtcaaggacctgtccgtcgagctggatagactgagcgaagaatctgtgaacaacgacatctcctcctggacaaagggcagaagcggagaagctctgagcctcctgaagaaaagattctcccatagacccgtgcaggagaagttcgtgtgcctgaactgcggcttcgagacacacgcagccgagcaagccgccctgaacatcgccagatcctggctgttcctgcggagccaggagtacaagaaataccagacaaacaagacaaccggcaacaccgataagagagccttcgtcgagacctggcagtccttttaccggaagaagcttaaggaggtgtggaaacctgccgtgcggtctggcggatctggcggaggctccacaagcccccaggtgagcctgaccttcgaggacgtggccgtgctgttcaccagggacgagtggaggaagctggcccccagccagaggaacctgtacagggacgtgatgctggagaactacaggaacctggtgagcctgggcctgcccttcaccaagcccaaggtgatcagcctgctgcagcagggcgaggacccctggaaggtggagaaggactgcttcggcggcagcttcctgggctgcaagagcaacaccagccccaagaaaaagagaaaagtctaagctgccttctgcggggcttgccttctggccatgcccttcttctctcccttgcacctgtacctcttggtctttgaataaagcctgagtaggaaggctagcaaaaaaaaaaaaaaaaaaaaaaaaaaaaaaaaaaaaaaaaaaaaaaaaaaaaaaaaaaaaaaaaaaaaaaaaaaaaaaaa

SEQ ID NO: 6625 - RNA, 5794 nt, synthetic construct
  source 1..5794: mol_type = other RNA
aggaaataagagagaaaagaagagtaagaagaaatataagagccaccatggcccctaagaagaagcgtaaagtgagccggatggaacgcctcgtctacgaggtgcggcagaagtgcagaaacatcgaggacatctgcatctcctgcggatctctgaacgtgaccctggagcacccactgttcatcggcggcatgtgccagaactgtaaaaactgttttctggagtgtgcctatcaatacgacgatgacggctaccagagctactgcaccatctgttgcggcggaagagaggtgctgatgtgtggaaataacaactgctgccggtgcttctgcgtggaatgcgtggacctgctggtgggccccggcgccgcccaggccgctattaaggaagatccttggaactgctacatgtgcggccacaagggcacatacggcctgctgagacggagagaggactggcctagcagactgcagatgttcttcgccaataaccacgaccaggagttcgacccccctaaggtgtaccctcccgtccccgccgagaagagaaagcccatccgggtcctgagcctgttcgatggcatcgccaccggtctgctggtgctgaaggacctgggcatccaggtggataggtacattgcctccgaggtgtgcgaggactccatcaccgtgggaatggtgcgtcatcagggcaagatcatgtacgtgggcgacgtgcggagcgtgacacagaagcatatccaggagtggggccctttcgacctggtgatcggcggcagcccttgcaatgacctgagcatcgtgaacccagcccggaagggcctgtacgagggaaccggcagactgttcttcgagttttacagactgctgcacgacgcccggcctaaggaaggcgacgaccggcccttcttttggctgttcgagaatgtggtggccatgggagtcagcgacaagcgggatattagccggttcctggagagcaaccccgtgatgatcgatgccaaggaagtgagcgccgcccaccgggccagatacttctggggcaatctgcctggcatgaacagacccctggccagcaccgtgaacgacaagctggagctgcaggagtgcctggagcacggccggatcgccaagttcagcaaggtgagaaccatcaccacccgaagcaacagcatcaaacaaggcaaggaccagcactttcctgtgttcatgaacgagaaggaggacatcctgtggtgtaccgagatggagagagtgttcgggttcccagtccactacacagatgtcagcaacatgtctagactggccagacagagactgctgggaagaagctggtccgtccctgtgatcagacacctgttcgcccctctgaaggagtacttcgcctgcgtgagcagcggcaacagcaacgccaacagccggggccccagcttctctagcggcctggtgccactgtccctgagagggagccacatgggccccatggagatctacaaaaccgtgagcgcctggaagcggcagcctgtgcgcgtgctgagcctgtttcggaatatcgataaagtcctgaaaagcctgggattcctggagagcggctctggctccggcggtggcaccctgaagtacgtggaggatgtgacaaacgtggtcagacgggatgtggagaagtggggccccttcgatctggtgtacggcagcacccaacccctgggcagctcttgtgaccggtgccctggctggtacatgtttcagttccaccggatcctgcagtacgccctgccgagacaggagtcccagcggccattcttttggattttcatggacaacttgctgctgaccgaggatgaccaggaaactaccactcggttcctgcagaccgaagccgtgaccctgcaggacgtgagaggccgggactaccagaacgccatgcgggtgtggtccaacatccctggactgaaaagcaagcacgcacctctgacccctaaagaagaggagtacctgcaggcccaggtgcggagcagaagcaagctggacgcccctaaggtggatctgctggtgaagaattgcctcctgcccctgagagagtacttcaagtatttcagccagaatagtctgcccctgggcggcccaagcagcggcgcccctcctcccagcggcggcagcccagccggctccccaacctctaccgaggagggcacctctgagtccgccacccccgagagcggccctggcacctccaccgagcccagcgagggcagcgcacccggcagccctgccggcagccccacctccacagaggagggaaccagcaccgagcccagcgaaggcagcgccccaggcaccagcaccgagcctagtgagggcggctctggcggcggcagcgcccaggagattaaacggatcaacaagatcagaagaagacttgtgaaagacagcaacaccaagaaggccggcaagacaggccccatgaaaaccctgctggttagagtgatgacacccgatctgagagagcggctggaaaacctgagaaagaagcctgaaaatatcccccagcccatcagcaatacatctagagccaacctgaataagctgctgaccgattacaccgaaatgaagaaggcgatcctgcatgtgtactgggaagagttccagaaggaccctgtgggcctgatgagccgggtggcccagcctgccagcaagaagatcgatcagaacaagctgaaacctgagatggacgagaagggcaacctgaccaccgccggctttgcctgctctcagtgtggccagcccctgttcgtgtacaagctggagcaggtgtctgagaagggcaaggcttacaccaactacttcggacggtgcaatgtggccgagcacgaaaagctgatcctgctggcccagctgaagcccgagaaggatagcgacgaagccgtgacatatagcctgggaaagtttgggcagagggccctggatttctacagcattcatgtgaccaaggagtccacccaccccgtgaagcccctggcccagatcgccggaaacagatacgcctccggacctgtgggaaaggccctgagcgacgcatgtatgggcacaatcgcctccttcctgtctaagtaccaggacatcatcatcgaacaccagaaggtggtgaagggcaaccagaagagactggagagcctgcgggagctggccggcaaggaaaacctggaataccctagcgtgaccctgccacctcagcctcacaccaaggagggcgttgatgcctacaacgaagtgatcgcccgggtgcgaatgtgggtgaacctgaacctgtggcagaagctgaagctaagcagagatgatgccaagcctctgctgagactgaagggattcccttcctttcctctggtcgagagacaggccaacgaagtggactggtgggacatggtgtgtaacgtgaagaagctgatcaacgagaaaaaggaggatggcaaggtgttttggcagaatctggctggctacaagagacaggaagccctgagaccatacctgagcagcgaggaagatcggaagaagggaaagaaattcgctcggtaccagctgggcgacctgctgctgcacctggaaaagaagcacggcgaggactggggaaaggtgtacgacgaggcctgggagcggattgacaagaaagtggaaggcctgagcaagcacatcaagctggaagaggaacggagaagcgaggacgcccagagcaaggccgccctgaccgactggctgcgggctaaggccagcttcgtgatcgagggcctgaaggaggccgacaaggacgagttctgcagatgcgagctgaagctgcagaagtggtacggggacctgcggggaaagcccttcgccatcgaagccgagaacagcatcctggacatcagcggcttcagcaagcagtacaactgtgccttcatctggcagaaggacggcgtgaagaagctgaacctgtacctgatcatcaactacttcaagggcggcaagctgcggttcaagaagatcaaacctgaagccttcgaagccaacagattctacaccgtgatcaacaaaaagagcggcgagatcgtgcccatggaggtgaacttcaacttcgacgaccccaacctgatcatcctgcctctggcctttggcaagagacagggcagagaattcatctggaacgacctgctgtccctggaaaccggcagcctgaagctggccaacggaagagtgatcgagaagacactgtacaacagaagaacccggcaggatgagcctgccctgttcgtggccctgaccttcgagcggcgggaggtcctggactcctccaatatcaaaccaatgaacctgatcggcgtggcaagaggcgaaaacatccccgccgtgatcgccctgaccgaccccgagggctgcccactgagccggtttaaggatagcctgggaaacccaacccacatcctgagaatcggcgagagctataaggagaagcagcggaccatccaggccaagaaggaggtggagcagcggagagccggcggctacagccggaagtacgccagcaaagccaagaatctggcagacgatatggtgagaaacaccgctagagatctgctgtactacgccgtgacccaggatgccatgctgatcttcgccaacctgagccggggcttcggccggcagggcaagcggaccttcatggccgagagacagtacacacggatggaggactggctgaccgccaagctggcctacgagggcctgagcaagacctacctgtccaagacactggcccagtacacctccaagacatgcagcaactgtgggtttaccatcaccagcgccgactacgacagggtgctggagaagctgaagaagacagcaacaggctggatgaccacaattaacggcaaggagctgaaggtggagggccagattacctactacaacagatacaagagacagaacgtagtcaaggacctgtccgtcgagctggatagactgagcgaagaatctgtgaacaacgacatctcctcctggacaaagggcagaagcggagaagctctgagcctcctgaagaaaagattctcccatagacccgtgcaggagaagttcgtgtgcctgaactgcggcttcgagacacacgcagccgagcaagccgccctgaacatcgccagatcctggctgttcctgcggagccaggagtacaagaaataccagacaaacaagacaaccggcaacaccgataagagagccttcgtcgagacctggcagtccttttaccggaagaagcttaaggaggtgtggaaacctgccgtgcggtctggcggatctggcggaggctccacaagcgacagcgtggccttcgaggacgtggccgtgaacttcacccaggaggagtgggccctgctgagccccagccagaagaacctgtacagagacgtgaccctggagaccttcagaaacctggccagcgtgggcatccagtggaaggaccaggacatcgagaacctgtaccagaacctgggcatcaagctgagaagcctggtggagagactgtgcggcagaaaggagggcaacgagcacagagagaccagccccaagaaaaagagaaaagtctaagctgccttctgcggggcttgccttctggccatgcccttcttctctcccttgcacctgtacctcttggtctttgaataaagcctgagtaggaaggctagcaaaaaaaaaaaaaaaaaaaaaaaaaaaaaaaaaaaaaaaaaaaaaaaaaaaaaaaaaaaaaaaaaaaaaaaaaaaaaaaa

SEQ ID NO: 6626 - RNA, 5797 nt, synthetic construct
  source 1..5797: mol_type = other RNA
aggaaataagagagaaaagaagagtaagaagaaatataagagccaccatggcccctaagaagaagcgtaaagtgagccggatggaacgcctcgtctacgaggtgcggcagaagtgcagaaacatcgaggacatctgcatctcctgcggatctctgaacgtgaccctggagcacccactgttcatcggcggcatgtgccagaactgtaaaaactgttttctggagtgtgcctatcaatacgacgatgacggctaccagagctactgcaccatctgttgcggcggaagagaggtgctgatgtgtggaaataacaactgctgccggtgcttctgcgtggaatgcgtggacctgctggtgggccccggcgccgcccaggccgctattaaggaagatccttggaactgctacatgtgcggccacaagggcacatacggcctgctgagacggagagaggactggcctagcagactgcagatgttcttcgccaataaccacgaccaggagttcgacccccctaaggtgtaccctcccgtccccgccgagaagagaaagcccatccgggtcctgagcctgttcgatggcatcgccaccggtctgctggtgctgaaggacctgggcatccaggtggataggtacattgcctccgaggtgtgcgaggactccatcaccgtgggaatggtgcgtcatcagggcaagatcatgtacgtgggcgacgtgcggagcgtgacacagaagcatatccaggagtggggccctttcgacctggtgatcggcggcagcccttgcaatgacctgagcatcgtgaacccagcccggaagggcctgtacgagggaaccggcagactgttcttcgagttttacagactgctgcacgacgcccggcctaaggaaggcgacgaccggcccttcttttggctgttcgagaatgtggtggccatgggagtcagcgacaagcgggatattagccggttcctggagagcaaccccgtgatgatcgatgccaaggaagtgagcgccgcccaccgggccagatacttctggggcaatctgcctggcatgaacagacccctggccagcaccgtgaacgacaagctggagctgcaggagtgcctggagcacggccggatcgccaagttcagcaaggtgagaaccatcaccacccgaagcaacagcatcaaacaaggcaaggaccagcactttcctgtgttcatgaacgagaaggaggacatcctgtggtgtaccgagatggagagagtgttcgggttcccagtccactacacagatgtcagcaacatgtctagactggccagacagagactgctgggaagaagctggtccgtccctgtgatcagacacctgttcgcccctctgaaggagtacttcgcctgcgtgagcagcggcaacagcaacgccaacagccggggccccagcttctctagcggcctggtgccactgtccctgagagggagccacatgggccccatggagatctacaaaaccgtgagcgcctggaagcggcagcctgtgcgcgtgctgagcctgtttcggaatatcgataaagtcctgaaaagcctgggattcctggagagcggctctggctccggcggtggcaccctgaagtacgtggaggatgtgacaaacgtggtcagacgggatgtggagaagtggggccccttcgatctggtgtacggcagcacccaacccctgggcagctcttgtgaccggtgccctggctggtacatgtttcagttccaccggatcctgcagtacgccctgccgagacaggagtcccagcggccattcttttggattttcatggacaacttgctgctgaccgaggatgaccaggaaactaccactcggttcctgcagaccgaagccgtgaccctgcaggacgtgagaggccgggactaccagaacgccatgcgggtgtggtccaacatccctggactgaaaagcaagcacgcacctctgacccctaaagaagaggagtacctgcaggcccaggtgcggagcagaagcaagctggacgcccctaaggtggatctgctggtgaagaattgcctcctgcccctgagagagtacttcaagtatttcagccagaatagtctgcccctgggcggcccaagcagcggcgcccctcctcccagcggcggcagcccagccggctccccaacctctaccgaggagggcacctctgagtccgccacccccgagagcggccctggcacctccaccgagcccagcgagggcagcgcacccggcagccctgccggcagccccacctccacagaggagggaaccagcaccgagcccagcgaaggcagcgccccaggcaccagcaccgagcctagtgagggcggctctggcggcggcagcgcccaggagattaaacggatcaacaagatcagaagaagacttgtgaaagacagcaacaccaagaaggccggcaagacaggccccatgaaaaccctgctggttagagtgatgacacccgatctgagagagcggctggaaaacctgagaaagaagcctgaaaatatcccccagcccatcagcaatacatctagagccaacctgaataagctgctgaccgattacaccgaaatgaagaaggcgatcctgcatgtgtactgggaagagttccagaaggaccctgtgggcctgatgagccgggtggcccagcctgccagcaagaagatcgatcagaacaagctgaaacctgagatggacgagaagggcaacctgaccaccgccggctttgcctgctctcagtgtggccagcccctgttcgtgtacaagctggagcaggtgtctgagaagggcaaggcttacaccaactacttcggacggtgcaatgtggccgagcacgaaaagctgatcctgctggcccagctgaagcccgagaaggatagcgacgaagccgtgacatatagcctgggaaagtttgggcagagggccctggatttctacagcattcatgtgaccaaggagtccacccaccccgtgaagcccctggcccagatcgccggaaacagatacgcctccggacctgtgggaaaggccctgagcgacgcatgtatgggcacaatcgcctccttcctgtctaagtaccaggacatcatcatcgaacaccagaaggtggtgaagggcaaccagaagagactggagagcctgcgggagctggccggcaaggaaaacctggaataccctagcgtgaccctgccacctcagcctcacaccaaggagggcgttgatgcctacaacgaagtgatcgcccgggtgcgaatgtgggtgaacctgaacctgtggcagaagctgaagctaagcagagatgatgccaagcctctgctgagactgaagggattcccttcctttcctctggtcgagagacaggccaacgaagtggactggtgggacatggtgtgtaacgtgaagaagctgatcaacgagaaaaaggaggatggcaaggtgttttggcagaatctggctggctacaagagacaggaagccctgagaccatacctgagcagcgaggaagatcggaagaagggaaagaaattcgctcggtaccagctgggcgacctgctgctgcacctggaaaagaagcacggcgaggactggggaaaggtgtacgacgaggcctgggagcggattgacaagaaagtggaaggcctgagcaagcacatcaagctggaagaggaacggagaagcgaggacgcccagagcaaggccgccctgaccgactggctgcgggctaaggccagcttcgtgatcgagggcctgaaggaggccgacaaggacgagttctgcagatgcgagctgaagctgcagaagtggtacggggacctgcggggaaagcccttcgccatcgaagccgagaacagcatcctggacatcagcggcttcagcaagcagtacaactgtgccttcatctggcagaaggacggcgtgaagaagctgaacctgtacctgatcatcaactacttcaagggcggcaagctgcggttcaagaagatcaaacctgaagccttcgaagccaacagattctacaccgtgatcaacaaaaagagcggcgagatcgtgcccatggaggtgaacttcaacttcgacgaccccaacctgatcatcctgcctctggcctttggcaagagacagggcagagaattcatctggaacgacctgctgtccctggaaaccggcagcctgaagctggccaacggaagagtgatcgagaagacactgtacaacagaagaacccggcaggatgagcctgccctgttcgtggccctgaccttcgagcggcgggaggtcctggactcctccaatatcaaaccaatgaacctgatcggcgtggcaagaggcgaaaacatccccgccgtgatcgccctgaccgaccccgagggctgcccactgagccggtttaaggatagcctgggaaacccaacccacatcctgagaatcggcgagagctataaggagaagcagcggaccatccaggccaagaaggaggtggagcagcggagagccggcggctacagccggaagtacgccagcaaagccaagaatctggcagacgatatggtgagaaacaccgctagagatctgctgtactacgccgtgacccaggatgccatgctgatcttcgccaacctgagccggggcttcggccggcagggcaagcggaccttcatggccgagagacagtacacacggatggaggactggctgaccgccaagctggcctacgagggcctgagcaagacctacctgtccaagacactggcccagtacacctccaagacatgcagcaactgtgggtttaccatcaccagcgccgactacgacagggtgctggagaagctgaagaagacagcaacaggctggatgaccacaattaacggcaaggagctgaaggtggagggccagattacctactacaacagatacaagagacagaacgtagtcaaggacctgtccgtcgagctggatagactgagcgaagaatctgtgaacaacgacatctcctcctggacaaagggcagaagcggagaagctctgagcctcctgaagaaaagattctcccatagacccgtgcaggagaagttcgtgtgcctgaactgcggcttcgagacacacgcagccgagcaagccgccctgaacatcgccagatcctggctgttcctgcggagccaggagtacaagaaataccagacaaacaagacaaccggcaacaccgataagagagccttcgtcgagacctggcagtccttttaccggaagaagcttaaggaggtgtggaaacctgccgtgcggtctggcggatctggcggaggctccacaagcatggccgccgccgccctgagggagcccgcccagggctacgtgaccttcgaggacgtggccgtgtacttcagccaggaggagtggaggctgctggacgaggcccagaggctgctgtacaggaacgtgatgctggagaacttcagcctgatggccagcctgggcctggccagcagcaagacccacgagatcacccagctggagagctgggaggagcccttcgtgcccgcctgggacgtgatgaccaccagccccaagaaaaagagaaaagtctaagctgccttctgcggggcttgccttctggccatgcccttcttctctcccttgcacctgtacctcttggtctttgaataaagcctgagtaggaaggctagcaaaaaaaaaaaaaaaaaaaaaaaaaaaaaaaaaaaaaaaaaaaaaaaaaaaaaaaaaaaaaaaaaaaaaaaaaaaaaaaa

SEQ ID NO: 6627 - RNA, 5797 nt, synthetic construct
  source 1..5797: mol_type = other RNA
aggaaataagagagaaaagaagagtaagaagaaatataagagccaccatggcccctaagaagaagcgtaaagtgagccggatggaacgcctcgtctacgaggtgcggcagaagtgcagaaacatcgaggacatctgcatctcctgcggatctctgaacgtgaccctggagcacccactgttcatcggcggcatgtgccagaactgtaaaaactgttttctggagtgtgcctatcaatacgacgatgacggctaccagagctactgcaccatctgttgcggcggaagagaggtgctgatgtgtggaaataacaactgctgccggtgcttctgcgtggaatgcgtggacctgctggtgggccccggcgccgcccaggccgctattaaggaagatccttggaactgctacatgtgcggccacaagggcacatacggcctgctgagacggagagaggactggcctagcagactgcagatgttcttcgccaataaccacgaccaggagttcgacccccctaaggtgtaccctcccgtccccgccgagaagagaaagcccatccgggtcctgagcctgttcgatggcatcgccaccggtctgctggtgctgaaggacctgggcatccaggtggataggtacattgcctccgaggtgtgcgaggactccatcaccgtgggaatggtgcgtcatcagggcaagatcatgtacgtgggcgacgtgcggagcgtgacacagaagcatatccaggagtggggccctttcgacctggtgatcggcggcagcccttgcaatgacctgagcatcgtgaacccagcccggaagggcctgtacgagggaaccggcagactgttcttcgagttttacagactgctgcacgacgcccggcctaaggaaggcgacgaccggcccttcttttggctgttcgagaatgtggtggccatgggagtcagcgacaagcgggatattagccggttcctggagagcaaccccgtgatgatcgatgccaaggaagtgagcgccgcccaccgggccagatacttctggggcaatctgcctggcatgaacagacccctggccagcaccgtgaacgacaagctggagctgcaggagtgcctggagcacggccggatcgccaagttcagcaaggtgagaaccatcaccacccgaagcaacagcatcaaacaaggcaaggaccagcactttcctgtgttcatgaacgagaaggaggacatcctgtggtgtaccgagatggagagagtgttcgggttcccagtccactacacagatgtcagcaacatgtctagactggccagacagagactgctgggaagaagctggtccgtccctgtgatcagacacctgttcgcccctctgaaggagtacttcgcctgcgtgagcagcggcaacagcaacgccaacagccggggccccagcttctctagcggcctggtgccactgtccctgagagggagccacatgggccccatggagatctacaaaaccgtgagcgcctggaagcggcagcctgtgcgcgtgctgagcctgtttcggaatatcgataaagtcctgaaaagcctgggattcctggagagcggctctggctccggcggtggcaccctgaagtacgtggaggatgtgacaaacgtggtcagacgggatgtggagaagtggggccccttcgatctggtgtacggcagcacccaacccctgggcagctcttgtgaccggtgccctggctggtacatgtttcagttccaccggatcctgcagtacgccctgccgagacaggagtcccagcggccattcttttggattttcatggacaacttgctgctgaccgaggatgaccaggaaactaccactcggttcctgcagaccgaagccgtgaccctgcaggacgtgagaggccgggactaccagaacgccatgcgggtgtggtccaacatccctggactgaaaagcaagcacgcacctctgacccctaaagaagaggagtacctgcaggcccaggtgcggagcagaagcaagctggacgcccctaaggtggatctgctggtgaagaattgcctcctgcccctgagagagtacttcaagtatttcagccagaatagtctgcccctgggcggcccaagcagcggcgcccctcctcccagcggcggcagcccagccggctccccaacctctaccgaggagggcacctctgagtccgccacccccgagagcggccctggcacctccaccgagcccagcgagggcagcgcacccggcagccctgccggcagccccacctccacagaggagggaaccagcaccgagcccagcgaaggcagcgccccaggcaccagcaccgagcctagtgagggcggctctggcggcggcagcgcccaggagattaaacggatcaacaagatcagaagaagacttgtgaaagacagcaacaccaagaaggccggcaagacaggccccatgaaaaccctgctggttagagtgatgacacccgatctgagagagcggctggaaaacctgagaaagaagcctgaaaatatcccccagcccatcagcaatacatctagagccaacctgaataagctgctgaccgattacaccgaaatgaagaaggcgatcctgcatgtgtactgggaagagttccagaaggaccctgtgggcctgatgagccgggtggcccagcctgccagcaagaagatcgatcagaacaagctgaaacctgagatggacgagaagggcaacctgaccaccgccggctttgcctgctctcagtgtggccagcccctgttcgtgtacaagctggagcaggtgtctgagaagggcaaggcttacaccaactacttcggacggtgcaatgtggccgagcacgaaaagctgatcctgctggcccagctgaagcccgagaaggatagcgacgaagccgtgacatatagcctgggaaagtttgggcagagggccctggatttctacagcattcatgtgaccaaggagtccacccaccccgtgaagcccctggcccagatcgccggaaacagatacgcctccggacctgtgggaaaggccctgagcgacgcatgtatgggcacaatcgcctccttcctgtctaagtaccaggacatcatcatcgaacaccagaaggtggtgaagggcaaccagaagagactggagagcctgcgggagctggccggcaaggaaaacctggaataccctagcgtgaccctgccacctcagcctcacaccaaggagggcgttgatgcctacaacgaagtgatcgcccgggtgcgaatgtgggtgaacctgaacctgtggcagaagctgaagctaagcagagatgatgccaagcctctgctgagactgaagggattcccttcctttcctctggtcgagagacaggccaacgaagtggactggtgggacatggtgtgtaacgtgaagaagctgatcaacgagaaaaaggaggatggcaaggtgttttggcagaatctggctggctacaagagacaggaagccctgagaccatacctgagcagcgaggaagatcggaagaagggaaagaaattcgctcggtaccagctgggcgacctgctgctgcacctggaaaagaagcacggcgaggactggggaaaggtgtacgacgaggcctgggagcggattgacaagaaagtggaaggcctgagcaagcacatcaagctggaagaggaacggagaagcgaggacgcccagagcaaggccgccctgaccgactggctgcgggctaaggccagcttcgtgatcgagggcctgaaggaggccgacaaggacgagttctgcagatgcgagctgaagctgcagaagtggtacggggacctgcggggaaagcccttcgccatcgaagccgagaacagcatcctggacatcagcggcttcagcaagcagtacaactgtgccttcatctggcagaaggacggcgtgaagaagctgaacctgtacctgatcatcaactacttcaagggcggcaagctgcggttcaagaagatcaaacctgaagccttcgaagccaacagattctacaccgtgatcaacaaaaagagcggcgagatcgtgcccatggaggtgaacttcaacttcgacgaccccaacctgatcatcctgcctctggcctttggcaagagacagggcagagaattcatctggaacgacctgctgtccctggaaaccggcagcctgaagctggccaacggaagagtgatcgagaagacactgtacaacagaagaacccggcaggatgagcctgccctgttcgtggccctgaccttcgagcggcgggaggtcctggactcctccaatatcaaaccaatgaacctgatcggcgtggcaagaggcgaaaacatccccgccgtgatcgccctgaccgaccccgagggctgcccactgagccggtttaaggatagcctgggaaacccaacccacatcctgagaatcggcgagagctataaggagaagcagcggaccatccaggccaagaaggaggtggagcagcggagagccggcggctacagccggaagtacgccagcaaagccaagaatctggcagacgatatggtgagaaacaccgctagagatctgctgtactacgccgtgacccaggatgccatgctgatcttcgccaacctgagccggggcttcggccggcagggcaagcggaccttcatggccgagagacagtacacacggatggaggactggctgaccgccaagctggcctacgagggcctgagcaagacctacctgtccaagacactggcccagtacacctccaagacatgcagcaactgtgggtttaccatcaccagcgccgactacgacagggtgctggagaagctgaagaagacagcaacaggctggatgaccacaattaacggcaaggagctgaaggtggagggccagattacctactacaacagatacaagagacagaacgtagtcaaggacctgtccgtcgagctggatagactgagcgaagaatctgtgaacaacgacatctcctcctggacaaagggcagaagcggagaagctctgagcctcctgaagaaaagattctcccatagacccgtgcaggagaagttcgtgtgcctgaactgcggcttcgagacacacgcagccgagcaagccgccctgaacatcgccagatcctggctgttcctgcggagccaggagtacaagaaataccagacaaacaagacaaccggcaacaccgataagagagccttcgtcgagacctggcagtccttttaccggaagaagcttaaggaggtgtggaaacctgccgtgcggtctggcggatctggcggaggctccacaagcctgcagggcggcgtgaccttcgaggacgtggccgtggacttcacccaggaggagtggcagaggctgagccccgagcagagggacctgtacagggacgtgaccctggagaactacaggaacctggtgagcatgggcgagcaggacagcaccaagcccgaggtgatcctgaggctggagaacggcgaggagccctggatggtgggcacccaggagctgaggagctgcagccccgccggcaaggacaccagccccaagaaaaagagaaaagtctaagctgccttctgcggggcttgccttctggccatgcccttcttctctcccttgcacctgtacctcttggtctttgaataaagcctgagtaggaaggctagcaaaaaaaaaaaaaaaaaaaaaaaaaaaaaaaaaaaaaaaaaaaaaaaaaaaaaaaaaaaaaaaaaaaaaaaaaaaaaaaa

SEQ ID NO: 6628 - RNA, 5797 nt, synthetic construct
  source 1..5797: mol_type = other RNA
aggaaataagagagaaaagaagagtaagaagaaatataagagccaccatggcccctaagaagaagcgtaaagtgagccggatggaacgcctcgtctacgaggtgcggcagaagtgcagaaacatcgaggacatctgcatctcctgcggatctctgaacgtgaccctggagcacccactgttcatcggcggcatgtgccagaactgtaaaaactgttttctggagtgtgcctatcaatacgacgatgacggctaccagagctactgcaccatctgttgcggcggaagagaggtgctgatgtgtggaaataacaactgctgccggtgcttctgcgtggaatgcgtggacctgctggtgggccccggcgccgcccaggccgctattaaggaagatccttggaactgctacatgtgcggccacaagggcacatacggcctgctgagacggagagaggactggcctagcagactgcagatgttcttcgccaataaccacgaccaggagttcgacccccctaaggtgtaccctcccgtccccgccgagaagagaaagcccatccgggtcctgagcctgttcgatggcatcgccaccggtctgctggtgctgaaggacctgggcatccaggtggataggtacattgcctccgaggtgtgcgaggactccatcaccgtgggaatggtgcgtcatcagggcaagatcatgtacgtgggcgacgtgcggagcgtgacacagaagcatatccaggagtggggccctttcgacctggtgatcggcggcagcccttgcaatgacctgagcatcgtgaacccagcccggaagggcctgtacgagggaaccggcagactgttcttcgagttttacagactgctgcacgacgcccggcctaaggaaggcgacgaccggcccttcttttggctgttcgagaatgtggtggccatgggagtcagcgacaagcgggatattagccggttcctggagagcaaccccgtgatgatcgatgccaaggaagtgagcgccgcccaccgggccagatacttctggggcaatctgcctggcatgaacagacccctggccagcaccgtgaacgacaagctggagctgcaggagtgcctggagcacggccggatcgccaagttcagcaaggtgagaaccatcaccacccgaagcaacagcatcaaacaaggcaaggaccagcactttcctgtgttcatgaacgagaaggaggacatcctgtggtgtaccgagatggagagagtgttcgggttcccagtccactacacagatgtcagcaacatgtctagactggccagacagagactgctgggaagaagctggtccgtccctgtgatcagacacctgttcgcccctctgaaggagtacttcgcctgcgtgagcagcggcaacagcaacgccaacagccggggccccagcttctctagcggcctggtgccactgtccctgagagggagccacatgggccccatggagatctacaaaaccgtgagcgcctggaagcggcagcctgtgcgcgtgctgagcctgtttcggaatatcgataaagtcctgaaaagcctgggattcctggagagcggctctggctccggcggtggcaccctgaagtacgtggaggatgtgacaaacgtggtcagacgggatgtggagaagtggggccccttcgatctggtgtacggcagcacccaacccctgggcagctcttgtgaccggtgccctggctggtacatgtttcagttccaccggatcctgcagtacgccctgccgagacaggagtcccagcggccattcttttggattttcatggacaacttgctgctgaccgaggatgaccaggaaactaccactcggttcctgcagaccgaagccgtgaccctgcaggacgtgagaggccgggactaccagaacgccatgcgggtgtggtccaacatccctggactgaaaagcaagcacgcacctctgacccctaaagaagaggagtacctgcaggcccaggtgcggagcagaagcaagctggacgcccctaaggtggatctgctggtgaagaattgcctcctgcccctgagagagtacttcaagtatttcagccagaatagtctgcccctgggcggcccaagcagcggcgcccctcctcccagcggcggcagcccagccggctccccaacctctaccgaggagggcacctctgagtccgccacccccgagagcggccctggcacctccaccgagcccagcgagggcagcgcacccggcagccctgccggcagccccacctccacagaggagggaaccagcaccgagcccagcgaaggcagcgccccaggcaccagcaccgagcctagtgagggcggctctggcggcggcagcgcccaggagattaaacggatcaacaagatcagaagaagacttgtgaaagacagcaacaccaagaaggccggcaagacaggccccatgaaaaccctgctggttagagtgatgacacccgatctgagagagcggctggaaaacctgagaaagaagcctgaaaatatcccccagcccatcagcaatacatctagagccaacctgaataagctgctgaccgattacaccgaaatgaagaaggcgatcctgcatgtgtactgggaagagttccagaaggaccctgtgggcctgatgagccgggtggcccagcctgccagcaagaagatcgatcagaacaagctgaaacctgagatggacgagaagggcaacctgaccaccgccggctttgcctgctctcagtgtggccagcccctgttcgtgtacaagctggagcaggtgtctgagaagggcaaggcttacaccaactacttcggacggtgcaatgtggccgagcacgaaaagctgatcctgctggcccagctgaagcccgagaaggatagcgacgaagccgtgacatatagcctgggaaagtttgggcagagggccctggatttctacagcattcatgtgaccaaggagtccacccaccccgtgaagcccctggcccagatcgccggaaacagatacgcctccggacctgtgggaaaggccctgagcgacgcatgtatgggcacaatcgcctccttcctgtctaagtaccaggacatcatcatcgaacaccagaaggtggtgaagggcaaccagaagagactggagagcctgcgggagctggccggcaaggaaaacctggaataccctagcgtgaccctgccacctcagcctcacaccaaggagggcgttgatgcctacaacgaagtgatcgcccgggtgcgaatgtgggtgaacctgaacctgtggcagaagctgaagctaagcagagatgatgccaagcctctgctgagactgaagggattcccttcctttcctctggtcgagagacaggccaacgaagtggactggtgggacatggtgtgtaacgtgaagaagctgatcaacgagaaaaaggaggatggcaaggtgttttggcagaatctggctggctacaagagacaggaagccctgagaccatacctgagcagcgaggaagatcggaagaagggaaagaaattcgctcggtaccagctgggcgacctgctgctgcacctggaaaagaagcacggcgaggactggggaaaggtgtacgacgaggcctgggagcggattgacaagaaagtggaaggcctgagcaagcacatcaagctggaagaggaacggagaagcgaggacgcccagagcaaggccgccctgaccgactggctgcgggctaaggccagcttcgtgatcgagggcctgaaggaggccgacaaggacgagttctgcagatgcgagctgaagctgcagaagtggtacggggacctgcggggaaagcccttcgccatcgaagccgagaacagcatcctggacatcagcggcttcagcaagcagtacaactgtgccttcatctggcagaaggacggcgtgaagaagctgaacctgtacctgatcatcaactacttcaagggcggcaagctgcggttcaagaagatcaaacctgaagccttcgaagccaacagattctacaccgtgatcaacaaaaagagcggcgagatcgtgcccatggaggtgaacttcaacttcgacgaccccaacctgatcatcctgcctctggcctttggcaagagacagggcagagaattcatctggaacgacctgctgtccctggaaaccggcagcctgaagctggccaacggaagagtgatcgagaagacactgtacaacagaagaacccggcaggatgagcctgccctgttcgtggccctgaccttcgagcggcgggaggtcctggactcctccaatatcaaaccaatgaacctgatcggcgtggcaagaggcgaaaacatccccgccgtgatcgccctgaccgaccccgagggctgcccactgagccggtttaaggatagcctgggaaacccaacccacatcctgagaatcggcgagagctataaggagaagcagcggaccatccaggccaagaaggaggtggagcagcggagagccggcggctacagccggaagtacgccagcaaagccaagaatctggcagacgatatggtgagaaacaccgctagagatctgctgtactacgccgtgacccaggatgccatgctgatcttcgccaacctgagccggggcttcggccggcagggcaagcggaccttcatggccgagagacagtacacacggatggaggactggctgaccgccaagctggcctacgagggcctgagcaagacctacctgtccaagacactggcccagtacacctccaagacatgcagcaactgtgggtttaccatcaccagcgccgactacgacagggtgctggagaagctgaagaagacagcaacaggctggatgaccacaattaacggcaaggagctgaaggtggagggccagattacctactacaacagatacaagagacagaacgtagtcaaggacctgtccgtcgagctggatagactgagcgaagaatctgtgaacaacgacatctcctcctggacaaagggcagaagcggagaagctctgagcctcctgaagaaaagattctcccatagacccgtgcaggagaagttcgtgtgcctgaactgcggcttcgagacacacgcagccgagcaagccgccctgaacatcgccagatcctggctgttcctgcggagccaggagtacaagaaataccagacaaacaagacaaccggcaacaccgataagagagccttcgtcgagacctggcagtccttttaccggaagaagcttaaggaggtgtggaaacctgccgtgcggtctggcggatctggcggaggctccacaagctaccagacccccgtgagcttcaaggacgtggtggtgggcttcacccaggaggagtggcactggctgagccccgcccagagggccctgtacagggacgtgatgctggagacctacagcaacctggtgagcgtgggctacgagggcaccaagcccgacgtgatcctgaggctggagcaggaggaggccccctggatcggcgaggccgcctgccccggctgccactgctggggcatcagcaagctgaccagccccaagaaaaagagaaaagtctaagctgccttctgcggggcttgccttctggccatgcccttcttctctcccttgcacctgtacctcttggtctttgaataaagcctgagtaggaaggctagcaaaaaaaaaaaaaaaaaaaaaaaaaaaaaaaaaaaaaaaaaaaaaaaaaaaaaaaaaaaaaaaaaaaaaaaaaaaaaaaa

SEQ ID NO: 6629 - RNA, 5797 nt, synthetic construct
  source 1..5797: mol_type = other RNA
aggaaataagagagaaaagaagagtaagaagaaatataagagccaccatggcccctaagaagaagcgtaaagtgagccggatggaacgcctcgtctacgaggtgcggcagaagtgcagaaacatcgaggacatctgcatctcctgcggatctctgaacgtgaccctggagcacccactgttcatcggcggcatgtgccagaactgtaaaaactgttttctggagtgtgcctatcaatacgacgatgacggctaccagagctactgcaccatctgttgcggcggaagagaggtgctgatgtgtggaaataacaactgctgccggtgcttctgcgtggaatgcgtggacctgctggtgggccccggcgccgcccaggccgctattaaggaagatccttggaactgctacatgtgcggccacaagggcacatacggcctgctgagacggagagaggactggcctagcagactgcagatgttcttcgccaataaccacgaccaggagttcgacccccctaaggtgtaccctcccgtccccgccgagaagagaaagcccatccgggtcctgagcctgttcgatggcatcgccaccggtctgctggtgctgaaggacctgggcatccaggtggataggtacattgcctccgaggtgtgcgaggactccatcaccgtgggaatggtgcgtcatcagggcaagatcatgtacgtgggcgacgtgcggagcgtgacacagaagcatatccaggagtggggccctttcgacctggtgatcggcggcagcccttgcaatgacctgagcatcgtgaacccagcccggaagggcctgtacgagggaaccggcagactgttcttcgagttttacagactgctgcacgacgcccggcctaaggaaggcgacgaccggcccttcttttggctgttcgagaatgtggtggccatgggagtcagcgacaagcgggatattagccggttcctggagagcaaccccgtgatgatcgatgccaaggaagtgagcgccgcccaccgggccagatacttctggggcaatctgcctggcatgaacagacccctggccagcaccgtgaacgacaagctggagctgcaggagtgcctggagcacggccggatcgccaagttcagcaaggtgagaaccatcaccacccgaagcaacagcatcaaacaaggcaaggaccagcactttcctgtgttcatgaacgagaaggaggacatcctgtggtgtaccgagatggagagagtgttcgggttcccagtccactacacagatgtcagcaacatgtctagactggccagacagagactgctgggaagaagctggtccgtccctgtgatcagacacctgttcgcccctctgaaggagtacttcgcctgcgtgagcagcggcaacagcaacgccaacagccggggccccagcttctctagcggcctggtgccactgtccctgagagggagccacatgggccccatggagatctacaaaaccgtgagcgcctggaagcggcagcctgtgcgcgtgctgagcctgtttcggaatatcgataaagtcctgaaaagcctgggattcctggagagcggctctggctccggcggtggcaccctgaagtacgtggaggatgtgacaaacgtggtcagacgggatgtggagaagtggggccccttcgatctggtgtacggcagcacccaacccctgggcagctcttgtgaccggtgccctggctggtacatgtttcagttccaccggatcctgcagtacgccctgccgagacaggagtcccagcggccattcttttggattttcatggacaacttgctgctgaccgaggatgaccaggaaactaccactcggttcctgcagaccgaagccgtgaccctgcaggacgtgagaggccgggactaccagaacgccatgcgggtgtggtccaacatccctggactgaaaagcaagcacgcacctctgacccctaaagaagaggagtacctgcaggcccaggtgcggagcagaagcaagctggacgcccctaaggtggatctgctggtgaagaattgcctcctgcccctgagagagtacttcaagtatttcagccagaatagtctgcccctgggcggcccaagcagcggcgcccctcctcccagcggcggcagcccagccggctccccaacctctaccgaggagggcacctctgagtccgccacccccgagagcggccctggcacctccaccgagcccagcgagggcagcgcacccggcagccctgccggcagccccacctccacagaggagggaaccagcaccgagcccagcgaaggcagcgccccaggcaccagcaccgagcctagtgagggcggctctggcggcggcagcgcccaggagattaaacggatcaacaagatcagaagaagacttgtgaaagacagcaacaccaagaaggccggcaagacaggccccatgaaaaccctgctggttagagtgatgacacccgatctgagagagcggctggaaaacctgagaaagaagcctgaaaatatcccccagcccatcagcaatacatctagagccaacctgaataagctgctgaccgattacaccgaaatgaagaaggcgatcctgcatgtgtactgggaagagttccagaaggaccctgtgggcctgatgagccgggtggcccagcctgccagcaagaagatcgatcagaacaagctgaaacctgagatggacgagaagggcaacctgaccaccgccggctttgcctgctctcagtgtggccagcccctgttcgtgtacaagctggagcaggtgtctgagaagggcaaggcttacaccaactacttcggacggtgcaatgtggccgagcacgaaaagctgatcctgctggcccagctgaagcccgagaaggatagcgacgaagccgtgacatatagcctgggaaagtttgggcagagggccctggatttctacagcattcatgtgaccaaggagtccacccaccccgtgaagcccctggcccagatcgccggaaacagatacgcctccggacctgtgggaaaggccctgagcgacgcatgtatgggcacaatcgcctccttcctgtctaagtaccaggacatcatcatcgaacaccagaaggtggtgaagggcaaccagaagagactggagagcctgcgggagctggccggcaaggaaaacctggaataccctagcgtgaccctgccacctcagcctcacaccaaggagggcgttgatgcctacaacgaagtgatcgcccgggtgcgaatgtgggtgaacctgaacctgtggcagaagctgaagctaagcagagatgatgccaagcctctgctgagactgaagggattcccttcctttcctctggtcgagagacaggccaacgaagtggactggtgggacatggtgtgtaacgtgaagaagctgatcaacgagaaaaaggaggatggcaaggtgttttggcagaatctggctggctacaagagacaggaagccctgagaccatacctgagcagcgaggaagatcggaagaagggaaagaaattcgctcggtaccagctgggcgacctgctgctgcacctggaaaagaagcacggcgaggactggggaaaggtgtacgacgaggcctgggagcggattgacaagaaagtggaaggcctgagcaagcacatcaagctggaagaggaacggagaagcgaggacgcccagagcaaggccgccctgaccgactggctgcgggctaaggccagcttcgtgatcgagggcctgaaggaggccgacaaggacgagttctgcagatgcgagctgaagctgcagaagtggtacggggacctgcggggaaagcccttcgccatcgaagccgagaacagcatcctggacatcagcggcttcagcaagcagtacaactgtgccttcatctggcagaaggacggcgtgaagaagctgaacctgtacctgatcatcaactacttcaagggcggcaagctgcggttcaagaagatcaaacctgaagccttcgaagccaacagattctacaccgtgatcaacaaaaagagcggcgagatcgtgcccatggaggtgaacttcaacttcgacgaccccaacctgatcatcctgcctctggcctttggcaagagacagggcagagaattcatctggaacgacctgctgtccctggaaaccggcagcctgaagctggccaacggaagagtgatcgagaagacactgtacaacagaagaacccggcaggatgagcctgccctgttcgtggccctgaccttcgagcggcgggaggtcctggactcctccaatatcaaaccaatgaacctgatcggcgtggcaagaggcgaaaacatccccgccgtgatcgccctgaccgaccccgagggctgcccactgagccggtttaaggatagcctgggaaacccaacccacatcctgagaatcggcgagagctataaggagaagcagcggaccatccaggccaagaaggaggtggagcagcggagagccggcggctacagccggaagtacgccagcaaagccaagaatctggcagacgatatggtgagaaacaccgctagagatctgctgtactacgccgtgacccaggatgccatgctgatcttcgccaacctgagccggggcttcggccggcagggcaagcggaccttcatggccgagagacagtacacacggatggaggactggctgaccgccaagctggcctacgagggcctgagcaagacctacctgtccaagacactggcccagtacacctccaagacatgcagcaactgtgggtttaccatcaccagcgccgactacgacagggtgctggagaagctgaagaagacagcaacaggctggatgaccacaattaacggcaaggagctgaaggtggagggccagattacctactacaacagatacaagagacagaacgtagtcaaggacctgtccgtcgagctggatagactgagcgaagaatctgtgaacaacgacatctcctcctggacaaagggcagaagcggagaagctctgagcctcctgaagaaaagattctcccatagacccgtgcaggagaagttcgtgtgcctgaactgcggcttcgagacacacgcagccgagcaagccgccctgaacatcgccagatcctggctgttcctgcggagccaggagtacaagaaataccagacaaacaagacaaccggcaacaccgataagagagccttcgtcgagacctggcagtccttttaccggaagaagcttaaggaggtgtggaaacctgccgtgcggtctggcggatctggcggaggctccacaagcgtgcacggcagcgtgaccttcagggacgtggccatcgacttcagccaggaggagtgggagtgcctgcagcccgagcagaggaccctgtacagggacgtgatgctggagaactacagccacctgatcagcctgggcagcagcgtgagcaagcccgacgtgatcaccctgctggagcaggagaaggagccctggatcgtggtgaggaaggagaccagcaggtggtaccccgacctggagagcaagaccagccccaagaaaaagagaaaagtctaagctgccttctgcggggcttgccttctggccatgcccttcttctctcccttgcacctgtacctcttggtctttgaataaagcctgagtaggaaggctagcaaaaaaaaaaaaaaaaaaaaaaaaaaaaaaaaaaaaaaaaaaaaaaaaaaaaaaaaaaaaaaaaaaaaaaaaaaaaaaaa

SEQ ID NO: 6630 - RNA, 5797 nt, synthetic construct
  source 1..5797: mol_type = other RNA
aggaaataagagagaaaagaagagtaagaagaaatataagagccaccatggcccctaagaagaagcgtaaagtgagccggatggaacgcctcgtctacgaggtgcggcagaagtgcagaaacatcgaggacatctgcatctcctgcggatctctgaacgtgaccctggagcacccactgttcatcggcggcatgtgccagaactgtaaaaactgttttctggagtgtgcctatcaatacgacgatgacggctaccagagctactgcaccatctgttgcggcggaagagaggtgctgatgtgtggaaataacaactgctgccggtgcttctgcgtggaatgcgtggacctgctggtgggccccggcgccgcccaggccgctattaaggaagatccttggaactgctacatgtgcggccacaagggcacatacggcctgctgagacggagagaggactggcctagcagactgcagatgttcttcgccaataaccacgaccaggagttcgacccccctaaggtgtaccctcccgtccccgccgagaagagaaagcccatccgggtcctgagcctgttcgatggcatcgccaccggtctgctggtgctgaaggacctgggcatccaggtggataggtacattgcctccgaggtgtgcgaggactccatcaccgtgggaatggtgcgtcatcagggcaagatcatgtacgtgggcgacgtgcggagcgtgacacagaagcatatccaggagtggggccctttcgacctggtgatcggcggcagcccttgcaatgacctgagcatcgtgaacccagcccggaagggcctgtacgagggaaccggcagactgttcttcgagttttacagactgctgcacgacgcccggcctaaggaaggcgacgaccggcccttcttttggctgttcgagaatgtggtggccatgggagtcagcgacaagcgggatattagccggttcctggagagcaaccccgtgatgatcgatgccaaggaagtgagcgccgcccaccgggccagatacttctggggcaatctgcctggcatgaacagacccctggccagcaccgtgaacgacaagctggagctgcaggagtgcctggagcacggccggatcgccaagttcagcaaggtgagaaccatcaccacccgaagcaacagcatcaaacaaggcaaggaccagcactttcctgtgttcatgaacgagaaggaggacatcctgtggtgtaccgagatggagagagtgttcgggttcccagtccactacacagatgtcagcaacatgtctagactggccagacagagactgctgggaagaagctggtccgtccctgtgatcagacacctgttcgcccctctgaaggagtacttcgcctgcgtgagcagcggcaacagcaacgccaacagccggggccccagcttctctagcggcctggtgccactgtccctgagagggagccacatgggccccatggagatctacaaaaccgtgagcgcctggaagcggcagcctgtgcgcgtgctgagcctgtttcggaatatcgataaagtcctgaaaagcctgggattcctggagagcggctctggctccggcggtggcaccctgaagtacgtggaggatgtgacaaacgtggtcagacgggatgtggagaagtggggccccttcgatctggtgtacggcagcacccaacccctgggcagctcttgtgaccggtgccctggctggtacatgtttcagttccaccggatcctgcagtacgccctgccgagacaggagtcccagcggccattcttttggattttcatggacaacttgctgctgaccgaggatgaccaggaaactaccactcggttcctgcagaccgaagccgtgaccctgcaggacgtgagaggccgggactaccagaacgccatgcgggtgtggtccaacatccctggactgaaaagcaagcacgcacctctgacccctaaagaagaggagtacctgcaggcccaggtgcggagcagaagcaagctggacgcccctaaggtggatctgctggtgaagaattgcctcctgcccctgagagagtacttcaagtatttcagccagaatagtctgcccctgggcggcccaagcagcggcgcccctcctcccagcggcggcagcccagccggctccccaacctctaccgaggagggcacctctgagtccgccacccccgagagcggccctggcacctccaccgagcccagcgagggcagcgcacccggcagccctgccggcagccccacctccacagaggagggaaccagcaccgagcccagcgaaggcagcgccccaggcaccagcaccgagcctagtgagggcggctctggcggcggcagcgcccaggagattaaacggatcaacaagatcagaagaagacttgtgaaagacagcaacaccaagaaggccggcaagacaggccccatgaaaaccctgctggttagagtgatgacacccgatctgagagagcggctggaaaacctgagaaagaagcctgaaaatatcccccagcccatcagcaatacatctagagccaacctgaataagctgctgaccgattacaccgaaatgaagaaggcgatcctgcatgtgtactgggaagagttccagaaggaccctgtgggcctgatgagccgggtggcccagcctgccagcaagaagatcgatcagaacaagctgaaacctgagatggacgagaagggcaacctgaccaccgccggctttgcctgctctcagtgtggccagcccctgttcgtgtacaagctggagcaggtgtctgagaagggcaaggcttacaccaactacttcggacggtgcaatgtggccgagcacgaaaagctgatcctgctggcccagctgaagcccgagaaggatagcgacgaagccgtgacatatagcctgggaaagtttgggcagagggccctggatttctacagcattcatgtgaccaaggagtccacccaccccgtgaagcccctggcccagatcgccggaaacagatacgcctccggacctgtgggaaaggccctgagcgacgcatgtatgggcacaatcgcctccttcctgtctaagtaccaggacatcatcatcgaacaccagaaggtggtgaagggcaaccagaagagactggagagcctgcgggagctggccggcaaggaaaacctggaataccctagcgtgaccctgccacctcagcctcacaccaaggagggcgttgatgcctacaacgaagtgatcgcccgggtgcgaatgtgggtgaacctgaacctgtggcagaagctgaagctaagcagagatgatgccaagcctctgctgagactgaagggattcccttcctttcctctggtcgagagacaggccaacgaagtggactggtgggacatggtgtgtaacgtgaagaagctgatcaacgagaaaaaggaggatggcaaggtgttttggcagaatctggctggctacaagagacaggaagccctgagaccatacctgagcagcgaggaagatcggaagaagggaaagaaattcgctcggtaccagctgggcgacctgctgctgcacctggaaaagaagcacggcgaggactggggaaaggtgtacgacgaggcctgggagcggattgacaagaaagtggaaggcctgagcaagcacatcaagctggaagaggaacggagaagcgaggacgcccagagcaaggccgccctgaccgactggctgcgggctaaggccagcttcgtgatcgagggcctgaaggaggccgacaaggacgagttctgcagatgcgagctgaagctgcagaagtggtacggggacctgcggggaaagcccttcgccatcgaagccgagaacagcatcctggacatcagcggcttcagcaagcagtacaactgtgccttcatctggcagaaggacggcgtgaagaagctgaacctgtacctgatcatcaactacttcaagggcggcaagctgcggttcaagaagatcaaacctgaagccttcgaagccaacagattctacaccgtgatcaacaaaaagagcggcgagatcgtgcccatggaggtgaacttcaacttcgacgaccccaacctgatcatcctgcctctggcctttggcaagagacagggcagagaattcatctggaacgacctgctgtccctggaaaccggcagcctgaagctggccaacggaagagtgatcgagaagacactgtacaacagaagaacccggcaggatgagcctgccctgttcgtggccctgaccttcgagcggcgggaggtcctggactcctccaatatcaaaccaatgaacctgatcggcgtggcaagaggcgaaaacatccccgccgtgatcgccctgaccgaccccgagggctgcccactgagccggtttaaggatagcctgggaaacccaacccacatcctgagaatcggcgagagctataaggagaagcagcggaccatccaggccaagaaggaggtggagcagcggagagccggcggctacagccggaagtacgccagcaaagccaagaatctggcagacgatatggtgagaaacaccgctagagatctgctgtactacgccgtgacccaggatgccatgctgatcttcgccaacctgagccggggcttcggccggcagggcaagcggaccttcatggccgagagacagtacacacggatggaggactggctgaccgccaagctggcctacgagggcctgagcaagacctacctgtccaagacactggcccagtacacctccaagacatgcagcaactgtgggtttaccatcaccagcgccgactacgacagggtgctggagaagctgaagaagacagcaacaggctggatgaccacaattaacggcaaggagctgaaggtggagggccagattacctactacaacagatacaagagacagaacgtagtcaaggacctgtccgtcgagctggatagactgagcgaagaatctgtgaacaacgacatctcctcctggacaaagggcagaagcggagaagctctgagcctcctgaagaaaagattctcccatagacccgtgcaggagaagttcgtgtgcctgaactgcggcttcgagacacacgcagccgagcaagccgccctgaacatcgccagatcctggctgttcctgcggagccaggagtacaagaaataccagacaaacaagacaaccggcaacaccgataagagagccttcgtcgagacctggcagtccttttaccggaagaagcttaaggaggtgtggaaacctgccgtgcggtctggcggatctggcggaggctccacaagcttccaggagctggtgagcttcaacgacgtgaccgtgggcttcacccaggaggagtggcagcacctggaccccagccagaggagcctgtacagggaggtgatgctggagaactacagccacctggtgagcgtgggctactgcgtgaccaagcccgaggtgatcttcaggctggagcagggcgaggagccctggatcagcgaggccgagttccccagccagagcttccccgagctgtggaaggccaccagccccaagaaaaagagaaaagtctaagctgccttctgcggggcttgccttctggccatgcccttcttctctcccttgcacctgtacctcttggtctttgaataaagcctgagtaggaaggctagcaaaaaaaaaaaaaaaaaaaaaaaaaaaaaaaaaaaaaaaaaaaaaaaaaaaaaaaaaaaaaaaaaaaaaaaaaaaaaaaa

SEQ ID NO: 6631 - RNA, 5797 nt, synthetic construct
  source 1..5797: mol_type = other RNA
aggaaataagagagaaaagaagagtaagaagaaatataagagccaccatggcccctaagaagaagcgtaaagtgagccggatggaacgcctcgtctacgaggtgcggcagaagtgcagaaacatcgaggacatctgcatctcctgcggatctctgaacgtgaccctggagcacccactgttcatcggcggcatgtgccagaactgtaaaaactgttttctggagtgtgcctatcaatacgacgatgacggctaccagagctactgcaccatctgttgcggcggaagagaggtgctgatgtgtggaaataacaactgctgccggtgcttctgcgtggaatgcgtggacctgctggtgggccccggcgccgcccaggccgctattaaggaagatccttggaactgctacatgtgcggccacaagggcacatacggcctgctgagacggagagaggactggcctagcagactgcagatgttcttcgccaataaccacgaccaggagttcgacccccctaaggtgtaccctcccgtccccgccgagaagagaaagcccatccgggtcctgagcctgttcgatggcatcgccaccggtctgctggtgctgaaggacctgggcatccaggtggataggtacattgcctccgaggtgtgcgaggactccatcaccgtgggaatggtgcgtcatcagggcaagatcatgtacgtgggcgacgtgcggagcgtgacacagaagcatatccaggagtggggccctttcgacctggtgatcggcggcagcccttgcaatgacctgagcatcgtgaacccagcccggaagggcctgtacgagggaaccggcagactgttcttcgagttttacagactgctgcacgacgcccggcctaaggaaggcgacgaccggcccttcttttggctgttcgagaatgtggtggccatgggagtcagcgacaagcgggatattagccggttcctggagagcaaccccgtgatgatcgatgccaaggaagtgagcgccgcccaccgggccagatacttctggggcaatctgcctggcatgaacagacccctggccagcaccgtgaacgacaagctggagctgcaggagtgcctggagcacggccggatcgccaagttcagcaaggtgagaaccatcaccacccgaagcaacagcatcaaacaaggcaaggaccagcactttcctgtgttcatgaacgagaaggaggacatcctgtggtgtaccgagatggagagagtgttcgggttcccagtccactacacagatgtcagcaacatgtctagactggccagacagagactgctgggaagaagctggtccgtccctgtgatcagacacctgttcgcccctctgaaggagtacttcgcctgcgtgagcagcggcaacagcaacgccaacagccggggccccagcttctctagcggcctggtgccactgtccctgagagggagccacatgggccccatggagatctacaaaaccgtgagcgcctggaagcggcagcctgtgcgcgtgctgagcctgtttcggaatatcgataaagtcctgaaaagcctgggattcctggagagcggctctggctccggcggtggcaccctgaagtacgtggaggatgtgacaaacgtggtcagacgggatgtggagaagtggggccccttcgatctggtgtacggcagcacccaacccctgggcagctcttgtgaccggtgccctggctggtacatgtttcagttccaccggatcctgcagtacgccctgccgagacaggagtcccagcggccattcttttggattttcatggacaacttgctgctgaccgaggatgaccaggaaactaccactcggttcctgcagaccgaagccgtgaccctgcaggacgtgagaggccgggactaccagaacgccatgcgggtgtggtccaacatccctggactgaaaagcaagcacgcacctctgacccctaaagaagaggagtacctgcaggcccaggtgcggagcagaagcaagctggacgcccctaaggtggatctgctggtgaagaattgcctcctgcccctgagagagtacttcaagtatttcagccagaatagtctgcccctgggcggcccaagcagcggcgcccctcctcccagcggcggcagcccagccggctccccaacctctaccgaggagggcacctctgagtccgccacccccgagagcggccctggcacctccaccgagcccagcgagggcagcgcacccggcagccctgccggcagccccacctccacagaggagggaaccagcaccgagcccagcgaaggcagcgccccaggcaccagcaccgagcctagtgagggcggctctggcggcggcagcgcccaggagattaaacggatcaacaagatcagaagaagacttgtgaaagacagcaacaccaagaaggccggcaagacaggccccatgaaaaccctgctggttagagtgatgacacccgatctgagagagcggctggaaaacctgagaaagaagcctgaaaatatcccccagcccatcagcaatacatctagagccaacctgaataagctgctgaccgattacaccgaaatgaagaaggcgatcctgcatgtgtactgggaagagttccagaaggaccctgtgggcctgatgagccgggtggcccagcctgccagcaagaagatcgatcagaacaagctgaaacctgagatggacgagaagggcaacctgaccaccgccggctttgcctgctctcagtgtggccagcccctgttcgtgtacaagctggagcaggtgtctgagaagggcaaggcttacaccaactacttcggacggtgcaatgtggccgagcacgaaaagctgatcctgctggcccagctgaagcccgagaaggatagcgacgaagccgtgacatatagcctgggaaagtttgggcagagggccctggatttctacagcattcatgtgaccaaggagtccacccaccccgtgaagcccctggcccagatcgccggaaacagatacgcctccggacctgtgggaaaggccctgagcgacgcatgtatgggcacaatcgcctccttcctgtctaagtaccaggacatcatcatcgaacaccagaaggtggtgaagggcaaccagaagagactggagagcctgcgggagctggccggcaaggaaaacctggaataccctagcgtgaccctgccacctcagcctcacaccaaggagggcgttgatgcctacaacgaagtgatcgcccgggtgcgaatgtgggtgaacctgaacctgtggcagaagctgaagctaagcagagatgatgccaagcctctgctgagactgaagggattcccttcctttcctctggtcgagagacaggccaacgaagtggactggtgggacatggtgtgtaacgtgaagaagctgatcaacgagaaaaaggaggatggcaaggtgttttggcagaatctggctggctacaagagacaggaagccctgagaccatacctgagcagcgaggaagatcggaagaagggaaagaaattcgctcggtaccagctgggcgacctgctgctgcacctggaaaagaagcacggcgaggactggggaaaggtgtacgacgaggcctgggagcggattgacaagaaagtggaaggcctgagcaagcacatcaagctggaagaggaacggagaagcgaggacgcccagagcaaggccgccctgaccgactggctgcgggctaaggccagcttcgtgatcgagggcctgaaggaggccgacaaggacgagttctgcagatgcgagctgaagctgcagaagtggtacggggacctgcggggaaagcccttcgccatcgaagccgagaacagcatcctggacatcagcggcttcagcaagcagtacaactgtgccttcatctggcagaaggacggcgtgaagaagctgaacctgtacctgatcatcaactacttcaagggcggcaagctgcggttcaagaagatcaaacctgaagccttcgaagccaacagattctacaccgtgatcaacaaaaagagcggcgagatcgtgcccatggaggtgaacttcaacttcgacgaccccaacctgatcatcctgcctctggcctttggcaagagacagggcagagaattcatctggaacgacctgctgtccctggaaaccggcagcctgaagctggccaacggaagagtgatcgagaagacactgtacaacagaagaacccggcaggatgagcctgccctgttcgtggccctgaccttcgagcggcgggaggtcctggactcctccaatatcaaaccaatgaacctgatcggcgtggcaagaggcgaaaacatccccgccgtgatcgccctgaccgaccccgagggctgcccactgagccggtttaaggatagcctgggaaacccaacccacatcctgagaatcggcgagagctataaggagaagcagcggaccatccaggccaagaaggaggtggagcagcggagagccggcggctacagccggaagtacgccagcaaagccaagaatctggcagacgatatggtgagaaacaccgctagagatctgctgtactacgccgtgacccaggatgccatgctgatcttcgccaacctgagccggggcttcggccggcagggcaagcggaccttcatggccgagagacagtacacacggatggaggactggctgaccgccaagctggcctacgagggcctgagcaagacctacctgtccaagacactggcccagtacacctccaagacatgcagcaactgtgggtttaccatcaccagcgccgactacgacagggtgctggagaagctgaagaagacagcaacaggctggatgaccacaattaacggcaaggagctgaaggtggagggccagattacctactacaacagatacaagagacagaacgtagtcaaggacctgtccgtcgagctggatagactgagcgaagaatctgtgaacaacgacatctcctcctggacaaagggcagaagcggagaagctctgagcctcctgaagaaaagattctcccatagacccgtgcaggagaagttcgtgtgcctgaactgcggcttcgagacacacgcagccgagcaagccgccctgaacatcgccagatcctggctgttcctgcggagccaggagtacaagaaataccagacaaacaagacaaccggcaacaccgataagagagccttcgtcgagacctggcagtccttttaccggaagaagcttaaggaggtgtggaaacctgccgtgcggtctggcggatctggcggaggctccacaagcagccaggagagcgtgagcttcaaggacgtgaccgtgggcttcacccaggaggagtggcagcacctggaccccagccagagggccctgtacagggacgtgatgctggagaactacagcaacctggtgagcgtgggctactgcgtgcacaagcccgaggtgatcttcaggctgcagcagggcgaggagccctggaagctggaggaggagttccccagccagagcttccccgaggtgtggaccgccaccagccccaagaaaaagagaaaagtctaagctgccttctgcggggcttgccttctggccatgcccttcttctctcccttgcacctgtacctcttggtctttgaataaagcctgagtaggaaggctagcaaaaaaaaaaaaaaaaaaaaaaaaaaaaaaaaaaaaaaaaaaaaaaaaaaaaaaaaaaaaaaaaaaaaaaaaaaaaaaaa

SEQ ID NO: 6632 - RNA, 5797 nt, synthetic construct
  source 1..5797: mol_type = other RNA
aggaaataagagagaaaagaagagtaagaagaaatataagagccaccatggcccctaagaagaagcgtaaagtgagccggatggaacgcctcgtctacgaggtgcggcagaagtgcagaaacatcgaggacatctgcatctcctgcggatctctgaacgtgaccctggagcacccactgttcatcggcggcatgtgccagaactgtaaaaactgttttctggagtgtgcctatcaatacgacgatgacggctaccagagctactgcaccatctgttgcggcggaagagaggtgctgatgtgtggaaataacaactgctgccggtgcttctgcgtggaatgcgtggacctgctggtgggccccggcgccgcccaggccgctattaaggaagatccttggaactgctacatgtgcggccacaagggcacatacggcctgctgagacggagagaggactggcctagcagactgcagatgttcttcgccaataaccacgaccaggagttcgacccccctaaggtgtaccctcccgtccccgccgagaagagaaagcccatccgggtcctgagcctgttcgatggcatcgccaccggtctgctggtgctgaaggacctgggcatccaggtggataggtacattgcctccgaggtgtgcgaggactccatcaccgtgggaatggtgcgtcatcagggcaagatcatgtacgtgggcgacgtgcggagcgtgacacagaagcatatccaggagtggggccctttcgacctggtgatcggcggcagcccttgcaatgacctgagcatcgtgaacccagcccggaagggcctgtacgagggaaccggcagactgttcttcgagttttacagactgctgcacgacgcccggcctaaggaaggcgacgaccggcccttcttttggctgttcgagaatgtggtggccatgggagtcagcgacaagcgggatattagccggttcctggagagcaaccccgtgatgatcgatgccaaggaagtgagcgccgcccaccgggccagatacttctggggcaatctgcctggcatgaacagacccctggccagcaccgtgaacgacaagctggagctgcaggagtgcctggagcacggccggatcgccaagttcagcaaggtgagaaccatcaccacccgaagcaacagcatcaaacaaggcaaggaccagcactttcctgtgttcatgaacgagaaggaggacatcctgtggtgtaccgagatggagagagtgttcgggttcccagtccactacacagatgtcagcaacatgtctagactggccagacagagactgctgggaagaagctggtccgtccctgtgatcagacacctgttcgcccctctgaaggagtacttcgcctgcgtgagcagcggcaacagcaacgccaacagccggggccccagcttctctagcggcctggtgccactgtccctgagagggagccacatgggccccatggagatctacaaaaccgtgagcgcctggaagcggcagcctgtgcgcgtgctgagcctgtttcggaatatcgataaagtcctgaaaagcctgggattcctggagagcggctctggctccggcggtggcaccctgaagtacgtggaggatgtgacaaacgtggtcagacgggatgtggagaagtggggccccttcgatctggtgtacggcagcacccaacccctgggcagctcttgtgaccggtgccctggctggtacatgtttcagttccaccggatcctgcagtacgccctgccgagacaggagtcccagcggccattcttttggattttcatggacaacttgctgctgaccgaggatgaccaggaaactaccactcggttcctgcagaccgaagccgtgaccctgcaggacgtgagaggccgggactaccagaacgccatgcgggtgtggtccaacatccctggactgaaaagcaagcacgcacctctgacccctaaagaagaggagtacctgcaggcccaggtgcggagcagaagcaagctggacgcccctaaggtggatctgctggtgaagaattgcctcctgcccctgagagagtacttcaagtatttcagccagaatagtctgcccctgggcggcccaagcagcggcgcccctcctcccagcggcggcagcccagccggctccccaacctctaccgaggagggcacctctgagtccgccacccccgagagcggccctggcacctccaccgagcccagcgagggcagcgcacccggcagccctgccggcagccccacctccacagaggagggaaccagcaccgagcccagcgaaggcagcgccccaggcaccagcaccgagcctagtgagggcggctctggcggcggcagcgcccaggagattaaacggatcaacaagatcagaagaagacttgtgaaagacagcaacaccaagaaggccggcaagacaggccccatgaaaaccctgctggttagagtgatgacacccgatctgagagagcggctggaaaacctgagaaagaagcctgaaaatatcccccagcccatcagcaatacatctagagccaacctgaataagctgctgaccgattacaccgaaatgaagaaggcgatcctgcatgtgtactgggaagagttccagaaggaccctgtgggcctgatgagccgggtggcccagcctgccagcaagaagatcgatcagaacaagctgaaacctgagatggacgagaagggcaacctgaccaccgccggctttgcctgctctcagtgtggccagcccctgttcgtgtacaagctggagcaggtgtctgagaagggcaaggcttacaccaactacttcggacggtgcaatgtggccgagcacgaaaagctgatcctgctggcccagctgaagcccgagaaggatagcgacgaagccgtgacatatagcctgggaaagtttgggcagagggccctggatttctacagcattcatgtgaccaaggagtccacccaccccgtgaagcccctggcccagatcgccggaaacagatacgcctccggacctgtgggaaaggccctgagcgacgcatgtatgggcacaatcgcctccttcctgtctaagtaccaggacatcatcatcgaacaccagaaggtggtgaagggcaaccagaagagactggagagcctgcgggagctggccggcaaggaaaacctggaataccctagcgtgaccctgccacctcagcctcacaccaaggagggcgttgatgcctacaacgaagtgatcgcccgggtgcgaatgtgggtgaacctgaacctgtggcagaagctgaagctaagcagagatgatgccaagcctctgctgagactgaagggattcccttcctttcctctggtcgagagacaggccaacgaagtggactggtgggacatggtgtgtaacgtgaagaagctgatcaacgagaaaaaggaggatggcaaggtgttttggcagaatctggctggctacaagagacaggaagccctgagaccatacctgagcagcgaggaagatcggaagaagggaaagaaattcgctcggtaccagctgggcgacctgctgctgcacctggaaaagaagcacggcgaggactggggaaaggtgtacgacgaggcctgggagcggattgacaagaaagtggaaggcctgagcaagcacatcaagctggaagaggaacggagaagcgaggacgcccagagcaaggccgccctgaccgactggctgcgggctaaggccagcttcgtgatcgagggcctgaaggaggccgacaaggacgagttctgcagatgcgagctgaagctgcagaagtggtacggggacctgcggggaaagcccttcgccatcgaagccgagaacagcatcctggacatcagcggcttcagcaagcagtacaactgtgccttcatctggcagaaggacggcgtgaagaagctgaacctgtacctgatcatcaactacttcaagggcggcaagctgcggttcaagaagatcaaacctgaagccttcgaagccaacagattctacaccgtgatcaacaaaaagagcggcgagatcgtgcccatggaggtgaacttcaacttcgacgaccccaacctgatcatcctgcctctggcctttggcaagagacagggcagagaattcatctggaacgacctgctgtccctggaaaccggcagcctgaagctggccaacggaagagtgatcgagaagacactgtacaacagaagaacccggcaggatgagcctgccctgttcgtggccctgaccttcgagcggcgggaggtcctggactcctccaatatcaaaccaatgaacctgatcggcgtggcaagaggcgaaaacatccccgccgtgatcgccctgaccgaccccgagggctgcccactgagccggtttaaggatagcctgggaaacccaacccacatcctgagaatcggcgagagctataaggagaagcagcggaccatccaggccaagaaggaggtggagcagcggagagccggcggctacagccggaagtacgccagcaaagccaagaatctggcagacgatatggtgagaaacaccgctagagatctgctgtactacgccgtgacccaggatgccatgctgatcttcgccaacctgagccggggcttcggccggcagggcaagcggaccttcatggccgagagacagtacacacggatggaggactggctgaccgccaagctggcctacgagggcctgagcaagacctacctgtccaagacactggcccagtacacctccaagacatgcagcaactgtgggtttaccatcaccagcgccgactacgacagggtgctggagaagctgaagaagacagcaacaggctggatgaccacaattaacggcaaggagctgaaggtggagggccagattacctactacaacagatacaagagacagaacgtagtcaaggacctgtccgtcgagctggatagactgagcgaagaatctgtgaacaacgacatctcctcctggacaaagggcagaagcggagaagctctgagcctcctgaagaaaagattctcccatagacccgtgcaggagaagttcgtgtgcctgaactgcggcttcgagacacacgcagccgagcaagccgccctgaacatcgccagatcctggctgttcctgcggagccaggagtacaagaaataccagacaaacaagacaaccggcaacaccgataagagagccttcgtcgagacctggcagtccttttaccggaagaagcttaaggaggtgtggaaacctgccgtgcggtctggcggatctggcggaggctccacaagcgagatggtgaccttcaaggacgtggccgtggtgttcaccgaggaggagctgggcctgctggacagcgcccagaggaagctgtacagggacgtgatgctggagaacttcaggaacctgctgctggtggcccaccagcccttcaagcccgacctgatcagccagctggagagggaggagaagctgctgatggtggagatggagacccccaaggacggctgcagcggcaggaagaaccagcagaagaccagccccaagaaaaagagaaaagtctaagctgccttctgcggggcttgccttctggccatgcccttcttctctcccttgcacctgtacctcttggtctttgaataaagcctgagtaggaaggctagcaaaaaaaaaaaaaaaaaaaaaaaaaaaaaaaaaaaaaaaaaaaaaaaaaaaaaaaaaaaaaaaaaaaaaaaaaaaaaaaa

SEQ ID NO: 6633 - RNA, 5797 nt, synthetic construct
  source 1..5797: mol_type = other RNA
aggaaataagagagaaaagaagagtaagaagaaatataagagccaccatggcccctaagaagaagcgtaaagtgagccggatggaacgcctcgtctacgaggtgcggcagaagtgcagaaacatcgaggacatctgcatctcctgcggatctctgaacgtgaccctggagcacccactgttcatcggcggcatgtgccagaactgtaaaaactgttttctggagtgtgcctatcaatacgacgatgacggctaccagagctactgcaccatctgttgcggcggaagagaggtgctgatgtgtggaaataacaactgctgccggtgcttctgcgtggaatgcgtggacctgctggtgggccccggcgccgcccaggccgctattaaggaagatccttggaactgctacatgtgcggccacaagggcacatacggcctgctgagacggagagaggactggcctagcagactgcagatgttcttcgccaataaccacgaccaggagttcgacccccctaaggtgtaccctcccgtccccgccgagaagagaaagcccatccgggtcctgagcctgttcgatggcatcgccaccggtctgctggtgctgaaggacctgggcatccaggtggataggtacattgcctccgaggtgtgcgaggactccatcaccgtgggaatggtgcgtcatcagggcaagatcatgtacgtgggcgacgtgcggagcgtgacacagaagcatatccaggagtggggccctttcgacctggtgatcggcggcagcccttgcaatgacctgagcatcgtgaacccagcccggaagggcctgtacgagggaaccggcagactgttcttcgagttttacagactgctgcacgacgcccggcctaaggaaggcgacgaccggcccttcttttggctgttcgagaatgtggtggccatgggagtcagcgacaagcgggatattagccggttcctggagagcaaccccgtgatgatcgatgccaaggaagtgagcgccgcccaccgggccagatacttctggggcaatctgcctggcatgaacagacccctggccagcaccgtgaacgacaagctggagctgcaggagtgcctggagcacggccggatcgccaagttcagcaaggtgagaaccatcaccacccgaagcaacagcatcaaacaaggcaaggaccagcactttcctgtgttcatgaacgagaaggaggacatcctgtggtgtaccgagatggagagagtgttcgggttcccagtccactacacagatgtcagcaacatgtctagactggccagacagagactgctgggaagaagctggtccgtccctgtgatcagacacctgttcgcccctctgaaggagtacttcgcctgcgtgagcagcggcaacagcaacgccaacagccggggccccagcttctctagcggcctggtgccactgtccctgagagggagccacatgggccccatggagatctacaaaaccgtgagcgcctggaagcggcagcctgtgcgcgtgctgagcctgtttcggaatatcgataaagtcctgaaaagcctgggattcctggagagcggctctggctccggcggtggcaccctgaagtacgtggaggatgtgacaaacgtggtcagacgggatgtggagaagtggggccccttcgatctggtgtacggcagcacccaacccctgggcagctcttgtgaccggtgccctggctggtacatgtttcagttccaccggatcctgcagtacgccctgccgagacaggagtcccagcggccattcttttggattttcatggacaacttgctgctgaccgaggatgaccaggaaactaccactcggttcctgcagaccgaagccgtgaccctgcaggacgtgagaggccgggactaccagaacgccatgcgggtgtggtccaacatccctggactgaaaagcaagcacgcacctctgacccctaaagaagaggagtacctgcaggcccaggtgcggagcagaagcaagctggacgcccctaaggtggatctgctggtgaagaattgcctcctgcccctgagagagtacttcaagtatttcagccagaatagtctgcccctgggcggcccaagcagcggcgcccctcctcccagcggcggcagcccagccggctccccaacctctaccgaggagggcacctctgagtccgccacccccgagagcggccctggcacctccaccgagcccagcgagggcagcgcacccggcagccctgccggcagccccacctccacagaggagggaaccagcaccgagcccagcgaaggcagcgccccaggcaccagcaccgagcctagtgagggcggctctggcggcggcagcgcccaggagattaaacggatcaacaagatcagaagaagacttgtgaaagacagcaacaccaagaaggccggcaagacaggccccatgaaaaccctgctggttagagtgatgacacccgatctgagagagcggctggaaaacctgagaaagaagcctgaaaatatcccccagcccatcagcaatacatctagagccaacctgaataagctgctgaccgattacaccgaaatgaagaaggcgatcctgcatgtgtactgggaagagttccagaaggaccctgtgggcctgatgagccgggtggcccagcctgccagcaagaagatcgatcagaacaagctgaaacctgagatggacgagaagggcaacctgaccaccgccggctttgcctgctctcagtgtggccagcccctgttcgtgtacaagctggagcaggtgtctgagaagggcaaggcttacaccaactacttcggacggtgcaatgtggccgagcacgaaaagctgatcctgctggcccagctgaagcccgagaaggatagcgacgaagccgtgacatatagcctgggaaagtttgggcagagggccctggatttctacagcattcatgtgaccaaggagtccacccaccccgtgaagcccctggcccagatcgccggaaacagatacgcctccggacctgtgggaaaggccctgagcgacgcatgtatgggcacaatcgcctccttcctgtctaagtaccaggacatcatcatcgaacaccagaaggtggtgaagggcaaccagaagagactggagagcctgcgggagctggccggcaaggaaaacctggaataccctagcgtgaccctgccacctcagcctcacaccaaggagggcgttgatgcctacaacgaagtgatcgcccgggtgcgaatgtgggtgaacctgaacctgtggcagaagctgaagctaagcagagatgatgccaagcctctgctgagactgaagggattcccttcctttcctctggtcgagagacaggccaacgaagtggactggtgggacatggtgtgtaacgtgaagaagctgatcaacgagaaaaaggaggatggcaaggtgttttggcagaatctggctggctacaagagacaggaagccctgagaccatacctgagcagcgaggaagatcggaagaagggaaagaaattcgctcggtaccagctgggcgacctgctgctgcacctggaaaagaagcacggcgaggactggggaaaggtgtacgacgaggcctgggagcggattgacaagaaagtggaaggcctgagcaagcacatcaagctggaagaggaacggagaagcgaggacgcccagagcaaggccgccctgaccgactggctgcgggctaaggccagcttcgtgatcgagggcctgaaggaggccgacaaggacgagttctgcagatgcgagctgaagctgcagaagtggtacggggacctgcggggaaagcccttcgccatcgaagccgagaacagcatcctggacatcagcggcttcagcaagcagtacaactgtgccttcatctggcagaaggacggcgtgaagaagctgaacctgtacctgatcatcaactacttcaagggcggcaagctgcggttcaagaagatcaaacctgaagccttcgaagccaacagattctacaccgtgatcaacaaaaagagcggcgagatcgtgcccatggaggtgaacttcaacttcgacgaccccaacctgatcatcctgcctctggcctttggcaagagacagggcagagaattcatctggaacgacctgctgtccctggaaaccggcagcctgaagctggccaacggaagagtgatcgagaagacactgtacaacagaagaacccggcaggatgagcctgccctgttcgtggccctgaccttcgagcggcgggaggtcctggactcctccaatatcaaaccaatgaacctgatcggcgtggcaagaggcgaaaacatccccgccgtgatcgccctgaccgaccccgagggctgcccactgagccggtttaaggatagcctgggaaacccaacccacatcctgagaatcggcgagagctataaggagaagcagcggaccatccaggccaagaaggaggtggagcagcggagagccggcggctacagccggaagtacgccagcaaagccaagaatctggcagacgatatggtgagaaacaccgctagagatctgctgtactacgccgtgacccaggatgccatgctgatcttcgccaacctgagccggggcttcggccggcagggcaagcggaccttcatggccgagagacagtacacacggatggaggactggctgaccgccaagctggcctacgagggcctgagcaagacctacctgtccaagacactggcccagtacacctccaagacatgcagcaactgtgggtttaccatcaccagcgccgactacgacagggtgctggagaagctgaagaagacagcaacaggctggatgaccacaattaacggcaaggagctgaaggtggagggccagattacctactacaacagatacaagagacagaacgtagtcaaggacctgtccgtcgagctggatagactgagcgaagaatctgtgaacaacgacatctcctcctggacaaagggcagaagcggagaagctctgagcctcctgaagaaaagattctcccatagacccgtgcaggagaagttcgtgtgcctgaactgcggcttcgagacacacgcagccgagcaagccgccctgaacatcgccagatcctggctgttcctgcggagccaggagtacaagaaataccagacaaacaagacaaccggcaacaccgataagagagccttcgtcgagacctggcagtccttttaccggaagaagcttaaggaggtgtggaaacctgccgtgcggtctggcggatctggcggaggctccacaagcatgcacctgaccgcctggccccagaagagcgtgaccttcgaggacgtggccgtgtacttcacccaggccgagtgggacggcctgagccccgcccagagggccctgtacagggacgtgatgctggagaactacggcaacgtggccagcctgggcttccccctgctgaagcccgccgtgatcagccagctggagggcggcggcgagctgggcggccccagccccctggccgccggcaccggcctgaccagccccaagaaaaagagaaaagtctaagctgccttctgcggggcttgccttctggccatgcccttcttctctcccttgcacctgtacctcttggtctttgaataaagcctgagtaggaaggctagcaaaaaaaaaaaaaaaaaaaaaaaaaaaaaaaaaaaaaaaaaaaaaaaaaaaaaaaaaaaaaaaaaaaaaaaaaaaaaaaa

SEQ ID NO: 6634 - RNA, 5797 nt, synthetic construct
  source 1..5797: mol_type = other RNA
aggaaataagagagaaaagaagagtaagaagaaatataagagccaccatggcccctaagaagaagcgtaaagtgagccggatggaacgcctcgtctacgaggtgcggcagaagtgcagaaacatcgaggacatctgcatctcctgcggatctctgaacgtgaccctggagcacccactgttcatcggcggcatgtgccagaactgtaaaaactgttttctggagtgtgcctatcaatacgacgatgacggctaccagagctactgcaccatctgttgcggcggaagagaggtgctgatgtgtggaaataacaactgctgccggtgcttctgcgtggaatgcgtggacctgctggtgggccccggcgccgcccaggccgctattaaggaagatccttggaactgctacatgtgcggccacaagggcacatacggcctgctgagacggagagaggactggcctagcagactgcagatgttcttcgccaataaccacgaccaggagttcgacccccctaaggtgtaccctcccgtccccgccgagaagagaaagcccatccgggtcctgagcctgttcgatggcatcgccaccggtctgctggtgctgaaggacctgggcatccaggtggataggtacattgcctccgaggtgtgcgaggactccatcaccgtgggaatggtgcgtcatcagggcaagatcatgtacgtgggcgacgtgcggagcgtgacacagaagcatatccaggagtggggccctttcgacctggtgatcggcggcagcccttgcaatgacctgagcatcgtgaacccagcccggaagggcctgtacgagggaaccggcagactgttcttcgagttttacagactgctgcacgacgcccggcctaaggaaggcgacgaccggcccttcttttggctgttcgagaatgtggtggccatgggagtcagcgacaagcgggatattagccggttcctggagagcaaccccgtgatgatcgatgccaaggaagtgagcgccgcccaccgggccagatacttctggggcaatctgcctggcatgaacagacccctggccagcaccgtgaacgacaagctggagctgcaggagtgcctggagcacggccggatcgccaagttcagcaaggtgagaaccatcaccacccgaagcaacagcatcaaacaaggcaaggaccagcactttcctgtgttcatgaacgagaaggaggacatcctgtggtgtaccgagatggagagagtgttcgggttcccagtccactacacagatgtcagcaacatgtctagactggccagacagagactgctgggaagaagctggtccgtccctgtgatcagacacctgttcgcccctctgaaggagtacttcgcctgcgtgagcagcggcaacagcaacgccaacagccggggccccagcttctctagcggcctggtgccactgtccctgagagggagccacatgggccccatggagatctacaaaaccgtgagcgcctggaagcggcagcctgtgcgcgtgctgagcctgtttcggaatatcgataaagtcctgaaaagcctgggattcctggagagcggctctggctccggcggtggcaccctgaagtacgtggaggatgtgacaaacgtggtcagacgggatgtggagaagtggggccccttcgatctggtgtacggcagcacccaacccctgggcagctcttgtgaccggtgccctggctggtacatgtttcagttccaccggatcctgcagtacgccctgccgagacaggagtcccagcggccattcttttggattttcatggacaacttgctgctgaccgaggatgaccaggaaactaccactcggttcctgcagaccgaagccgtgaccctgcaggacgtgagaggccgggactaccagaacgccatgcgggtgtggtccaacatccctggactgaaaagcaagcacgcacctctgacccctaaagaagaggagtacctgcaggcccaggtgcggagcagaagcaagctggacgcccctaaggtggatctgctggtgaagaattgcctcctgcccctgagagagtacttcaagtatttcagccagaatagtctgcccctgggcggcccaagcagcggcgcccctcctcccagcggcggcagcccagccggctccccaacctctaccgaggagggcacctctgagtccgccacccccgagagcggccctggcacctccaccgagcccagcgagggcagcgcacccggcagccctgccggcagccccacctccacagaggagggaaccagcaccgagcccagcgaaggcagcgccccaggcaccagcaccgagcctagtgagggcggctctggcggcggcagcgcccaggagattaaacggatcaacaagatcagaagaagacttgtgaaagacagcaacaccaagaaggccggcaagacaggccccatgaaaaccctgctggttagagtgatgacacccgatctgagagagcggctggaaaacctgagaaagaagcctgaaaatatcccccagcccatcagcaatacatctagagccaacctgaataagctgctgaccgattacaccgaaatgaagaaggcgatcctgcatgtgtactgggaagagttccagaaggaccctgtgggcctgatgagccgggtggcccagcctgccagcaagaagatcgatcagaacaagctgaaacctgagatggacgagaagggcaacctgaccaccgccggctttgcctgctctcagtgtggccagcccctgttcgtgtacaagctggagcaggtgtctgagaagggcaaggcttacaccaactacttcggacggtgcaatgtggccgagcacgaaaagctgatcctgctggcccagctgaagcccgagaaggatagcgacgaagccgtgacatatagcctgggaaagtttgggcagagggccctggatttctacagcattcatgtgaccaaggagtccacccaccccgtgaagcccctggcccagatcgccggaaacagatacgcctccggacctgtgggaaaggccctgagcgacgcatgtatgggcacaatcgcctccttcctgtctaagtaccaggacatcatcatcgaacaccagaaggtggtgaagggcaaccagaagagactggagagcctgcgggagctggccggcaaggaaaacctggaataccctagcgtgaccctgccacctcagcctcacaccaaggagggcgttgatgcctacaacgaagtgatcgcccgggtgcgaatgtgggtgaacctgaacctgtggcagaagctgaagctaagcagagatgatgccaagcctctgctgagactgaagggattcccttcctttcctctggtcgagagacaggccaacgaagtggactggtgggacatggtgtgtaacgtgaagaagctgatcaacgagaaaaaggaggatggcaaggtgttttggcagaatctggctggctacaagagacaggaagccctgagaccatacctgagcagcgaggaagatcggaagaagggaaagaaattcgctcggtaccagctgggcgacctgctgctgcacctggaaaagaagcacggcgaggactggggaaaggtgtacgacgaggcctgggagcggattgacaagaaagtggaaggcctgagcaagcacatcaagctggaagaggaacggagaagcgaggacgcccagagcaaggccgccctgaccgactggctgcgggctaaggccagcttcgtgatcgagggcctgaaggaggccgacaaggacgagttctgcagatgcgagctgaagctgcagaagtggtacggggacctgcggggaaagcccttcgccatcgaagccgagaacagcatcctggacatcagcggcttcagcaagcagtacaactgtgccttcatctggcagaaggacggcgtgaagaagctgaacctgtacctgatcatcaactacttcaagggcggcaagctgcggttcaagaagatcaaacctgaagccttcgaagccaacagattctacaccgtgatcaacaaaaagagcggcgagatcgtgcccatggaggtgaacttcaacttcgacgaccccaacctgatcatcctgcctctggcctttggcaagagacagggcagagaattcatctggaacgacctgctgtccctggaaaccggcagcctgaagctggccaacggaagagtgatcgagaagacactgtacaacagaagaacccggcaggatgagcctgccctgttcgtggccctgaccttcgagcggcgggaggtcctggactcctccaatatcaaaccaatgaacctgatcggcgtggcaagaggcgaaaacatccccgccgtgatcgccctgaccgaccccgagggctgcccactgagccggtttaaggatagcctgggaaacccaacccacatcctgagaatcggcgagagctataaggagaagcagcggaccatccaggccaagaaggaggtggagcagcggagagccggcggctacagccggaagtacgccagcaaagccaagaatctggcagacgatatggtgagaaacaccgctagagatctgctgtactacgccgtgacccaggatgccatgctgatcttcgccaacctgagccggggcttcggccggcagggcaagcggaccttcatggccgagagacagtacacacggatggaggactggctgaccgccaagctggcctacgagggcctgagcaagacctacctgtccaagacactggcccagtacacctccaagacatgcagcaactgtgggtttaccatcaccagcgccgactacgacagggtgctggagaagctgaagaagacagcaacaggctggatgaccacaattaacggcaaggagctgaaggtggagggccagattacctactacaacagatacaagagacagaacgtagtcaaggacctgtccgtcgagctggatagactgagcgaagaatctgtgaacaacgacatctcctcctggacaaagggcagaagcggagaagctctgagcctcctgaagaaaagattctcccatagacccgtgcaggagaagttcgtgtgcctgaactgcggcttcgagacacacgcagccgagcaagccgccctgaacatcgccagatcctggctgttcctgcggagccaggagtacaagaaataccagacaaacaagacaaccggcaacaccgataagagagccttcgtcgagacctggcagtccttttaccggaagaagcttaaggaggtgtggaaacctgccgtgcggtctggcggatctggcggaggctccacaagccccctggagagcgtgaccttcaaggacgtggccatcgacttcaccctggaggagtggaggctgatggaccccacccagaggaacctgcacaaggacgtgatgctggagaactacaggaacctggtgagcctgggcctggccgtgagcaagcccgacatgatcagccacctggagaacggcaagggcccctgggtgaccatgaggggcatcagcaggatcccctaccccgacatcgagcccaagaccagccccaagaaaaagagaaaagtctaagctgccttctgcggggcttgccttctggccatgcccttcttctctcccttgcacctgtacctcttggtctttgaataaagcctgagtaggaaggctagcaaaaaaaaaaaaaaaaaaaaaaaaaaaaaaaaaaaaaaaaaaaaaaaaaaaaaaaaaaaaaaaaaaaaaaaaaaaaaaaa

SEQ ID NO: 6635 - RNA, 5797 nt, synthetic construct
  source 1..5797: mol_type = other RNA
aggaaataagagagaaaagaagagtaagaagaaatataagagccaccatggcccctaagaagaagcgtaaagtgagccggatggaacgcctcgtctacgaggtgcggcagaagtgcagaaacatcgaggacatctgcatctcctgcggatctctgaacgtgaccctggagcacccactgttcatcggcggcatgtgccagaactgtaaaaactgttttctggagtgtgcctatcaatacgacgatgacggctaccagagctactgcaccatctgttgcggcggaagagaggtgctgatgtgtggaaataacaactgctgccggtgcttctgcgtggaatgcgtggacctgctggtgggccccggcgccgcccaggccgctattaaggaagatccttggaactgctacatgtgcggccacaagggcacatacggcctgctgagacggagagaggactggcctagcagactgcagatgttcttcgccaataaccacgaccaggagttcgacccccctaaggtgtaccctcccgtccccgccgagaagagaaagcccatccgggtcctgagcctgttcgatggcatcgccaccggtctgctggtgctgaaggacctgggcatccaggtggataggtacattgcctccgaggtgtgcgaggactccatcaccgtgggaatggtgcgtcatcagggcaagatcatgtacgtgggcgacgtgcggagcgtgacacagaagcatatccaggagtggggccctttcgacctggtgatcggcggcagcccttgcaatgacctgagcatcgtgaacccagcccggaagggcctgtacgagggaaccggcagactgttcttcgagttttacagactgctgcacgacgcccggcctaaggaaggcgacgaccggcccttcttttggctgttcgagaatgtggtggccatgggagtcagcgacaagcgggatattagccggttcctggagagcaaccccgtgatgatcgatgccaaggaagtgagcgccgcccaccgggccagatacttctggggcaatctgcctggcatgaacagacccctggccagcaccgtgaacgacaagctggagctgcaggagtgcctggagcacggccggatcgccaagttcagcaaggtgagaaccatcaccacccgaagcaacagcatcaaacaaggcaaggaccagcactttcctgtgttcatgaacgagaaggaggacatcctgtggtgtaccgagatggagagagtgttcgggttcccagtccactacacagatgtcagcaacatgtctagactggccagacagagactgctgggaagaagctggtccgtccctgtgatcagacacctgttcgcccctctgaaggagtacttcgcctgcgtgagcagcggcaacagcaacgccaacagccggggccccagcttctctagcggcctggtgccactgtccctgagagggagccacatgggccccatggagatctacaaaaccgtgagcgcctggaagcggcagcctgtgcgcgtgctgagcctgtttcggaatatcgataaagtcctgaaaagcctgggattcctggagagcggctctggctccggcggtggcaccctgaagtacgtggaggatgtgacaaacgtggtcagacgggatgtggagaagtggggccccttcgatctggtgtacggcagcacccaacccctgggcagctcttgtgaccggtgccctggctggtacatgtttcagttccaccggatcctgcagtacgccctgccgagacaggagtcccagcggccattcttttggattttcatggacaacttgctgctgaccgaggatgaccaggaaactaccactcggttcctgcagaccgaagccgtgaccctgcaggacgtgagaggccgggactaccagaacgccatgcgggtgtggtccaacatccctggactgaaaagcaagcacgcacctctgacccctaaagaagaggagtacctgcaggcccaggtgcggagcagaagcaagctggacgcccctaaggtggatctgctggtgaagaattgcctcctgcccctgagagagtacttcaagtatttcagccagaatagtctgcccctgggcggcccaagcagcggcgcccctcctcccagcggcggcagcccagccggctccccaacctctaccgaggagggcacctctgagtccgccacccccgagagcggccctggcacctccaccgagcccagcgagggcagcgcacccggcagccctgccggcagccccacctccacagaggagggaaccagcaccgagcccagcgaaggcagcgccccaggcaccagcaccgagcctagtgagggcggctctggcggcggcagcgcccaggagattaaacggatcaacaagatcagaagaagacttgtgaaagacagcaacaccaagaaggccggcaagacaggccccatgaaaaccctgctggttagagtgatgacacccgatctgagagagcggctggaaaacctgagaaagaagcctgaaaatatcccccagcccatcagcaatacatctagagccaacctgaataagctgctgaccgattacaccgaaatgaagaaggcgatcctgcatgtgtactgggaagagttccagaaggaccctgtgggcctgatgagccgggtggcccagcctgccagcaagaagatcgatcagaacaagctgaaacctgagatggacgagaagggcaacctgaccaccgccggctttgcctgctctcagtgtggccagcccctgttcgtgtacaagctggagcaggtgtctgagaagggcaaggcttacaccaactacttcggacggtgcaatgtggccgagcacgaaaagctgatcctgctggcccagctgaagcccgagaaggatagcgacgaagccgtgacatatagcctgggaaagtttgggcagagggccctggatttctacagcattcatgtgaccaaggagtccacccaccccgtgaagcccctggcccagatcgccggaaacagatacgcctccggacctgtgggaaaggccctgagcgacgcatgtatgggcacaatcgcctccttcctgtctaagtaccaggacatcatcatcgaacaccagaaggtggtgaagggcaaccagaagagactggagagcctgcgggagctggccggcaaggaaaacctggaataccctagcgtgaccctgccacctcagcctcacaccaaggagggcgttgatgcctacaacgaagtgatcgcccgggtgcgaatgtgggtgaacctgaacctgtggcagaagctgaagctaagcagagatgatgccaagcctctgctgagactgaagggattcccttcctttcctctggtcgagagacaggccaacgaagtggactggtgggacatggtgtgtaacgtgaagaagctgatcaacgagaaaaaggaggatggcaaggtgttttggcagaatctggctggctacaagagacaggaagccctgagaccatacctgagcagcgaggaagatcggaagaagggaaagaaattcgctcggtaccagctgggcgacctgctgctgcacctggaaaagaagcacggcgaggactggggaaaggtgtacgacgaggcctgggagcggattgacaagaaagtggaaggcctgagcaagcacatcaagctggaagaggaacggagaagcgaggacgcccagagcaaggccgccctgaccgactggctgcgggctaaggccagcttcgtgatcgagggcctgaaggaggccgacaaggacgagttctgcagatgcgagctgaagctgcagaagtggtacggggacctgcggggaaagcccttcgccatcgaagccgagaacagcatcctggacatcagcggcttcagcaagcagtacaactgtgccttcatctggcagaaggacggcgtgaagaagctgaacctgtacctgatcatcaactacttcaagggcggcaagctgcggttcaagaagatcaaacctgaagccttcgaagccaacagattctacaccgtgatcaacaaaaagagcggcgagatcgtgcccatggaggtgaacttcaacttcgacgaccccaacctgatcatcctgcctctggcctttggcaagagacagggcagagaattcatctggaacgacctgctgtccctggaaaccggcagcctgaagctggccaacggaagagtgatcgagaagacactgtacaacagaagaacccggcaggatgagcctgccctgttcgtggccctgaccttcgagcggcgggaggtcctggactcctccaatatcaaaccaatgaacctgatcggcgtggcaagaggcgaaaacatccccgccgtgatcgccctgaccgaccccgagggctgcccactgagccggtttaaggatagcctgggaaacccaacccacatcctgagaatcggcgagagctataaggagaagcagcggaccatccaggccaagaaggaggtggagcagcggagagccggcggctacagccggaagtacgccagcaaagccaagaatctggcagacgatatggtgagaaacaccgctagagatctgctgtactacgccgtgacccaggatgccatgctgatcttcgccaacctgagccggggcttcggccggcagggcaagcggaccttcatggccgagagacagtacacacggatggaggactggctgaccgccaagctggcctacgagggcctgagcaagacctacctgtccaagacactggcccagtacacctccaagacatgcagcaactgtgggtttaccatcaccagcgccgactacgacagggtgctggagaagctgaagaagacagcaacaggctggatgaccacaattaacggcaaggagctgaaggtggagggccagattacctactacaacagatacaagagacagaacgtagtcaaggacctgtccgtcgagctggatagactgagcgaagaatctgtgaacaacgacatctcctcctggacaaagggcagaagcggagaagctctgagcctcctgaagaaaagattctcccatagacccgtgcaggagaagttcgtgtgcctgaactgcggcttcgagacacacgcagccgagcaagccgccctgaacatcgccagatcctggctgttcctgcggagccaggagtacaagaaataccagacaaacaagacaaccggcaacaccgataagagagccttcgtcgagacctggcagtccttttaccggaagaagcttaaggaggtgtggaaacctgccgtgcggtctggcggatctggcggaggctccacaagcagggccctgacccccgtgagcatgaccgccgaggccaagtgcaccggcttcacccagggcagcgtgaccttcgaggacgtggccatctacttcagccaggaggagtggggcctgctggacgaggcccagaggctgctgtacagggacgtgatgctggagaacttcgccctgctgaccagcctggtgtgctggcacggcatggaggacgaggagacccccgagcagagcgtgagcgtgaacggcaccagccccaagaaaaagagaaaagtctaagctgccttctgcggggcttgccttctggccatgcccttcttctctcccttgcacctgtacctcttggtctttgaataaagcctgagtaggaaggctagcaaaaaaaaaaaaaaaaaaaaaaaaaaaaaaaaaaaaaaaaaaaaaaaaaaaaaaaaaaaaaaaaaaaaaaaaaaaaaaaa

SEQ ID NO: 6636 - RNA, 5797 nt, synthetic construct
  source 1..5797: mol_type = other RNA
aggaaataagagagaaaagaagagtaagaagaaatataagagccaccatggcccctaagaagaagcgtaaagtgagccggatggaacgcctcgtctacgaggtgcggcagaagtgcagaaacatcgaggacatctgcatctcctgcggatctctgaacgtgaccctggagcacccactgttcatcggcggcatgtgccagaactgtaaaaactgttttctggagtgtgcctatcaatacgacgatgacggctaccagagctactgcaccatctgttgcggcggaagagaggtgctgatgtgtggaaataacaactgctgccggtgcttctgcgtggaatgcgtggacctgctggtgggccccggcgccgcccaggccgctattaaggaagatccttggaactgctacatgtgcggccacaagggcacatacggcctgctgagacggagagaggactggcctagcagactgcagatgttcttcgccaataaccacgaccaggagttcgacccccctaaggtgtaccctcccgtccccgccgagaagagaaagcccatccgggtcctgagcctgttcgatggcatcgccaccggtctgctggtgctgaaggacctgggcatccaggtggataggtacattgcctccgaggtgtgcgaggactccatcaccgtgggaatggtgcgtcatcagggcaagatcatgtacgtgggcgacgtgcggagcgtgacacagaagcatatccaggagtggggccctttcgacctggtgatcggcggcagcccttgcaatgacctgagcatcgtgaacccagcccggaagggcctgtacgagggaaccggcagactgttcttcgagttttacagactgctgcacgacgcccggcctaaggaaggcgacgaccggcccttcttttggctgttcgagaatgtggtggccatgggagtcagcgacaagcgggatattagccggttcctggagagcaaccccgtgatgatcgatgccaaggaagtgagcgccgcccaccgggccagatacttctggggcaatctgcctggcatgaacagacccctggccagcaccgtgaacgacaagctggagctgcaggagtgcctggagcacggccggatcgccaagttcagcaaggtgagaaccatcaccacccgaagcaacagcatcaaacaaggcaaggaccagcactttcctgtgttcatgaacgagaaggaggacatcctgtggtgtaccgagatggagagagtgttcgggttcccagtccactacacagatgtcagcaacatgtctagactggccagacagagactgctgggaagaagctggtccgtccctgtgatcagacacctgttcgcccctctgaaggagtacttcgcctgcgtgagcagcggcaacagcaacgccaacagccggggccccagcttctctagcggcctggtgccactgtccctgagagggagccacatgggccccatggagatctacaaaaccgtgagcgcctggaagcggcagcctgtgcgcgtgctgagcctgtttcggaatatcgataaagtcctgaaaagcctgggattcctggagagcggctctggctccggcggtggcaccctgaagtacgtggaggatgtgacaaacgtggtcagacgggatgtggagaagtggggccccttcgatctggtgtacggcagcacccaacccctgggcagctcttgtgaccggtgccctggctggtacatgtttcagttccaccggatcctgcagtacgccctgccgagacaggagtcccagcggccattcttttggattttcatggacaacttgctgctgaccgaggatgaccaggaaactaccactcggttcctgcagaccgaagccgtgaccctgcaggacgtgagaggccgggactaccagaacgccatgcgggtgtggtccaacatccctggactgaaaagcaagcacgcacctctgacccctaaagaagaggagtacctgcaggcccaggtgcggagcagaagcaagctggacgcccctaaggtggatctgctggtgaagaattgcctcctgcccctgagagagtacttcaagtatttcagccagaatagtctgcccctgggcggcccaagcagcggcgcccctcctcccagcggcggcagcccagccggctccccaacctctaccgaggagggcacctctgagtccgccacccccgagagcggccctggcacctccaccgagcccagcgagggcagcgcacccggcagccctgccggcagccccacctccacagaggagggaaccagcaccgagcccagcgaaggcagcgccccaggcaccagcaccgagcctagtgagggcggctctggcggcggcagcgcccaggagattaaacggatcaacaagatcagaagaagacttgtgaaagacagcaacaccaagaaggccggcaagacaggccccatgaaaaccctgctggttagagtgatgacacccgatctgagagagcggctggaaaacctgagaaagaagcctgaaaatatcccccagcccatcagcaatacatctagagccaacctgaataagctgctgaccgattacaccgaaatgaagaaggcgatcctgcatgtgtactgggaagagttccagaaggaccctgtgggcctgatgagccgggtggcccagcctgccagcaagaagatcgatcagaacaagctgaaacctgagatggacgagaagggcaacctgaccaccgccggctttgcctgctctcagtgtggccagcccctgttcgtgtacaagctggagcaggtgtctgagaagggcaaggcttacaccaactacttcggacggtgcaatgtggccgagcacgaaaagctgatcctgctggcccagctgaagcccgagaaggatagcgacgaagccgtgacatatagcctgggaaagtttgggcagagggccctggatttctacagcattcatgtgaccaaggagtccacccaccccgtgaagcccctggcccagatcgccggaaacagatacgcctccggacctgtgggaaaggccctgagcgacgcatgtatgggcacaatcgcctccttcctgtctaagtaccaggacatcatcatcgaacaccagaaggtggtgaagggcaaccagaagagactggagagcctgcgggagctggccggcaaggaaaacctggaataccctagcgtgaccctgccacctcagcctcacaccaaggagggcgttgatgcctacaacgaagtgatcgcccgggtgcgaatgtgggtgaacctgaacctgtggcagaagctgaagctaagcagagatgatgccaagcctctgctgagactgaagggattcccttcctttcctctggtcgagagacaggccaacgaagtggactggtgggacatggtgtgtaacgtgaagaagctgatcaacgagaaaaaggaggatggcaaggtgttttggcagaatctggctggctacaagagacaggaagccctgagaccatacctgagcagcgaggaagatcggaagaagggaaagaaattcgctcggtaccagctgggcgacctgctgctgcacctggaaaagaagcacggcgaggactggggaaaggtgtacgacgaggcctgggagcggattgacaagaaagtggaaggcctgagcaagcacatcaagctggaagaggaacggagaagcgaggacgcccagagcaaggccgccctgaccgactggctgcgggctaaggccagcttcgtgatcgagggcctgaaggaggccgacaaggacgagttctgcagatgcgagctgaagctgcagaagtggtacggggacctgcggggaaagcccttcgccatcgaagccgagaacagcatcctggacatcagcggcttcagcaagcagtacaactgtgccttcatctggcagaaggacggcgtgaagaagctgaacctgtacctgatcatcaactacttcaagggcggcaagctgcggttcaagaagatcaaacctgaagccttcgaagccaacagattctacaccgtgatcaacaaaaagagcggcgagatcgtgcccatggaggtgaacttcaacttcgacgaccccaacctgatcatcctgcctctggcctttggcaagagacagggcagagaattcatctggaacgacctgctgtccctggaaaccggcagcctgaagctggccaacggaagagtgatcgagaagacactgtacaacagaagaacccggcaggatgagcctgccctgttcgtggccctgaccttcgagcggcgggaggtcctggactcctccaatatcaaaccaatgaacctgatcggcgtggcaagaggcgaaaacatccccgccgtgatcgccctgaccgaccccgagggctgcccactgagccggtttaaggatagcctgggaaacccaacccacatcctgagaatcggcgagagctataaggagaagcagcggaccatccaggccaagaaggaggtggagcagcggagagccggcggctacagccggaagtacgccagcaaagccaagaatctggcagacgatatggtgagaaacaccgctagagatctgctgtactacgccgtgacccaggatgccatgctgatcttcgccaacctgagccggggcttcggccggcagggcaagcggaccttcatggccgagagacagtacacacggatggaggactggctgaccgccaagctggcctacgagggcctgagcaagacctacctgtccaagacactggcccagtacacctccaagacatgcagcaactgtgggtttaccatcaccagcgccgactacgacagggtgctggagaagctgaagaagacagcaacaggctggatgaccacaattaacggcaaggagctgaaggtggagggccagattacctactacaacagatacaagagacagaacgtagtcaaggacctgtccgtcgagctggatagactgagcgaagaatctgtgaacaacgacatctcctcctggacaaagggcagaagcggagaagctctgagcctcctgaagaaaagattctcccatagacccgtgcaggagaagttcgtgtgcctgaactgcggcttcgagacacacgcagccgagcaagccgccctgaacatcgccagatcctggctgttcctgcggagccaggagtacaagaaataccagacaaacaagacaaccggcaacaccgataagagagccttcgtcgagacctggcagtccttttaccggaagaagcttaaggaggtgtggaaacctgccgtgcggtctggcggatctggcggaggctccacaagcgcctgcggcagcatcaccttcagggacgtggccatcgacttcagccaccaggagtgggagtacctgaacctggtgcagaagaccctgtaccaggaggtgatgatggagaactacgacaacctggtgctgctgggccacagcaagagcaagcccgacctgatcaccctgctggagcagggcaaggagccctggatgatcgtgagggaggagaccaggggcgagtgcaccgccgagctgcagagcaccagccccaagaaaaagagaaaagtctaagctgccttctgcggggcttgccttctggccatgcccttcttctctcccttgcacctgtacctcttggtctttgaataaagcctgagtaggaaggctagcaaaaaaaaaaaaaaaaaaaaaaaaaaaaaaaaaaaaaaaaaaaaaaaaaaaaaaaaaaaaaaaaaaaaaaaaaaaaaaaa

SEQ ID NO: 6637 - RNA, 5797 nt, synthetic construct
  source 1..5797: mol_type = other RNA
aggaaataagagagaaaagaagagtaagaagaaatataagagccaccatggcccctaagaagaagcgtaaagtgagccggatggaacgcctcgtctacgaggtgcggcagaagtgcagaaacatcgaggacatctgcatctcctgcggatctctgaacgtgaccctggagcacccactgttcatcggcggcatgtgccagaactgtaaaaactgttttctggagtgtgcctatcaatacgacgatgacggctaccagagctactgcaccatctgttgcggcggaagagaggtgctgatgtgtggaaataacaactgctgccggtgcttctgcgtggaatgcgtggacctgctggtgggccccggcgccgcccaggccgctattaaggaagatccttggaactgctacatgtgcggccacaagggcacatacggcctgctgagacggagagaggactggcctagcagactgcagatgttcttcgccaataaccacgaccaggagttcgacccccctaaggtgtaccctcccgtccccgccgagaagagaaagcccatccgggtcctgagcctgttcgatggcatcgccaccggtctgctggtgctgaaggacctgggcatccaggtggataggtacattgcctccgaggtgtgcgaggactccatcaccgtgggaatggtgcgtcatcagggcaagatcatgtacgtgggcgacgtgcggagcgtgacacagaagcatatccaggagtggggccctttcgacctggtgatcggcggcagcccttgcaatgacctgagcatcgtgaacccagcccggaagggcctgtacgagggaaccggcagactgttcttcgagttttacagactgctgcacgacgcccggcctaaggaaggcgacgaccggcccttcttttggctgttcgagaatgtggtggccatgggagtcagcgacaagcgggatattagccggttcctggagagcaaccccgtgatgatcgatgccaaggaagtgagcgccgcccaccgggccagatacttctggggcaatctgcctggcatgaacagacccctggccagcaccgtgaacgacaagctggagctgcaggagtgcctggagcacggccggatcgccaagttcagcaaggtgagaaccatcaccacccgaagcaacagcatcaaacaaggcaaggaccagcactttcctgtgttcatgaacgagaaggaggacatcctgtggtgtaccgagatggagagagtgttcgggttcccagtccactacacagatgtcagcaacatgtctagactggccagacagagactgctgggaagaagctggtccgtccctgtgatcagacacctgttcgcccctctgaaggagtacttcgcctgcgtgagcagcggcaacagcaacgccaacagccggggccccagcttctctagcggcctggtgccactgtccctgagagggagccacatgggccccatggagatctacaaaaccgtgagcgcctggaagcggcagcctgtgcgcgtgctgagcctgtttcggaatatcgataaagtcctgaaaagcctgggattcctggagagcggctctggctccggcggtggcaccctgaagtacgtggaggatgtgacaaacgtggtcagacgggatgtggagaagtggggccccttcgatctggtgtacggcagcacccaacccctgggcagctcttgtgaccggtgccctggctggtacatgtttcagttccaccggatcctgcagtacgccctgccgagacaggagtcccagcggccattcttttggattttcatggacaacttgctgctgaccgaggatgaccaggaaactaccactcggttcctgcagaccgaagccgtgaccctgcaggacgtgagaggccgggactaccagaacgccatgcgggtgtggtccaacatccctggactgaaaagcaagcacgcacctctgacccctaaagaagaggagtacctgcaggcccaggtgcggagcagaagcaagctggacgcccctaaggtggatctgctggtgaagaattgcctcctgcccctgagagagtacttcaagtatttcagccagaatagtctgcccctgggcggcccaagcagcggcgcccctcctcccagcggcggcagcccagccggctccccaacctctaccgaggagggcacctctgagtccgccacccccgagagcggccctggcacctccaccgagcccagcgagggcagcgcacccggcagccctgccggcagccccacctccacagaggagggaaccagcaccgagcccagcgaaggcagcgccccaggcaccagcaccgagcctagtgagggcggctctggcggcggcagcgcccaggagattaaacggatcaacaagatcagaagaagacttgtgaaagacagcaacaccaagaaggccggcaagacaggccccatgaaaaccctgctggttagagtgatgacacccgatctgagagagcggctggaaaacctgagaaagaagcctgaaaatatcccccagcccatcagcaatacatctagagccaacctgaataagctgctgaccgattacaccgaaatgaagaaggcgatcctgcatgtgtactgggaagagttccagaaggaccctgtgggcctgatgagccgggtggcccagcctgccagcaagaagatcgatcagaacaagctgaaacctgagatggacgagaagggcaacctgaccaccgccggctttgcctgctctcagtgtggccagcccctgttcgtgtacaagctggagcaggtgtctgagaagggcaaggcttacaccaactacttcggacggtgcaatgtggccgagcacgaaaagctgatcctgctggcccagctgaagcccgagaaggatagcgacgaagccgtgacatatagcctgggaaagtttgggcagagggccctggatttctacagcattcatgtgaccaaggagtccacccaccccgtgaagcccctggcccagatcgccggaaacagatacgcctccggacctgtgggaaaggccctgagcgacgcatgtatgggcacaatcgcctccttcctgtctaagtaccaggacatcatcatcgaacaccagaaggtggtgaagggcaaccagaagagactggagagcctgcgggagctggccggcaaggaaaacctggaataccctagcgtgaccctgccacctcagcctcacaccaaggagggcgttgatgcctacaacgaagtgatcgcccgggtgcgaatgtgggtgaacctgaacctgtggcagaagctgaagctaagcagagatgatgccaagcctctgctgagactgaagggattcccttcctttcctctggtcgagagacaggccaacgaagtggactggtgggacatggtgtgtaacgtgaagaagctgatcaacgagaaaaaggaggatggcaaggtgttttggcagaatctggctggctacaagagacaggaagccctgagaccatacctgagcagcgaggaagatcggaagaagggaaagaaattcgctcggtaccagctgggcgacctgctgctgcacctggaaaagaagcacggcgaggactggggaaaggtgtacgacgaggcctgggagcggattgacaagaaagtggaaggcctgagcaagcacatcaagctggaagaggaacggagaagcgaggacgcccagagcaaggccgccctgaccgactggctgcgggctaaggccagcttcgtgatcgagggcctgaaggaggccgacaaggacgagttctgcagatgcgagctgaagctgcagaagtggtacggggacctgcggggaaagcccttcgccatcgaagccgagaacagcatcctggacatcagcggcttcagcaagcagtacaactgtgccttcatctggcagaaggacggcgtgaagaagctgaacctgtacctgatcatcaactacttcaagggcggcaagctgcggttcaagaagatcaaacctgaagccttcgaagccaacagattctacaccgtgatcaacaaaaagagcggcgagatcgtgcccatggaggtgaacttcaacttcgacgaccccaacctgatcatcctgcctctggcctttggcaagagacagggcagagaattcatctggaacgacctgctgtccctggaaaccggcagcctgaagctggccaacggaagagtgatcgagaagacactgtacaacagaagaacccggcaggatgagcctgccctgttcgtggccctgaccttcgagcggcgggaggtcctggactcctccaatatcaaaccaatgaacctgatcggcgtggcaagaggcgaaaacatccccgccgtgatcgccctgaccgaccccgagggctgcccactgagccggtttaaggatagcctgggaaacccaacccacatcctgagaatcggcgagagctataaggagaagcagcggaccatccaggccaagaaggaggtggagcagcggagagccggcggctacagccggaagtacgccagcaaagccaagaatctggcagacgatatggtgagaaacaccgctagagatctgctgtactacgccgtgacccaggatgccatgctgatcttcgccaacctgagccggggcttcggccggcagggcaagcggaccttcatggccgagagacagtacacacggatggaggactggctgaccgccaagctggcctacgagggcctgagcaagacctacctgtccaagacactggcccagtacacctccaagacatgcagcaactgtgggtttaccatcaccagcgccgactacgacagggtgctggagaagctgaagaagacagcaacaggctggatgaccacaattaacggcaaggagctgaaggtggagggccagattacctactacaacagatacaagagacagaacgtagtcaaggacctgtccgtcgagctggatagactgagcgaagaatctgtgaacaacgacatctcctcctggacaaagggcagaagcggagaagctctgagcctcctgaagaaaagattctcccatagacccgtgcaggagaagttcgtgtgcctgaactgcggcttcgagacacacgcagccgagcaagccgccctgaacatcgccagatcctggctgttcctgcggagccaggagtacaagaaataccagacaaacaagacaaccggcaacaccgataagagagccttcgtcgagacctggcagtccttttaccggaagaagcttaaggaggtgtggaaacctgccgtgcggtctggcggatctggcggaggctccacaagcgacaaggccctgatggccttccacgacgtggccgtggccttcagccagatggagtgggagctgctgagccccgcccagaggatcctgtacagggaggtgatgctggagaactacagccacctggtgagcctgggcatcgccttcagcaagcccaagctgatcacccagctggagcagggcgccgagccctggagggacggcagcggctgcttcctggacctgtgccccgccgagcccaggaccaccagccccaagaaaaagagaaaagtctaagctgccttctgcggggcttgccttctggccatgcccttcttctctcccttgcacctgtacctcttggtctttgaataaagcctgagtaggaaggctagcaaaaaaaaaaaaaaaaaaaaaaaaaaaaaaaaaaaaaaaaaaaaaaaaaaaaaaaaaaaaaaaaaaaaaaaaaaaaaaaa

SEQ ID NO: 6638 - RNA, 5833 nt, synthetic construct
  source 1..5833: mol_type = other RNA
aggaaataagagagaaaagaagagtaagaagaaatataagagccaccatggcccctaagaagaagcgtaaagtgagccggatggaacgcctcgtctacgaggtgcggcagaagtgcagaaacatcgaggacatctgcatctcctgcggatctctgaacgtgaccctggagcacccactgttcatcggcggcatgtgccagaactgtaaaaactgttttctggagtgtgcctatcaatacgacgatgacggctaccagagctactgcaccatctgttgcggcggaagagaggtgctgatgtgtggaaataacaactgctgccggtgcttctgcgtggaatgcgtggacctgctggtgggccccggcgccgcccaggccgctattaaggaagatccttggaactgctacatgtgcggccacaagggcacatacggcctgctgagacggagagaggactggcctagcagactgcagatgttcttcgccaataaccacgaccaggagttcgacccccctaaggtgtaccctcccgtccccgccgagaagagaaagcccatccgggtcctgagcctgttcgatggcatcgccaccggtctgctggtgctgaaggacctgggcatccaggtggataggtacattgcctccgaggtgtgcgaggactccatcaccgtgggaatggtgcgtcatcagggcaagatcatgtacgtgggcgacgtgcggagcgtgacacagaagcatatccaggagtggggccctttcgacctggtgatcggcggcagcccttgcaatgacctgagcatcgtgaacccagcccggaagggcctgtacgagggaaccggcagactgttcttcgagttttacagactgctgcacgacgcccggcctaaggaaggcgacgaccggcccttcttttggctgttcgagaatgtggtggccatgggagtcagcgacaagcgggatattagccggttcctggagagcaaccccgtgatgatcgatgccaaggaagtgagcgccgcccaccgggccagatacttctggggcaatctgcctggcatgaacagacccctggccagcaccgtgaacgacaagctggagctgcaggagtgcctggagcacggccggatcgccaagttcagcaaggtgagaaccatcaccacccgaagcaacagcatcaaacaaggcaaggaccagcactttcctgtgttcatgaacgagaaggaggacatcctgtggtgtaccgagatggagagagtgttcgggttcccagtccactacacagatgtcagcaacatgtctagactggccagacagagactgctgggaagaagctggtccgtccctgtgatcagacacctgttcgcccctctgaaggagtacttcgcctgcgtgagcagcggcaacagcaacgccaacagccggggccccagcttctctagcggcctggtgccactgtccctgagagggagccacatgggccccatggagatctacaaaaccgtgagcgcctggaagcggcagcctgtgcgcgtgctgagcctgtttcggaatatcgataaagtcctgaaaagcctgggattcctggagagcggctctggctccggcggtggcaccctgaagtacgtggaggatgtgacaaacgtggtcagacgggatgtggagaagtggggccccttcgatctggtgtacggcagcacccaacccctgggcagctcttgtgaccggtgccctggctggtacatgtttcagttccaccggatcctgcagtacgccctgccgagacaggagtcccagcggccattcttttggattttcatggacaacttgctgctgaccgaggatgaccaggaaactaccactcggttcctgcagaccgaagccgtgaccctgcaggacgtgagaggccgggactaccagaacgccatgcgggtgtggtccaacatccctggactgaaaagcaagcacgcacctctgacccctaaagaagaggagtacctgcaggcccaggtgcggagcagaagcaagctggacgcccctaaggtggatctgctggtgaagaattgcctcctgcccctgagagagtacttcaagtatttcagccagaatagtctgcccctgggcggcccaagcagcggcgcccctcctcccagcggcggcagcccagccggctccccaacctctaccgaggagggcacctctgagtccgccacccccgagagcggccctggcacctccaccgagcccagcgagggcagcgcacccggcagccctgccggcagccccacctccacagaggagggaaccagcaccgagcccagcgaaggcagcgccccaggcaccagcaccgagcctagtgagggcggctctggcggcggcagcgcccaggagattaaacggatcaacaagatcagaagaagacttgtgaaagacagcaacaccaagaaggccggcaagacaggccccatgaaaaccctgctggttagagtgatgacacccgatctgagagagcggctggaaaacctgagaaagaagcctgaaaatatcccccagcccatcagcaatacatctagagccaacctgaataagctgctgaccgattacaccgaaatgaagaaggcgatcctgcatgtgtactgggaagagttccagaaggaccctgtgggcctgatgagccgggtggcccagcctgccagcaagaagatcgatcagaacaagctgaaacctgagatggacgagaagggcaacctgaccaccgccggctttgcctgctctcagtgtggccagcccctgttcgtgtacaagctggagcaggtgtctgagaagggcaaggcttacaccaactacttcggacggtgcaatgtggccgagcacgaaaagctgatcctgctggcccagctgaagcccgagaaggatagcgacgaagccgtgacatatagcctgggaaagtttgggcagagggccctggatttctacagcattcatgtgaccaaggagtccacccaccccgtgaagcccctggcccagatcgccggaaacagatacgcctccggacctgtgggaaaggccctgagcgacgcatgtatgggcacaatcgcctccttcctgtctaagtaccaggacatcatcatcgaacaccagaaggtggtgaagggcaaccagaagagactggagagcctgcgggagctggccggcaaggaaaacctggaataccctagcgtgaccctgccacctcagcctcacaccaaggagggcgttgatgcctacaacgaagtgatcgcccgggtgcgaatgtgggtgaacctgaacctgtggcagaagctgaagctaagcagagatgatgccaagcctctgctgagactgaagggattcccttcctttcctctggtcgagagacaggccaacgaagtggactggtgggacatggtgtgtaacgtgaagaagctgatcaacgagaaaaaggaggatggcaaggtgttttggcagaatctggctggctacaagagacaggaagccctgagaccatacctgagcagcgaggaagatcggaagaagggaaagaaattcgctcggtaccagctgggcgacctgctgctgcacctggaaaagaagcacggcgaggactggggaaaggtgtacgacgaggcctgggagcggattgacaagaaagtggaaggcctgagcaagcacatcaagctggaagaggaacggagaagcgaggacgcccagagcaaggccgccctgaccgactggctgcgggctaaggccagcttcgtgatcgagggcctgaaggaggccgacaaggacgagttctgcagatgcgagctgaagctgcagaagtggtacggggacctgcggggaaagcccttcgccatcgaagccgagaacagcatcctggacatcagcggcttcagcaagcagtacaactgtgccttcatctggcagaaggacggcgtgaagaagctgaacctgtacctgatcatcaactacttcaagggcggcaagctgcggttcaagaagatcaaacctgaagccttcgaagccaacagattctacaccgtgatcaacaaaaagagcggcgagatcgtgcccatggaggtgaacttcaacttcgacgaccccaacctgatcatcctgcctctggcctttggcaagagacagggcagagaattcatctggaacgacctgctgtccctggaaaccggcagcctgaagctggccaacggaagagtgatcgagaagacactgtacaacagaagaacccggcaggatgagcctgccctgttcgtggccctgaccttcgagcggcgggaggtcctggactcctccaatatcaaaccaatgaacctgatcggcgtggcaagaggcgaaaacatccccgccgtgatcgccctgaccgaccccgagggctgcccactgagccggtttaaggatagcctgggaaacccaacccacatcctgagaatcggcgagagctataaggagaagcagcggaccatccaggccaagaaggaggtggagcagcggagagccggcggctacagccggaagtacgccagcaaagccaagaatctggcagacgatatggtgagaaacaccgctagagatctgctgtactacgccgtgacccaggatgccatgctgatcttcgccaacctgagccggggcttcggccggcagggcaagcggaccttcatggccgagagacagtacacacggatggaggactggctgaccgccaagctggcctacgagggcctgagcaagacctacctgtccaagacactggcccagtacacctccaagacatgcagcaactgtgggtttaccatcaccagcgccgactacgacagggtgctggagaagctgaagaagacagcaacaggctggatgaccacaattaacggcaaggagctgaaggtggagggccagattacctactacaacagatacaagagacagaacgtagtcaaggacctgtccgtcgagctggatagactgagcgaagaatctgtgaacaacgacatctcctcctggacaaagggcagaagcggagaagctctgagcctcctgaagaaaagattctcccatagacccgtgcaggagaagttcgtgtgcctgaactgcggcttcgagacacacgcagccgagcaagccgccctgaacatcgccagatcctggctgttcctgcggagccaggagtacaagaaataccagacaaacaagacaaccggcaacaccgataagagagccttcgtcgagacctggcagtccttttaccggaagaagcttaaggaggtgtggaaacctgccgtgcggtctggcggatctggcggaggctccacaagcgtgagcttcgaggaggtggccgtgcacttcagcgaggaggagtggagccagctggaccccgcccagaaggccctgcacggcgaggtgatgctggagaacagcaggaacctggccagcctgggctacaacgagcacggcaacaagaactgcaaggagcagtgccagcccgtggaccccaacgagcagaacaggaacttcgccgaccagatgcagaccaagatcgacgagaccaaccagagccagagcgaggtggagaagaccttccacagcacccaccacaccagccccaagaaaaagagaaaagtctaagctgccttctgcggggcttgccttctggccatgcccttcttctctcccttgcacctgtacctcttggtctttgaataaagcctgagtaggaaggctagcaaaaaaaaaaaaaaaaaaaaaaaaaaaaaaaaaaaaaaaaaaaaaaaaaaaaaaaaaaaaaaaaaaaaaaaaaaaaaaaa

SEQ ID NO: 6639 - RNA, 5797 nt, synthetic construct
  source 1..5797: mol_type = other RNA
aggaaataagagagaaaagaagagtaagaagaaatataagagccaccatggcccctaagaagaagcgtaaagtgagccggatggaacgcctcgtctacgaggtgcggcagaagtgcagaaacatcgaggacatctgcatctcctgcggatctctgaacgtgaccctggagcacccactgttcatcggcggcatgtgccagaactgtaaaaactgttttctggagtgtgcctatcaatacgacgatgacggctaccagagctactgcaccatctgttgcggcggaagagaggtgctgatgtgtggaaataacaactgctgccggtgcttctgcgtggaatgcgtggacctgctggtgggccccggcgccgcccaggccgctattaaggaagatccttggaactgctacatgtgcggccacaagggcacatacggcctgctgagacggagagaggactggcctagcagactgcagatgttcttcgccaataaccacgaccaggagttcgacccccctaaggtgtaccctcccgtccccgccgagaagagaaagcccatccgggtcctgagcctgttcgatggcatcgccaccggtctgctggtgctgaaggacctgggcatccaggtggataggtacattgcctccgaggtgtgcgaggactccatcaccgtgggaatggtgcgtcatcagggcaagatcatgtacgtgggcgacgtgcggagcgtgacacagaagcatatccaggagtggggccctttcgacctggtgatcggcggcagcccttgcaatgacctgagcatcgtgaacccagcccggaagggcctgtacgagggaaccggcagactgttcttcgagttttacagactgctgcacgacgcccggcctaaggaaggcgacgaccggcccttcttttggctgttcgagaatgtggtggccatgggagtcagcgacaagcgggatattagccggttcctggagagcaaccccgtgatgatcgatgccaaggaagtgagcgccgcccaccgggccagatacttctggggcaatctgcctggcatgaacagacccctggccagcaccgtgaacgacaagctggagctgcaggagtgcctggagcacggccggatcgccaagttcagcaaggtgagaaccatcaccacccgaagcaacagcatcaaacaaggcaaggaccagcactttcctgtgttcatgaacgagaaggaggacatcctgtggtgtaccgagatggagagagtgttcgggttcccagtccactacacagatgtcagcaacatgtctagactggccagacagagactgctgggaagaagctggtccgtccctgtgatcagacacctgttcgcccctctgaaggagtacttcgcctgcgtgagcagcggcaacagcaacgccaacagccggggccccagcttctctagcggcctggtgccactgtccctgagagggagccacatgggccccatggagatctacaaaaccgtgagcgcctggaagcggcagcctgtgcgcgtgctgagcctgtttcggaatatcgataaagtcctgaaaagcctgggattcctggagagcggctctggctccggcggtggcaccctgaagtacgtggaggatgtgacaaacgtggtcagacgggatgtggagaagtggggccccttcgatctggtgtacggcagcacccaacccctgggcagctcttgtgaccggtgccctggctggtacatgtttcagttccaccggatcctgcagtacgccctgccgagacaggagtcccagcggccattcttttggattttcatggacaacttgctgctgaccgaggatgaccaggaaactaccactcggttcctgcagaccgaagccgtgaccctgcaggacgtgagaggccgggactaccagaacgccatgcgggtgtggtccaacatccctggactgaaaagcaagcacgcacctctgacccctaaagaagaggagtacctgcaggcccaggtgcggagcagaagcaagctggacgcccctaaggtggatctgctggtgaagaattgcctcctgcccctgagagagtacttcaagtatttcagccagaatagtctgcccctgggcggcccaagcagcggcgcccctcctcccagcggcggcagcccagccggctccccaacctctaccgaggagggcacctctgagtccgccacccccgagagcggccctggcacctccaccgagcccagcgagggcagcgcacccggcagccctgccggcagccccacctccacagaggagggaaccagcaccgagcccagcgaaggcagcgccccaggcaccagcaccgagcctagtgagggcggctctggcggcggcagcgcccaggagattaaacggatcaacaagatcagaagaagacttgtgaaagacagcaacaccaagaaggccggcaagacaggccccatgaaaaccctgctggttagagtgatgacacccgatctgagagagcggctggaaaacctgagaaagaagcctgaaaatatcccccagcccatcagcaatacatctagagccaacctgaataagctgctgaccgattacaccgaaatgaagaaggcgatcctgcatgtgtactgggaagagttccagaaggaccctgtgggcctgatgagccgggtggcccagcctgccagcaagaagatcgatcagaacaagctgaaacctgagatggacgagaagggcaacctgaccaccgccggctttgcctgctctcagtgtggccagcccctgttcgtgtacaagctggagcaggtgtctgagaagggcaaggcttacaccaactacttcggacggtgcaatgtggccgagcacgaaaagctgatcctgctggcccagctgaagcccgagaaggatagcgacgaagccgtgacatatagcctgggaaagtttgggcagagggccctggatttctacagcattcatgtgaccaaggagtccacccaccccgtgaagcccctggcccagatcgccggaaacagatacgcctccggacctgtgggaaaggccctgagcgacgcatgtatgggcacaatcgcctccttcctgtctaagtaccaggacatcatcatcgaacaccagaaggtggtgaagggcaaccagaagagactggagagcctgcgggagctggccggcaaggaaaacctggaataccctagcgtgaccctgccacctcagcctcacaccaaggagggcgttgatgcctacaacgaagtgatcgcccgggtgcgaatgtgggtgaacctgaacctgtggcagaagctgaagctaagcagagatgatgccaagcctctgctgagactgaagggattcccttcctttcctctggtcgagagacaggccaacgaagtggactggtgggacatggtgtgtaacgtgaagaagctgatcaacgagaaaaaggaggatggcaaggtgttttggcagaatctggctggctacaagagacaggaagccctgagaccatacctgagcagcgaggaagatcggaagaagggaaagaaattcgctcggtaccagctgggcgacctgctgctgcacctggaaaagaagcacggcgaggactggggaaaggtgtacgacgaggcctgggagcggattgacaagaaagtggaaggcctgagcaagcacatcaagctggaagaggaacggagaagcgaggacgcccagagcaaggccgccctgaccgactggctgcgggctaaggccagcttcgtgatcgagggcctgaaggaggccgacaaggacgagttctgcagatgcgagctgaagctgcagaagtggtacggggacctgcggggaaagcccttcgccatcgaagccgagaacagcatcctggacatcagcggcttcagcaagcagtacaactgtgccttcatctggcagaaggacggcgtgaagaagctgaacctgtacctgatcatcaactacttcaagggcggcaagctgcggttcaagaagatcaaacctgaagccttcgaagccaacagattctacaccgtgatcaacaaaaagagcggcgagatcgtgcccatggaggtgaacttcaacttcgacgaccccaacctgatcatcctgcctctggcctttggcaagagacagggcagagaattcatctggaacgacctgctgtccctggaaaccggcagcctgaagctggccaacggaagagtgatcgagaagacactgtacaacagaagaacccggcaggatgagcctgccctgttcgtggccctgaccttcgagcggcgggaggtcctggactcctccaatatcaaaccaatgaacctgatcggcgtggcaagaggcgaaaacatccccgccgtgatcgccctgaccgaccccgagggctgcccactgagccggtttaaggatagcctgggaaacccaacccacatcctgagaatcggcgagagctataaggagaagcagcggaccatccaggccaagaaggaggtggagcagcggagagccggcggctacagccggaagtacgccagcaaagccaagaatctggcagacgatatggtgagaaacaccgctagagatctgctgtactacgccgtgacccaggatgccatgctgatcttcgccaacctgagccggggcttcggccggcagggcaagcggaccttcatggccgagagacagtacacacggatggaggactggctgaccgccaagctggcctacgagggcctgagcaagacctacctgtccaagacactggcccagtacacctccaagacatgcagcaactgtgggtttaccatcaccagcgccgactacgacagggtgctggagaagctgaagaagacagcaacaggctggatgaccacaattaacggcaaggagctgaaggtggagggccagattacctactacaacagatacaagagacagaacgtagtcaaggacctgtccgtcgagctggatagactgagcgaagaatctgtgaacaacgacatctcctcctggacaaagggcagaagcggagaagctctgagcctcctgaagaaaagattctcccatagacccgtgcaggagaagttcgtgtgcctgaactgcggcttcgagacacacgcagccgagcaagccgccctgaacatcgccagatcctggctgttcctgcggagccaggagtacaagaaataccagacaaacaagacaaccggcaacaccgataagagagccttcgtcgagacctggcagtccttttaccggaagaagcttaaggaggtgtggaaacctgccgtgcggtctggcggatctggcggaggctccacaagcatgatgcaggcccaggagagcctgaccctggaggacgtggccgtggacttcacctgggaggagtggcagttcctgagccccgcccagaaggacctgtacagggacgtgatgctggagaactacagcaacctggtggccgtgggctaccaggccaggaagcccgacgccctgagcaagctggagaggggcgaggagccctgcaccaccgaggacgagatctacgccaggatctgcagcgacagcaccagccccaagaaaaagagaaaagtctaagctgccttctgcggggcttgccttctggccatgcccttcttctctcccttgcacctgtacctcttggtctttgaataaagcctgagtaggaaggctagcaaaaaaaaaaaaaaaaaaaaaaaaaaaaaaaaaaaaaaaaaaaaaaaaaaaaaaaaaaaaaaaaaaaaaaaaaaaaaaaa

SEQ ID NO: 6640 - RNA, 5797 nt, synthetic construct
  source 1..5797: mol_type = other RNA
aggaaataagagagaaaagaagagtaagaagaaatataagagccaccatggcccctaagaagaagcgtaaagtgagccggatggaacgcctcgtctacgaggtgcggcagaagtgcagaaacatcgaggacatctgcatctcctgcggatctctgaacgtgaccctggagcacccactgttcatcggcggcatgtgccagaactgtaaaaactgttttctggagtgtgcctatcaatacgacgatgacggctaccagagctactgcaccatctgttgcggcggaagagaggtgctgatgtgtggaaataacaactgctgccggtgcttctgcgtggaatgcgtggacctgctggtgggccccggcgccgcccaggccgctattaaggaagatccttggaactgctacatgtgcggccacaagggcacatacggcctgctgagacggagagaggactggcctagcagactgcagatgttcttcgccaataaccacgaccaggagttcgacccccctaaggtgtaccctcccgtccccgccgagaagagaaagcccatccgggtcctgagcctgttcgatggcatcgccaccggtctgctggtgctgaaggacctgggcatccaggtggataggtacattgcctccgaggtgtgcgaggactccatcaccgtgggaatggtgcgtcatcagggcaagatcatgtacgtgggcgacgtgcggagcgtgacacagaagcatatccaggagtggggccctttcgacctggtgatcggcggcagcccttgcaatgacctgagcatcgtgaacccagcccggaagggcctgtacgagggaaccggcagactgttcttcgagttttacagactgctgcacgacgcccggcctaaggaaggcgacgaccggcccttcttttggctgttcgagaatgtggtggccatgggagtcagcgacaagcgggatattagccggttcctggagagcaaccccgtgatgatcgatgccaaggaagtgagcgccgcccaccgggccagatacttctggggcaatctgcctggcatgaacagacccctggccagcaccgtgaacgacaagctggagctgcaggagtgcctggagcacggccggatcgccaagttcagcaaggtgagaaccatcaccacccgaagcaacagcatcaaacaaggcaaggaccagcactttcctgtgttcatgaacgagaaggaggacatcctgtggtgtaccgagatggagagagtgttcgggttcccagtccactacacagatgtcagcaacatgtctagactggccagacagagactgctgggaagaagctggtccgtccctgtgatcagacacctgttcgcccctctgaaggagtacttcgcctgcgtgagcagcggcaacagcaacgccaacagccggggccccagcttctctagcggcctggtgccactgtccctgagagggagccacatgggccccatggagatctacaaaaccgtgagcgcctggaagcggcagcctgtgcgcgtgctgagcctgtttcggaatatcgataaagtcctgaaaagcctgggattcctggagagcggctctggctccggcggtggcaccctgaagtacgtggaggatgtgacaaacgtggtcagacgggatgtggagaagtggggccccttcgatctggtgtacggcagcacccaacccctgggcagctcttgtgaccggtgccctggctggtacatgtttcagttccaccggatcctgcagtacgccctgccgagacaggagtcccagcggccattcttttggattttcatggacaacttgctgctgaccgaggatgaccaggaaactaccactcggttcctgcagaccgaagccgtgaccctgcaggacgtgagaggccgggactaccagaacgccatgcgggtgtggtccaacatccctggactgaaaagcaagcacgcacctctgacccctaaagaagaggagtacctgcaggcccaggtgcggagcagaagcaagctggacgcccctaaggtggatctgctggtgaagaattgcctcctgcccctgagagagtacttcaagtatttcagccagaatagtctgcccctgggcggcccaagcagcggcgcccctcctcccagcggcggcagcccagccggctccccaacctctaccgaggagggcacctctgagtccgccacccccgagagcggccctggcacctccaccgagcccagcgagggcagcgcacccggcagccctgccggcagccccacctccacagaggagggaaccagcaccgagcccagcgaaggcagcgccccaggcaccagcaccgagcctagtgagggcggctctggcggcggcagcgcccaggagattaaacggatcaacaagatcagaagaagacttgtgaaagacagcaacaccaagaaggccggcaagacaggccccatgaaaaccctgctggttagagtgatgacacccgatctgagagagcggctggaaaacctgagaaagaagcctgaaaatatcccccagcccatcagcaatacatctagagccaacctgaataagctgctgaccgattacaccgaaatgaagaaggcgatcctgcatgtgtactgggaagagttccagaaggaccctgtgggcctgatgagccgggtggcccagcctgccagcaagaagatcgatcagaacaagctgaaacctgagatggacgagaagggcaacctgaccaccgccggctttgcctgctctcagtgtggccagcccctgttcgtgtacaagctggagcaggtgtctgagaagggcaaggcttacaccaactacttcggacggtgcaatgtggccgagcacgaaaagctgatcctgctggcccagctgaagcccgagaaggatagcgacgaagccgtgacatatagcctgggaaagtttgggcagagggccctggatttctacagcattcatgtgaccaaggagtccacccaccccgtgaagcccctggcccagatcgccggaaacagatacgcctccggacctgtgggaaaggccctgagcgacgcatgtatgggcacaatcgcctccttcctgtctaagtaccaggacatcatcatcgaacaccagaaggtggtgaagggcaaccagaagagactggagagcctgcgggagctggccggcaaggaaaacctggaataccctagcgtgaccctgccacctcagcctcacaccaaggagggcgttgatgcctacaacgaagtgatcgcccgggtgcgaatgtgggtgaacctgaacctgtggcagaagctgaagctaagcagagatgatgccaagcctctgctgagactgaagggattcccttcctttcctctggtcgagagacaggccaacgaagtggactggtgggacatggtgtgtaacgtgaagaagctgatcaacgagaaaaaggaggatggcaaggtgttttggcagaatctggctggctacaagagacaggaagccctgagaccatacctgagcagcgaggaagatcggaagaagggaaagaaattcgctcggtaccagctgggcgacctgctgctgcacctggaaaagaagcacggcgaggactggggaaaggtgtacgacgaggcctgggagcggattgacaagaaagtggaaggcctgagcaagcacatcaagctggaagaggaacggagaagcgaggacgcccagagcaaggccgccctgaccgactggctgcgggctaaggccagcttcgtgatcgagggcctgaaggaggccgacaaggacgagttctgcagatgcgagctgaagctgcagaagtggtacggggacctgcggggaaagcccttcgccatcgaagccgagaacagcatcctggacatcagcggcttcagcaagcagtacaactgtgccttcatctggcagaaggacggcgtgaagaagctgaacctgtacctgatcatcaactacttcaagggcggcaagctgcggttcaagaagatcaaacctgaagccttcgaagccaacagattctacaccgtgatcaacaaaaagagcggcgagatcgtgcccatggaggtgaacttcaacttcgacgaccccaacctgatcatcctgcctctggcctttggcaagagacagggcagagaattcatctggaacgacctgctgtccctggaaaccggcagcctgaagctggccaacggaagagtgatcgagaagacactgtacaacagaagaacccggcaggatgagcctgccctgttcgtggccctgaccttcgagcggcgggaggtcctggactcctccaatatcaaaccaatgaacctgatcggcgtggcaagaggcgaaaacatccccgccgtgatcgccctgaccgaccccgagggctgcccactgagccggtttaaggatagcctgggaaacccaacccacatcctgagaatcggcgagagctataaggagaagcagcggaccatccaggccaagaaggaggtggagcagcggagagccggcggctacagccggaagtacgccagcaaagccaagaatctggcagacgatatggtgagaaacaccgctagagatctgctgtactacgccgtgacccaggatgccatgctgatcttcgccaacctgagccggggcttcggccggcagggcaagcggaccttcatggccgagagacagtacacacggatggaggactggctgaccgccaagctggcctacgagggcctgagcaagacctacctgtccaagacactggcccagtacacctccaagacatgcagcaactgtgggtttaccatcaccagcgccgactacgacagggtgctggagaagctgaagaagacagcaacaggctggatgaccacaattaacggcaaggagctgaaggtggagggccagattacctactacaacagatacaagagacagaacgtagtcaaggacctgtccgtcgagctggatagactgagcgaagaatctgtgaacaacgacatctcctcctggacaaagggcagaagcggagaagctctgagcctcctgaagaaaagattctcccatagacccgtgcaggagaagttcgtgtgcctgaactgcggcttcgagacacacgcagccgagcaagccgccctgaacatcgccagatcctggctgttcctgcggagccaggagtacaagaaataccagacaaacaagacaaccggcaacaccgataagagagccttcgtcgagacctggcagtccttttaccggaagaagcttaaggaggtgtggaaacctgccgtgcggtctggcggatctggcggaggctccacaagccaggagcccgtgaccttcgaggacgtggccgtgtacttcacccagaaccagtgggccaagctggaccccacccagagggccctgtacagggaggtgatgctggagaactacgccaacgtggccagcctggtggccttccccttccccaagcccgacctggtgagccagctggagaggggcgaggtgccctggggccccgacccctgggaggccgaggtgctgaggggcatctgccccggcggcaccagccccaagaaaaagagaaaagtctaagctgccttctgcggggcttgccttctggccatgcccttcttctctcccttgcacctgtacctcttggtctttgaataaagcctgagtaggaaggctagcaaaaaaaaaaaaaaaaaaaaaaaaaaaaaaaaaaaaaaaaaaaaaaaaaaaaaaaaaaaaaaaaaaaaaaaaaaaaaaaa

SEQ ID NO: 6641 - RNA, 5797 nt, synthetic construct
  source 1..5797: mol_type = other RNA
aggaaataagagagaaaagaagagtaagaagaaatataagagccaccatggcccctaagaagaagcgtaaagtgagccggatggaacgcctcgtctacgaggtgcggcagaagtgcagaaacatcgaggacatctgcatctcctgcggatctctgaacgtgaccctggagcacccactgttcatcggcggcatgtgccagaactgtaaaaactgttttctggagtgtgcctatcaatacgacgatgacggctaccagagctactgcaccatctgttgcggcggaagagaggtgctgatgtgtggaaataacaactgctgccggtgcttctgcgtggaatgcgtggacctgctggtgggccccggcgccgcccaggccgctattaaggaagatccttggaactgctacatgtgcggccacaagggcacatacggcctgctgagacggagagaggactggcctagcagactgcagatgttcttcgccaataaccacgaccaggagttcgacccccctaaggtgtaccctcccgtccccgccgagaagagaaagcccatccgggtcctgagcctgttcgatggcatcgccaccggtctgctggtgctgaaggacctgggcatccaggtggataggtacattgcctccgaggtgtgcgaggactccatcaccgtgggaatggtgcgtcatcagggcaagatcatgtacgtgggcgacgtgcggagcgtgacacagaagcatatccaggagtggggccctttcgacctggtgatcggcggcagcccttgcaatgacctgagcatcgtgaacccagcccggaagggcctgtacgagggaaccggcagactgttcttcgagttttacagactgctgcacgacgcccggcctaaggaaggcgacgaccggcccttcttttggctgttcgagaatgtggtggccatgggagtcagcgacaagcgggatattagccggttcctggagagcaaccccgtgatgatcgatgccaaggaagtgagcgccgcccaccgggccagatacttctggggcaatctgcctggcatgaacagacccctggccagcaccgtgaacgacaagctggagctgcaggagtgcctggagcacggccggatcgccaagttcagcaaggtgagaaccatcaccacccgaagcaacagcatcaaacaaggcaaggaccagcactttcctgtgttcatgaacgagaaggaggacatcctgtggtgtaccgagatggagagagtgttcgggttcccagtccactacacagatgtcagcaacatgtctagactggccagacagagactgctgggaagaagctggtccgtccctgtgatcagacacctgttcgcccctctgaaggagtacttcgcctgcgtgagcagcggcaacagcaacgccaacagccggggccccagcttctctagcggcctggtgccactgtccctgagagggagccacatgggccccatggagatctacaaaaccgtgagcgcctggaagcggcagcctgtgcgcgtgctgagcctgtttcggaatatcgataaagtcctgaaaagcctgggattcctggagagcggctctggctccggcggtggcaccctgaagtacgtggaggatgtgacaaacgtggtcagacgggatgtggagaagtggggccccttcgatctggtgtacggcagcacccaacccctgggcagctcttgtgaccggtgccctggctggtacatgtttcagttccaccggatcctgcagtacgccctgccgagacaggagtcccagcggccattcttttggattttcatggacaacttgctgctgaccgaggatgaccaggaaactaccactcggttcctgcagaccgaagccgtgaccctgcaggacgtgagaggccgggactaccagaacgccatgcgggtgtggtccaacatccctggactgaaaagcaagcacgcacctctgacccctaaagaagaggagtacctgcaggcccaggtgcggagcagaagcaagctggacgcccctaaggtggatctgctggtgaagaattgcctcctgcccctgagagagtacttcaagtatttcagccagaatagtctgcccctgggcggcccaagcagcggcgcccctcctcccagcggcggcagcccagccggctccccaacctctaccgaggagggcacctctgagtccgccacccccgagagcggccctggcacctccaccgagcccagcgagggcagcgcacccggcagccctgccggcagccccacctccacagaggagggaaccagcaccgagcccagcgaaggcagcgccccaggcaccagcaccgagcctagtgagggcggctctggcggcggcagcgcccaggagattaaacggatcaacaagatcagaagaagacttgtgaaagacagcaacaccaagaaggccggcaagacaggccccatgaaaaccctgctggttagagtgatgacacccgatctgagagagcggctggaaaacctgagaaagaagcctgaaaatatcccccagcccatcagcaatacatctagagccaacctgaataagctgctgaccgattacaccgaaatgaagaaggcgatcctgcatgtgtactgggaagagttccagaaggaccctgtgggcctgatgagccgggtggcccagcctgccagcaagaagatcgatcagaacaagctgaaacctgagatggacgagaagggcaacctgaccaccgccggctttgcctgctctcagtgtggccagcccctgttcgtgtacaagctggagcaggtgtctgagaagggcaaggcttacaccaactacttcggacggtgcaatgtggccgagcacgaaaagctgatcctgctggcccagctgaagcccgagaaggatagcgacgaagccgtgacatatagcctgggaaagtttgggcagagggccctggatttctacagcattcatgtgaccaaggagtccacccaccccgtgaagcccctggcccagatcgccggaaacagatacgcctccggacctgtgggaaaggccctgagcgacgcatgtatgggcacaatcgcctccttcctgtctaagtaccaggacatcatcatcgaacaccagaaggtggtgaagggcaaccagaagagactggagagcctgcgggagctggccggcaaggaaaacctggaataccctagcgtgaccctgccacctcagcctcacaccaaggagggcgttgatgcctacaacgaagtgatcgcccgggtgcgaatgtgggtgaacctgaacctgtggcagaagctgaagctaagcagagatgatgccaagcctctgctgagactgaagggattcccttcctttcctctggtcgagagacaggccaacgaagtggactggtgggacatggtgtgtaacgtgaagaagctgatcaacgagaaaaaggaggatggcaaggtgttttggcagaatctggctggctacaagagacaggaagccctgagaccatacctgagcagcgaggaagatcggaagaagggaaagaaattcgctcggtaccagctgggcgacctgctgctgcacctggaaaagaagcacggcgaggactggggaaaggtgtacgacgaggcctgggagcggattgacaagaaagtggaaggcctgagcaagcacatcaagctggaagaggaacggagaagcgaggacgcccagagcaaggccgccctgaccgactggctgcgggctaaggccagcttcgtgatcgagggcctgaaggaggccgacaaggacgagttctgcagatgcgagctgaagctgcagaagtggtacggggacctgcggggaaagcccttcgccatcgaagccgagaacagcatcctggacatcagcggcttcagcaagcagtacaactgtgccttcatctggcagaaggacggcgtgaagaagctgaacctgtacctgatcatcaactacttcaagggcggcaagctgcggttcaagaagatcaaacctgaagccttcgaagccaacagattctacaccgtgatcaacaaaaagagcggcgagatcgtgcccatggaggtgaacttcaacttcgacgaccccaacctgatcatcctgcctctggcctttggcaagagacagggcagagaattcatctggaacgacctgctgtccctggaaaccggcagcctgaagctggccaacggaagagtgatcgagaagacactgtacaacagaagaacccggcaggatgagcctgccctgttcgtggccctgaccttcgagcggcgggaggtcctggactcctccaatatcaaaccaatgaacctgatcggcgtggcaagaggcgaaaacatccccgccgtgatcgccctgaccgaccccgagggctgcccactgagccggtttaaggatagcctgggaaacccaacccacatcctgagaatcggcgagagctataaggagaagcagcggaccatccaggccaagaaggaggtggagcagcggagagccggcggctacagccggaagtacgccagcaaagccaagaatctggcagacgatatggtgagaaacaccgctagagatctgctgtactacgccgtgacccaggatgccatgctgatcttcgccaacctgagccggggcttcggccggcagggcaagcggaccttcatggccgagagacagtacacacggatggaggactggctgaccgccaagctggcctacgagggcctgagcaagacctacctgtccaagacactggcccagtacacctccaagacatgcagcaactgtgggtttaccatcaccagcgccgactacgacagggtgctggagaagctgaagaagacagcaacaggctggatgaccacaattaacggcaaggagctgaaggtggagggccagattacctactacaacagatacaagagacagaacgtagtcaaggacctgtccgtcgagctggatagactgagcgaagaatctgtgaacaacgacatctcctcctggacaaagggcagaagcggagaagctctgagcctcctgaagaaaagattctcccatagacccgtgcaggagaagttcgtgtgcctgaactgcggcttcgagacacacgcagccgagcaagccgccctgaacatcgccagatcctggctgttcctgcggagccaggagtacaagaaataccagacaaacaagacaaccggcaacaccgataagagagccttcgtcgagacctggcagtccttttaccggaagaagcttaaggaggtgtggaaacctgccgtgcggtctggcggatctggcggaggctccacaagcgagcccggcaccgtgagcttcggcgacgtggccgtgtacttcagcagggaggagtggggctgcctgaggcccgcccagagggccctgtacagggacgtgatgagggagacctacagccacctgggcgccctgggcgtgggcggcagcaagcccgccctgatcagctgggtggaggaggaggccgagctgtggggccccgccgcccaggaccccgaggtggccaagaggcccaccgaggccgacaccagccccaagaaaaagagaaaagtctaagctgccttctgcggggcttgccttctggccatgcccttcttctctcccttgcacctgtacctcttggtctttgaataaagcctgagtaggaaggctagcaaaaaaaaaaaaaaaaaaaaaaaaaaaaaaaaaaaaaaaaaaaaaaaaaaaaaaaaaaaaaaaaaaaaaaaaaaaaaaaa

SEQ ID NO: 6642 - RNA, 5797 nt, synthetic construct
  source 1..5797: mol_type = other RNA
aggaaataagagagaaaagaagagtaagaagaaatataagagccaccatggcccctaagaagaagcgtaaagtgagccggatggaacgcctcgtctacgaggtgcggcagaagtgcagaaacatcgaggacatctgcatctcctgcggatctctgaacgtgaccctggagcacccactgttcatcggcggcatgtgccagaactgtaaaaactgttttctggagtgtgcctatcaatacgacgatgacggctaccagagctactgcaccatctgttgcggcggaagagaggtgctgatgtgtggaaataacaactgctgccggtgcttctgcgtggaatgcgtggacctgctggtgggccccggcgccgcccaggccgctattaaggaagatccttggaactgctacatgtgcggccacaagggcacatacggcctgctgagacggagagaggactggcctagcagactgcagatgttcttcgccaataaccacgaccaggagttcgacccccctaaggtgtaccctcccgtccccgccgagaagagaaagcccatccgggtcctgagcctgttcgatggcatcgccaccggtctgctggtgctgaaggacctgggcatccaggtggataggtacattgcctccgaggtgtgcgaggactccatcaccgtgggaatggtgcgtcatcagggcaagatcatgtacgtgggcgacgtgcggagcgtgacacagaagcatatccaggagtggggccctttcgacctggtgatcggcggcagcccttgcaatgacctgagcatcgtgaacccagcccggaagggcctgtacgagggaaccggcagactgttcttcgagttttacagactgctgcacgacgcccggcctaaggaaggcgacgaccggcccttcttttggctgttcgagaatgtggtggccatgggagtcagcgacaagcgggatattagccggttcctggagagcaaccccgtgatgatcgatgccaaggaagtgagcgccgcccaccgggccagatacttctggggcaatctgcctggcatgaacagacccctggccagcaccgtgaacgacaagctggagctgcaggagtgcctggagcacggccggatcgccaagttcagcaaggtgagaaccatcaccacccgaagcaacagcatcaaacaaggcaaggaccagcactttcctgtgttcatgaacgagaaggaggacatcctgtggtgtaccgagatggagagagtgttcgggttcccagtccactacacagatgtcagcaacatgtctagactggccagacagagactgctgggaagaagctggtccgtccctgtgatcagacacctgttcgcccctctgaaggagtacttcgcctgcgtgagcagcggcaacagcaacgccaacagccggggccccagcttctctagcggcctggtgccactgtccctgagagggagccacatgggccccatggagatctacaaaaccgtgagcgcctggaagcggcagcctgtgcgcgtgctgagcctgtttcggaatatcgataaagtcctgaaaagcctgggattcctggagagcggctctggctccggcggtggcaccctgaagtacgtggaggatgtgacaaacgtggtcagacgggatgtggagaagtggggccccttcgatctggtgtacggcagcacccaacccctgggcagctcttgtgaccggtgccctggctggtacatgtttcagttccaccggatcctgcagtacgccctgccgagacaggagtcccagcggccattcttttggattttcatggacaacttgctgctgaccgaggatgaccaggaaactaccactcggttcctgcagaccgaagccgtgaccctgcaggacgtgagaggccgggactaccagaacgccatgcgggtgtggtccaacatccctggactgaaaagcaagcacgcacctctgacccctaaagaagaggagtacctgcaggcccaggtgcggagcagaagcaagctggacgcccctaaggtggatctgctggtgaagaattgcctcctgcccctgagagagtacttcaagtatttcagccagaatagtctgcccctgggcggcccaagcagcggcgcccctcctcccagcggcggcagcccagccggctccccaacctctaccgaggagggcacctctgagtccgccacccccgagagcggccctggcacctccaccgagcccagcgagggcagcgcacccggcagccctgccggcagccccacctccacagaggagggaaccagcaccgagcccagcgaaggcagcgccccaggcaccagcaccgagcctagtgagggcggctctggcggcggcagcgcccaggagattaaacggatcaacaagatcagaagaagacttgtgaaagacagcaacaccaagaaggccggcaagacaggccccatgaaaaccctgctggttagagtgatgacacccgatctgagagagcggctggaaaacctgagaaagaagcctgaaaatatcccccagcccatcagcaatacatctagagccaacctgaataagctgctgaccgattacaccgaaatgaagaaggcgatcctgcatgtgtactgggaagagttccagaaggaccctgtgggcctgatgagccgggtggcccagcctgccagcaagaagatcgatcagaacaagctgaaacctgagatggacgagaagggcaacctgaccaccgccggctttgcctgctctcagtgtggccagcccctgttcgtgtacaagctggagcaggtgtctgagaagggcaaggcttacaccaactacttcggacggtgcaatgtggccgagcacgaaaagctgatcctgctggcccagctgaagcccgagaaggatagcgacgaagccgtgacatatagcctgggaaagtttgggcagagggccctggatttctacagcattcatgtgaccaaggagtccacccaccccgtgaagcccctggcccagatcgccggaaacagatacgcctccggacctgtgggaaaggccctgagcgacgcatgtatgggcacaatcgcctccttcctgtctaagtaccaggacatcatcatcgaacaccagaaggtggtgaagggcaaccagaagagactggagagcctgcgggagctggccggcaaggaaaacctggaataccctagcgtgaccctgccacctcagcctcacaccaaggagggcgttgatgcctacaacgaagtgatcgcccgggtgcgaatgtgggtgaacctgaacctgtggcagaagctgaagctaagcagagatgatgccaagcctctgctgagactgaagggattcccttcctttcctctggtcgagagacaggccaacgaagtggactggtgggacatggtgtgtaacgtgaagaagctgatcaacgagaaaaaggaggatggcaaggtgttttggcagaatctggctggctacaagagacaggaagccctgagaccatacctgagcagcgaggaagatcggaagaagggaaagaaattcgctcggtaccagctgggcgacctgctgctgcacctggaaaagaagcacggcgaggactggggaaaggtgtacgacgaggcctgggagcggattgacaagaaagtggaaggcctgagcaagcacatcaagctggaagaggaacggagaagcgaggacgcccagagcaaggccgccctgaccgactggctgcgggctaaggccagcttcgtgatcgagggcctgaaggaggccgacaaggacgagttctgcagatgcgagctgaagctgcagaagtggtacggggacctgcggggaaagcccttcgccatcgaagccgagaacagcatcctggacatcagcggcttcagcaagcagtacaactgtgccttcatctggcagaaggacggcgtgaagaagctgaacctgtacctgatcatcaactacttcaagggcggcaagctgcggttcaagaagatcaaacctgaagccttcgaagccaacagattctacaccgtgatcaacaaaaagagcggcgagatcgtgcccatggaggtgaacttcaacttcgacgaccccaacctgatcatcctgcctctggcctttggcaagagacagggcagagaattcatctggaacgacctgctgtccctggaaaccggcagcctgaagctggccaacggaagagtgatcgagaagacactgtacaacagaagaacccggcaggatgagcctgccctgttcgtggccctgaccttcgagcggcgggaggtcctggactcctccaatatcaaaccaatgaacctgatcggcgtggcaagaggcgaaaacatccccgccgtgatcgccctgaccgaccccgagggctgcccactgagccggtttaaggatagcctgggaaacccaacccacatcctgagaatcggcgagagctataaggagaagcagcggaccatccaggccaagaaggaggtggagcagcggagagccggcggctacagccggaagtacgccagcaaagccaagaatctggcagacgatatggtgagaaacaccgctagagatctgctgtactacgccgtgacccaggatgccatgctgatcttcgccaacctgagccggggcttcggccggcagggcaagcggaccttcatggccgagagacagtacacacggatggaggactggctgaccgccaagctggcctacgagggcctgagcaagacctacctgtccaagacactggcccagtacacctccaagacatgcagcaactgtgggtttaccatcaccagcgccgactacgacagggtgctggagaagctgaagaagacagcaacaggctggatgaccacaattaacggcaaggagctgaaggtggagggccagattacctactacaacagatacaagagacagaacgtagtcaaggacctgtccgtcgagctggatagactgagcgaagaatctgtgaacaacgacatctcctcctggacaaagggcagaagcggagaagctctgagcctcctgaagaaaagattctcccatagacccgtgcaggagaagttcgtgtgcctgaactgcggcttcgagacacacgcagccgagcaagccgccctgaacatcgccagatcctggctgttcctgcggagccaggagtacaagaaataccagacaaacaagacaaccggcaacaccgataagagagccttcgtcgagacctggcagtccttttaccggaagaagcttaaggaggtgtggaaacctgccgtgcggtctggcggatctggcggaggctccacaagcaagcccggcgccgtgagcttcgccgacgtggccgtgtacttcagccccgaggagtggggctgcctgaggcccgcccagagggccctgtacagggaggtgatgagggagacctacggcctgctgggcgccctgggcgtgggcggcgccaagcccgccctgatcagctgggtggaggaggaggccgagctgtggggccccggcgcccaggaccccgaggtggccatgtgccagacccaggccgacaccagccccaagaaaaagagaaaagtctaagctgccttctgcggggcttgccttctggccatgcccttcttctctcccttgcacctgtacctcttggtctttgaataaagcctgagtaggaaggctagcaaaaaaaaaaaaaaaaaaaaaaaaaaaaaaaaaaaaaaaaaaaaaaaaaaaaaaaaaaaaaaaaaaaaaaaaaaaaaaaa

SEQ ID NO: 6643 - RNA, 5797 nt, synthetic construct
  source 1..5797: mol_type = other RNA
aggaaataagagagaaaagaagagtaagaagaaatataagagccaccatggcccctaagaagaagcgtaaagtgagccggatggaacgcctcgtctacgaggtgcggcagaagtgcagaaacatcgaggacatctgcatctcctgcggatctctgaacgtgaccctggagcacccactgttcatcggcggcatgtgccagaactgtaaaaactgttttctggagtgtgcctatcaatacgacgatgacggctaccagagctactgcaccatctgttgcggcggaagagaggtgctgatgtgtggaaataacaactgctgccggtgcttctgcgtggaatgcgtggacctgctggtgggccccggcgccgcccaggccgctattaaggaagatccttggaactgctacatgtgcggccacaagggcacatacggcctgctgagacggagagaggactggcctagcagactgcagatgttcttcgccaataaccacgaccaggagttcgacccccctaaggtgtaccctcccgtccccgccgagaagagaaagcccatccgggtcctgagcctgttcgatggcatcgccaccggtctgctggtgctgaaggacctgggcatccaggtggataggtacattgcctccgaggtgtgcgaggactccatcaccgtgggaatggtgcgtcatcagggcaagatcatgtacgtgggcgacgtgcggagcgtgacacagaagcatatccaggagtggggccctttcgacctggtgatcggcggcagcccttgcaatgacctgagcatcgtgaacccagcccggaagggcctgtacgagggaaccggcagactgttcttcgagttttacagactgctgcacgacgcccggcctaaggaaggcgacgaccggcccttcttttggctgttcgagaatgtggtggccatgggagtcagcgacaagcgggatattagccggttcctggagagcaaccccgtgatgatcgatgccaaggaagtgagcgccgcccaccgggccagatacttctggggcaatctgcctggcatgaacagacccctggccagcaccgtgaacgacaagctggagctgcaggagtgcctggagcacggccggatcgccaagttcagcaaggtgagaaccatcaccacccgaagcaacagcatcaaacaaggcaaggaccagcactttcctgtgttcatgaacgagaaggaggacatcctgtggtgtaccgagatggagagagtgttcgggttcccagtccactacacagatgtcagcaacatgtctagactggccagacagagactgctgggaagaagctggtccgtccctgtgatcagacacctgttcgcccctctgaaggagtacttcgcctgcgtgagcagcggcaacagcaacgccaacagccggggccccagcttctctagcggcctggtgccactgtccctgagagggagccacatgggccccatggagatctacaaaaccgtgagcgcctggaagcggcagcctgtgcgcgtgctgagcctgtttcggaatatcgataaagtcctgaaaagcctgggattcctggagagcggctctggctccggcggtggcaccctgaagtacgtggaggatgtgacaaacgtggtcagacgggatgtggagaagtggggccccttcgatctggtgtacggcagcacccaacccctgggcagctcttgtgaccggtgccctggctggtacatgtttcagttccaccggatcctgcagtacgccctgccgagacaggagtcccagcggccattcttttggattttcatggacaacttgctgctgaccgaggatgaccaggaaactaccactcggttcctgcagaccgaagccgtgaccctgcaggacgtgagaggccgggactaccagaacgccatgcgggtgtggtccaacatccctggactgaaaagcaagcacgcacctctgacccctaaagaagaggagtacctgcaggcccaggtgcggagcagaagcaagctggacgcccctaaggtggatctgctggtgaagaattgcctcctgcccctgagagagtacttcaagtatttcagccagaatagtctgcccctgggcggcccaagcagcggcgcccctcctcccagcggcggcagcccagccggctccccaacctctaccgaggagggcacctctgagtccgccacccccgagagcggccctggcacctccaccgagcccagcgagggcagcgcacccggcagccctgccggcagccccacctccacagaggagggaaccagcaccgagcccagcgaaggcagcgccccaggcaccagcaccgagcctagtgagggcggctctggcggcggcagcgcccaggagattaaacggatcaacaagatcagaagaagacttgtgaaagacagcaacaccaagaaggccggcaagacaggccccatgaaaaccctgctggttagagtgatgacacccgatctgagagagcggctggaaaacctgagaaagaagcctgaaaatatcccccagcccatcagcaatacatctagagccaacctgaataagctgctgaccgattacaccgaaatgaagaaggcgatcctgcatgtgtactgggaagagttccagaaggaccctgtgggcctgatgagccgggtggcccagcctgccagcaagaagatcgatcagaacaagctgaaacctgagatggacgagaagggcaacctgaccaccgccggctttgcctgctctcagtgtggccagcccctgttcgtgtacaagctggagcaggtgtctgagaagggcaaggcttacaccaactacttcggacggtgcaatgtggccgagcacgaaaagctgatcctgctggcccagctgaagcccgagaaggatagcgacgaagccgtgacatatagcctgggaaagtttgggcagagggccctggatttctacagcattcatgtgaccaaggagtccacccaccccgtgaagcccctggcccagatcgccggaaacagatacgcctccggacctgtgggaaaggccctgagcgacgcatgtatgggcacaatcgcctccttcctgtctaagtaccaggacatcatcatcgaacaccagaaggtggtgaagggcaaccagaagagactggagagcctgcgggagctggccggcaaggaaaacctggaataccctagcgtgaccctgccacctcagcctcacaccaaggagggcgttgatgcctacaacgaagtgatcgcccgggtgcgaatgtgggtgaacctgaacctgtggcagaagctgaagctaagcagagatgatgccaagcctctgctgagactgaagggattcccttcctttcctctggtcgagagacaggccaacgaagtggactggtgggacatggtgtgtaacgtgaagaagctgatcaacgagaaaaaggaggatggcaaggtgttttggcagaatctggctggctacaagagacaggaagccctgagaccatacctgagcagcgaggaagatcggaagaagggaaagaaattcgctcggtaccagctgggcgacctgctgctgcacctggaaaagaagcacggcgaggactggggaaaggtgtacgacgaggcctgggagcggattgacaagaaagtggaaggcctgagcaagcacatcaagctggaagaggaacggagaagcgaggacgcccagagcaaggccgccctgaccgactggctgcgggctaaggccagcttcgtgatcgagggcctgaaggaggccgacaaggacgagttctgcagatgcgagctgaagctgcagaagtggtacggggacctgcggggaaagcccttcgccatcgaagccgagaacagcatcctggacatcagcggcttcagcaagcagtacaactgtgccttcatctggcagaaggacggcgtgaagaagctgaacctgtacctgatcatcaactacttcaagggcggcaagctgcggttcaagaagatcaaacctgaagccttcgaagccaacagattctacaccgtgatcaacaaaaagagcggcgagatcgtgcccatggaggtgaacttcaacttcgacgaccccaacctgatcatcctgcctctggcctttggcaagagacagggcagagaattcatctggaacgacctgctgtccctggaaaccggcagcctgaagctggccaacggaagagtgatcgagaagacactgtacaacagaagaacccggcaggatgagcctgccctgttcgtggccctgaccttcgagcggcgggaggtcctggactcctccaatatcaaaccaatgaacctgatcggcgtggcaagaggcgaaaacatccccgccgtgatcgccctgaccgaccccgagggctgcccactgagccggtttaaggatagcctgggaaacccaacccacatcctgagaatcggcgagagctataaggagaagcagcggaccatccaggccaagaaggaggtggagcagcggagagccggcggctacagccggaagtacgccagcaaagccaagaatctggcagacgatatggtgagaaacaccgctagagatctgctgtactacgccgtgacccaggatgccatgctgatcttcgccaacctgagccggggcttcggccggcagggcaagcggaccttcatggccgagagacagtacacacggatggaggactggctgaccgccaagctggcctacgagggcctgagcaagacctacctgtccaagacactggcccagtacacctccaagacatgcagcaactgtgggtttaccatcaccagcgccgactacgacagggtgctggagaagctgaagaagacagcaacaggctggatgaccacaattaacggcaaggagctgaaggtggagggccagattacctactacaacagatacaagagacagaacgtagtcaaggacctgtccgtcgagctggatagactgagcgaagaatctgtgaacaacgacatctcctcctggacaaagggcagaagcggagaagctctgagcctcctgaagaaaagattctcccatagacccgtgcaggagaagttcgtgtgcctgaactgcggcttcgagacacacgcagccgagcaagccgccctgaacatcgccagatcctggctgttcctgcggagccaggagtacaagaaataccagacaaacaagacaaccggcaacaccgataagagagccttcgtcgagacctggcagtccttttaccggaagaagcttaaggaggtgtggaaacctgccgtgcggtctggcggatctggcggaggctccacaagcgcccaggaggtggtgaccttcaaggacgtggccgtggacttcaccagggaggagtggtgcctgctgagccccccccagaaggagctgtacaaggaggtgatgctggagaacgcccagaacctgctgagcgtgggcctgcccggcccccccgaggacgtgatcagctacctgaagcagaggaaggacccctggatgctggagcaggagggcctgaggagctgctgccccgagggcgagatcaggaccagccccaagaaaaagagaaaagtctaagctgccttctgcggggcttgccttctggccatgcccttcttctctcccttgcacctgtacctcttggtctttgaataaagcctgagtaggaaggctagcaaaaaaaaaaaaaaaaaaaaaaaaaaaaaaaaaaaaaaaaaaaaaaaaaaaaaaaaaaaaaaaaaaaaaaaaaaaaaaaa

SEQ ID NO: 6644 - RNA, 5797 nt, synthetic construct
  source 1..5797: mol_type = other RNA
aggaaataagagagaaaagaagagtaagaagaaatataagagccaccatggcccctaagaagaagcgtaaagtgagccggatggaacgcctcgtctacgaggtgcggcagaagtgcagaaacatcgaggacatctgcatctcctgcggatctctgaacgtgaccctggagcacccactgttcatcggcggcatgtgccagaactgtaaaaactgttttctggagtgtgcctatcaatacgacgatgacggctaccagagctactgcaccatctgttgcggcggaagagaggtgctgatgtgtggaaataacaactgctgccggtgcttctgcgtggaatgcgtggacctgctggtgggccccggcgccgcccaggccgctattaaggaagatccttggaactgctacatgtgcggccacaagggcacatacggcctgctgagacggagagaggactggcctagcagactgcagatgttcttcgccaataaccacgaccaggagttcgacccccctaaggtgtaccctcccgtccccgccgagaagagaaagcccatccgggtcctgagcctgttcgatggcatcgccaccggtctgctggtgctgaaggacctgggcatccaggtggataggtacattgcctccgaggtgtgcgaggactccatcaccgtgggaatggtgcgtcatcagggcaagatcatgtacgtgggcgacgtgcggagcgtgacacagaagcatatccaggagtggggccctttcgacctggtgatcggcggcagcccttgcaatgacctgagcatcgtgaacccagcccggaagggcctgtacgagggaaccggcagactgttcttcgagttttacagactgctgcacgacgcccggcctaaggaaggcgacgaccggcccttcttttggctgttcgagaatgtggtggccatgggagtcagcgacaagcgggatattagccggttcctggagagcaaccccgtgatgatcgatgccaaggaagtgagcgccgcccaccgggccagatacttctggggcaatctgcctggcatgaacagacccctggccagcaccgtgaacgacaagctggagctgcaggagtgcctggagcacggccggatcgccaagttcagcaaggtgagaaccatcaccacccgaagcaacagcatcaaacaaggcaaggaccagcactttcctgtgttcatgaacgagaaggaggacatcctgtggtgtaccgagatggagagagtgttcgggttcccagtccactacacagatgtcagcaacatgtctagactggccagacagagactgctgggaagaagctggtccgtccctgtgatcagacacctgttcgcccctctgaaggagtacttcgcctgcgtgagcagcggcaacagcaacgccaacagccggggccccagcttctctagcggcctggtgccactgtccctgagagggagccacatgggccccatggagatctacaaaaccgtgagcgcctggaagcggcagcctgtgcgcgtgctgagcctgtttcggaatatcgataaagtcctgaaaagcctgggattcctggagagcggctctggctccggcggtggcaccctgaagtacgtggaggatgtgacaaacgtggtcagacgggatgtggagaagtggggccccttcgatctggtgtacggcagcacccaacccctgggcagctcttgtgaccggtgccctggctggtacatgtttcagttccaccggatcctgcagtacgccctgccgagacaggagtcccagcggccattcttttggattttcatggacaacttgctgctgaccgaggatgaccaggaaactaccactcggttcctgcagaccgaagccgtgaccctgcaggacgtgagaggccgggactaccagaacgccatgcgggtgtggtccaacatccctggactgaaaagcaagcacgcacctctgacccctaaagaagaggagtacctgcaggcccaggtgcggagcagaagcaagctggacgcccctaaggtggatctgctggtgaagaattgcctcctgcccctgagagagtacttcaagtatttcagccagaatagtctgcccctgggcggcccaagcagcggcgcccctcctcccagcggcggcagcccagccggctccccaacctctaccgaggagggcacctctgagtccgccacccccgagagcggccctggcacctccaccgagcccagcgagggcagcgcacccggcagccctgccggcagccccacctccacagaggagggaaccagcaccgagcccagcgaaggcagcgccccaggcaccagcaccgagcctagtgagggcggctctggcggcggcagcgcccaggagattaaacggatcaacaagatcagaagaagacttgtgaaagacagcaacaccaagaaggccggcaagacaggccccatgaaaaccctgctggttagagtgatgacacccgatctgagagagcggctggaaaacctgagaaagaagcctgaaaatatcccccagcccatcagcaatacatctagagccaacctgaataagctgctgaccgattacaccgaaatgaagaaggcgatcctgcatgtgtactgggaagagttccagaaggaccctgtgggcctgatgagccgggtggcccagcctgccagcaagaagatcgatcagaacaagctgaaacctgagatggacgagaagggcaacctgaccaccgccggctttgcctgctctcagtgtggccagcccctgttcgtgtacaagctggagcaggtgtctgagaagggcaaggcttacaccaactacttcggacggtgcaatgtggccgagcacgaaaagctgatcctgctggcccagctgaagcccgagaaggatagcgacgaagccgtgacatatagcctgggaaagtttgggcagagggccctggatttctacagcattcatgtgaccaaggagtccacccaccccgtgaagcccctggcccagatcgccggaaacagatacgcctccggacctgtgggaaaggccctgagcgacgcatgtatgggcacaatcgcctccttcctgtctaagtaccaggacatcatcatcgaacaccagaaggtggtgaagggcaaccagaagagactggagagcctgcgggagctggccggcaaggaaaacctggaataccctagcgtgaccctgccacctcagcctcacaccaaggagggcgttgatgcctacaacgaagtgatcgcccgggtgcgaatgtgggtgaacctgaacctgtggcagaagctgaagctaagcagagatgatgccaagcctctgctgagactgaagggattcccttcctttcctctggtcgagagacaggccaacgaagtggactggtgggacatggtgtgtaacgtgaagaagctgatcaacgagaaaaaggaggatggcaaggtgttttggcagaatctggctggctacaagagacaggaagccctgagaccatacctgagcagcgaggaagatcggaagaagggaaagaaattcgctcggtaccagctgggcgacctgctgctgcacctggaaaagaagcacggcgaggactggggaaaggtgtacgacgaggcctgggagcggattgacaagaaagtggaaggcctgagcaagcacatcaagctggaagaggaacggagaagcgaggacgcccagagcaaggccgccctgaccgactggctgcgggctaaggccagcttcgtgatcgagggcctgaaggaggccgacaaggacgagttctgcagatgcgagctgaagctgcagaagtggtacggggacctgcggggaaagcccttcgccatcgaagccgagaacagcatcctggacatcagcggcttcagcaagcagtacaactgtgccttcatctggcagaaggacggcgtgaagaagctgaacctgtacctgatcatcaactacttcaagggcggcaagctgcggttcaagaagatcaaacctgaagccttcgaagccaacagattctacaccgtgatcaacaaaaagagcggcgagatcgtgcccatggaggtgaacttcaacttcgacgaccccaacctgatcatcctgcctctggcctttggcaagagacagggcagagaattcatctggaacgacctgctgtccctggaaaccggcagcctgaagctggccaacggaagagtgatcgagaagacactgtacaacagaagaacccggcaggatgagcctgccctgttcgtggccctgaccttcgagcggcgggaggtcctggactcctccaatatcaaaccaatgaacctgatcggcgtggcaagaggcgaaaacatccccgccgtgatcgccctgaccgaccccgagggctgcccactgagccggtttaaggatagcctgggaaacccaacccacatcctgagaatcggcgagagctataaggagaagcagcggaccatccaggccaagaaggaggtggagcagcggagagccggcggctacagccggaagtacgccagcaaagccaagaatctggcagacgatatggtgagaaacaccgctagagatctgctgtactacgccgtgacccaggatgccatgctgatcttcgccaacctgagccggggcttcggccggcagggcaagcggaccttcatggccgagagacagtacacacggatggaggactggctgaccgccaagctggcctacgagggcctgagcaagacctacctgtccaagacactggcccagtacacctccaagacatgcagcaactgtgggtttaccatcaccagcgccgactacgacagggtgctggagaagctgaagaagacagcaacaggctggatgaccacaattaacggcaaggagctgaaggtggagggccagattacctactacaacagatacaagagacagaacgtagtcaaggacctgtccgtcgagctggatagactgagcgaagaatctgtgaacaacgacatctcctcctggacaaagggcagaagcggagaagctctgagcctcctgaagaaaagattctcccatagacccgtgcaggagaagttcgtgtgcctgaactgcggcttcgagacacacgcagccgagcaagccgccctgaacatcgccagatcctggctgttcctgcggagccaggagtacaagaaataccagacaaacaagacaaccggcaacaccgataagagagccttcgtcgagacctggcagtccttttaccggaagaagcttaaggaggtgtggaaacctgccgtgcggtctggcggatctggcggaggctccacaagcgccaaggcccccgtgaccttcggcgacctggccatctacttcagccaggaggagtgggagtggctgagccccatccagaaggacctgtacgaggacgtgatgctggagaactaccagaacctggtgagcctgggcctgagcttcaggaggcccaacgtgatcagcctgctggagaagggcaaggccccctggatggtggaccccgtgaagaggaggaggggcctggacctgggcagcaagtgcaccagccccaagaaaaagagaaaagtctaagctgccttctgcggggcttgccttctggccatgcccttcttctctcccttgcacctgtacctcttggtctttgaataaagcctgagtaggaaggctagcaaaaaaaaaaaaaaaaaaaaaaaaaaaaaaaaaaaaaaaaaaaaaaaaaaaaaaaaaaaaaaaaaaaaaaaaaaaaaaaa

SEQ ID NO: 6645 - RNA, 5797 nt, synthetic construct
  source 1..5797: mol_type = other RNA
aggaaataagagagaaaagaagagtaagaagaaatataagagccaccatggcccctaagaagaagcgtaaagtgagccggatggaacgcctcgtctacgaggtgcggcagaagtgcagaaacatcgaggacatctgcatctcctgcggatctctgaacgtgaccctggagcacccactgttcatcggcggcatgtgccagaactgtaaaaactgttttctggagtgtgcctatcaatacgacgatgacggctaccagagctactgcaccatctgttgcggcggaagagaggtgctgatgtgtggaaataacaactgctgccggtgcttctgcgtggaatgcgtggacctgctggtgggccccggcgccgcccaggccgctattaaggaagatccttggaactgctacatgtgcggccacaagggcacatacggcctgctgagacggagagaggactggcctagcagactgcagatgttcttcgccaataaccacgaccaggagttcgacccccctaaggtgtaccctcccgtccccgccgagaagagaaagcccatccgggtcctgagcctgttcgatggcatcgccaccggtctgctggtgctgaaggacctgggcatccaggtggataggtacattgcctccgaggtgtgcgaggactccatcaccgtgggaatggtgcgtcatcagggcaagatcatgtacgtgggcgacgtgcggagcgtgacacagaagcatatccaggagtggggccctttcgacctggtgatcggcggcagcccttgcaatgacctgagcatcgtgaacccagcccggaagggcctgtacgagggaaccggcagactgttcttcgagttttacagactgctgcacgacgcccggcctaaggaaggcgacgaccggcccttcttttggctgttcgagaatgtggtggccatgggagtcagcgacaagcgggatattagccggttcctggagagcaaccccgtgatgatcgatgccaaggaagtgagcgccgcccaccgggccagatacttctggggcaatctgcctggcatgaacagacccctggccagcaccgtgaacgacaagctggagctgcaggagtgcctggagcacggccggatcgccaagttcagcaaggtgagaaccatcaccacccgaagcaacagcatcaaacaaggcaaggaccagcactttcctgtgttcatgaacgagaaggaggacatcctgtggtgtaccgagatggagagagtgttcgggttcccagtccactacacagatgtcagcaacatgtctagactggccagacagagactgctgggaagaagctggtccgtccctgtgatcagacacctgttcgcccctctgaaggagtacttcgcctgcgtgagcagcggcaacagcaacgccaacagccggggccccagcttctctagcggcctggtgccactgtccctgagagggagccacatgggccccatggagatctacaaaaccgtgagcgcctggaagcggcagcctgtgcgcgtgctgagcctgtttcggaatatcgataaagtcctgaaaagcctgggattcctggagagcggctctggctccggcggtggcaccctgaagtacgtggaggatgtgacaaacgtggtcagacgggatgtggagaagtggggccccttcgatctggtgtacggcagcacccaacccctgggcagctcttgtgaccggtgccctggctggtacatgtttcagttccaccggatcctgcagtacgccctgccgagacaggagtcccagcggccattcttttggattttcatggacaacttgctgctgaccgaggatgaccaggaaactaccactcggttcctgcagaccgaagccgtgaccctgcaggacgtgagaggccgggactaccagaacgccatgcgggtgtggtccaacatccctggactgaaaagcaagcacgcacctctgacccctaaagaagaggagtacctgcaggcccaggtgcggagcagaagcaagctggacgcccctaaggtggatctgctggtgaagaattgcctcctgcccctgagagagtacttcaagtatttcagccagaatagtctgcccctgggcggcccaagcagcggcgcccctcctcccagcggcggcagcccagccggctccccaacctctaccgaggagggcacctctgagtccgccacccccgagagcggccctggcacctccaccgagcccagcgagggcagcgcacccggcagccctgccggcagccccacctccacagaggagggaaccagcaccgagcccagcgaaggcagcgccccaggcaccagcaccgagcctagtgagggcggctctggcggcggcagcgcccaggagattaaacggatcaacaagatcagaagaagacttgtgaaagacagcaacaccaagaaggccggcaagacaggccccatgaaaaccctgctggttagagtgatgacacccgatctgagagagcggctggaaaacctgagaaagaagcctgaaaatatcccccagcccatcagcaatacatctagagccaacctgaataagctgctgaccgattacaccgaaatgaagaaggcgatcctgcatgtgtactgggaagagttccagaaggaccctgtgggcctgatgagccgggtggcccagcctgccagcaagaagatcgatcagaacaagctgaaacctgagatggacgagaagggcaacctgaccaccgccggctttgcctgctctcagtgtggccagcccctgttcgtgtacaagctggagcaggtgtctgagaagggcaaggcttacaccaactacttcggacggtgcaatgtggccgagcacgaaaagctgatcctgctggcccagctgaagcccgagaaggatagcgacgaagccgtgacatatagcctgggaaagtttgggcagagggccctggatttctacagcattcatgtgaccaaggagtccacccaccccgtgaagcccctggcccagatcgccggaaacagatacgcctccggacctgtgggaaaggccctgagcgacgcatgtatgggcacaatcgcctccttcctgtctaagtaccaggacatcatcatcgaacaccagaaggtggtgaagggcaaccagaagagactggagagcctgcgggagctggccggcaaggaaaacctggaataccctagcgtgaccctgccacctcagcctcacaccaaggagggcgttgatgcctacaacgaagtgatcgcccgggtgcgaatgtgggtgaacctgaacctgtggcagaagctgaagctaagcagagatgatgccaagcctctgctgagactgaagggattcccttcctttcctctggtcgagagacaggccaacgaagtggactggtgggacatggtgtgtaacgtgaagaagctgatcaacgagaaaaaggaggatggcaaggtgttttggcagaatctggctggctacaagagacaggaagccctgagaccatacctgagcagcgaggaagatcggaagaagggaaagaaattcgctcggtaccagctgggcgacctgctgctgcacctggaaaagaagcacggcgaggactggggaaaggtgtacgacgaggcctgggagcggattgacaagaaagtggaaggcctgagcaagcacatcaagctggaagaggaacggagaagcgaggacgcccagagcaaggccgccctgaccgactggctgcgggctaaggccagcttcgtgatcgagggcctgaaggaggccgacaaggacgagttctgcagatgcgagctgaagctgcagaagtggtacggggacctgcggggaaagcccttcgccatcgaagccgagaacagcatcctggacatcagcggcttcagcaagcagtacaactgtgccttcatctggcagaaggacggcgtgaagaagctgaacctgtacctgatcatcaactacttcaagggcggcaagctgcggttcaagaagatcaaacctgaagccttcgaagccaacagattctacaccgtgatcaacaaaaagagcggcgagatcgtgcccatggaggtgaacttcaacttcgacgaccccaacctgatcatcctgcctctggcctttggcaagagacagggcagagaattcatctggaacgacctgctgtccctggaaaccggcagcctgaagctggccaacggaagagtgatcgagaagacactgtacaacagaagaacccggcaggatgagcctgccctgttcgtggccctgaccttcgagcggcgggaggtcctggactcctccaatatcaaaccaatgaacctgatcggcgtggcaagaggcgaaaacatccccgccgtgatcgccctgaccgaccccgagggctgcccactgagccggtttaaggatagcctgggaaacccaacccacatcctgagaatcggcgagagctataaggagaagcagcggaccatccaggccaagaaggaggtggagcagcggagagccggcggctacagccggaagtacgccagcaaagccaagaatctggcagacgatatggtgagaaacaccgctagagatctgctgtactacgccgtgacccaggatgccatgctgatcttcgccaacctgagccggggcttcggccggcagggcaagcggaccttcatggccgagagacagtacacacggatggaggactggctgaccgccaagctggcctacgagggcctgagcaagacctacctgtccaagacactggcccagtacacctccaagacatgcagcaactgtgggtttaccatcaccagcgccgactacgacagggtgctggagaagctgaagaagacagcaacaggctggatgaccacaattaacggcaaggagctgaaggtggagggccagattacctactacaacagatacaagagacagaacgtagtcaaggacctgtccgtcgagctggatagactgagcgaagaatctgtgaacaacgacatctcctcctggacaaagggcagaagcggagaagctctgagcctcctgaagaaaagattctcccatagacccgtgcaggagaagttcgtgtgcctgaactgcggcttcgagacacacgcagccgagcaagccgccctgaacatcgccagatcctggctgttcctgcggagccaggagtacaagaaataccagacaaacaagacaaccggcaacaccgataagagagccttcgtcgagacctggcagtccttttaccggaagaagcttaaggaggtgtggaaacctgccgtgcggtctggcggatctggcggaggctccacaagcatggccttcagggacgtggccgtggacttcacccaggacgagtggaggctgctgagccccgcccagaggaccctgtacagggaggtgatgctggagaactacagcaacctggtgagcctgggcatcagcttcagcaagcccgagatcatcacccagctggagcagggcaaggagacctggagggaggagaagaagtgcccccccgccacctgccccgccgaccccgagcccgagctgtgcctgaccagccccaagaaaaagagaaaagtctaagctgccttctgcggggcttgccttctggccatgcccttcttctctcccttgcacctgtacctcttggtctttgaataaagcctgagtaggaaggctagcaaaaaaaaaaaaaaaaaaaaaaaaaaaaaaaaaaaaaaaaaaaaaaaaaaaaaaaaaaaaaaaaaaaaaaaaaaaaaaaa

SEQ ID NO: 6646 - RNA, 5797 nt, synthetic construct
  source 1..5797: mol_type = other RNA
aggaaataagagagaaaagaagagtaagaagaaatataagagccaccatggcccctaagaagaagcgtaaagtgagccggatggaacgcctcgtctacgaggtgcggcagaagtgcagaaacatcgaggacatctgcatctcctgcggatctctgaacgtgaccctggagcacccactgttcatcggcggcatgtgccagaactgtaaaaactgttttctggagtgtgcctatcaatacgacgatgacggctaccagagctactgcaccatctgttgcggcggaagagaggtgctgatgtgtggaaataacaactgctgccggtgcttctgcgtggaatgcgtggacctgctggtgggccccggcgccgcccaggccgctattaaggaagatccttggaactgctacatgtgcggccacaagggcacatacggcctgctgagacggagagaggactggcctagcagactgcagatgttcttcgccaataaccacgaccaggagttcgacccccctaaggtgtaccctcccgtccccgccgagaagagaaagcccatccgggtcctgagcctgttcgatggcatcgccaccggtctgctggtgctgaaggacctgggcatccaggtggataggtacattgcctccgaggtgtgcgaggactccatcaccgtgggaatggtgcgtcatcagggcaagatcatgtacgtgggcgacgtgcggagcgtgacacagaagcatatccaggagtggggccctttcgacctggtgatcggcggcagcccttgcaatgacctgagcatcgtgaacccagcccggaagggcctgtacgagggaaccggcagactgttcttcgagttttacagactgctgcacgacgcccggcctaaggaaggcgacgaccggcccttcttttggctgttcgagaatgtggtggccatgggagtcagcgacaagcgggatattagccggttcctggagagcaaccccgtgatgatcgatgccaaggaagtgagcgccgcccaccgggccagatacttctggggcaatctgcctggcatgaacagacccctggccagcaccgtgaacgacaagctggagctgcaggagtgcctggagcacggccggatcgccaagttcagcaaggtgagaaccatcaccacccgaagcaacagcatcaaacaaggcaaggaccagcactttcctgtgttcatgaacgagaaggaggacatcctgtggtgtaccgagatggagagagtgttcgggttcccagtccactacacagatgtcagcaacatgtctagactggccagacagagactgctgggaagaagctggtccgtccctgtgatcagacacctgttcgcccctctgaaggagtacttcgcctgcgtgagcagcggcaacagcaacgccaacagccggggccccagcttctctagcggcctggtgccactgtccctgagagggagccacatgggccccatggagatctacaaaaccgtgagcgcctggaagcggcagcctgtgcgcgtgctgagcctgtttcggaatatcgataaagtcctgaaaagcctgggattcctggagagcggctctggctccggcggtggcaccctgaagtacgtggaggatgtgacaaacgtggtcagacgggatgtggagaagtggggccccttcgatctggtgtacggcagcacccaacccctgggcagctcttgtgaccggtgccctggctggtacatgtttcagttccaccggatcctgcagtacgccctgccgagacaggagtcccagcggccattcttttggattttcatggacaacttgctgctgaccgaggatgaccaggaaactaccactcggttcctgcagaccgaagccgtgaccctgcaggacgtgagaggccgggactaccagaacgccatgcgggtgtggtccaacatccctggactgaaaagcaagcacgcacctctgacccctaaagaagaggagtacctgcaggcccaggtgcggagcagaagcaagctggacgcccctaaggtggatctgctggtgaagaattgcctcctgcccctgagagagtacttcaagtatttcagccagaatagtctgcccctgggcggcccaagcagcggcgcccctcctcccagcggcggcagcccagccggctccccaacctctaccgaggagggcacctctgagtccgccacccccgagagcggccctggcacctccaccgagcccagcgagggcagcgcacccggcagccctgccggcagccccacctccacagaggagggaaccagcaccgagcccagcgaaggcagcgccccaggcaccagcaccgagcctagtgagggcggctctggcggcggcagcgcccaggagattaaacggatcaacaagatcagaagaagacttgtgaaagacagcaacaccaagaaggccggcaagacaggccccatgaaaaccctgctggttagagtgatgacacccgatctgagagagcggctggaaaacctgagaaagaagcctgaaaatatcccccagcccatcagcaatacatctagagccaacctgaataagctgctgaccgattacaccgaaatgaagaaggcgatcctgcatgtgtactgggaagagttccagaaggaccctgtgggcctgatgagccgggtggcccagcctgccagcaagaagatcgatcagaacaagctgaaacctgagatggacgagaagggcaacctgaccaccgccggctttgcctgctctcagtgtggccagcccctgttcgtgtacaagctggagcaggtgtctgagaagggcaaggcttacaccaactacttcggacggtgcaatgtggccgagcacgaaaagctgatcctgctggcccagctgaagcccgagaaggatagcgacgaagccgtgacatatagcctgggaaagtttgggcagagggccctggatttctacagcattcatgtgaccaaggagtccacccaccccgtgaagcccctggcccagatcgccggaaacagatacgcctccggacctgtgggaaaggccctgagcgacgcatgtatgggcacaatcgcctccttcctgtctaagtaccaggacatcatcatcgaacaccagaaggtggtgaagggcaaccagaagagactggagagcctgcgggagctggccggcaaggaaaacctggaataccctagcgtgaccctgccacctcagcctcacaccaaggagggcgttgatgcctacaacgaagtgatcgcccgggtgcgaatgtgggtgaacctgaacctgtggcagaagctgaagctaagcagagatgatgccaagcctctgctgagactgaagggattcccttcctttcctctggtcgagagacaggccaacgaagtggactggtgggacatggtgtgtaacgtgaagaagctgatcaacgagaaaaaggaggatggcaaggtgttttggcagaatctggctggctacaagagacaggaagccctgagaccatacctgagcagcgaggaagatcggaagaagggaaagaaattcgctcggtaccagctgggcgacctgctgctgcacctggaaaagaagcacggcgaggactggggaaaggtgtacgacgaggcctgggagcggattgacaagaaagtggaaggcctgagcaagcacatcaagctggaagaggaacggagaagcgaggacgcccagagcaaggccgccctgaccgactggctgcgggctaaggccagcttcgtgatcgagggcctgaaggaggccgacaaggacgagttctgcagatgcgagctgaagctgcagaagtggtacggggacctgcggggaaagcccttcgccatcgaagccgagaacagcatcctggacatcagcggcttcagcaagcagtacaactgtgccttcatctggcagaaggacggcgtgaagaagctgaacctgtacctgatcatcaactacttcaagggcggcaagctgcggttcaagaagatcaaacctgaagccttcgaagccaacagattctacaccgtgatcaacaaaaagagcggcgagatcgtgcccatggaggtgaacttcaacttcgacgaccccaacctgatcatcctgcctctggcctttggcaagagacagggcagagaattcatctggaacgacctgctgtccctggaaaccggcagcctgaagctggccaacggaagagtgatcgagaagacactgtacaacagaagaacccggcaggatgagcctgccctgttcgtggccctgaccttcgagcggcgggaggtcctggactcctccaatatcaaaccaatgaacctgatcggcgtggcaagaggcgaaaacatccccgccgtgatcgccctgaccgaccccgagggctgcccactgagccggtttaaggatagcctgggaaacccaacccacatcctgagaatcggcgagagctataaggagaagcagcggaccatccaggccaagaaggaggtggagcagcggagagccggcggctacagccggaagtacgccagcaaagccaagaatctggcagacgatatggtgagaaacaccgctagagatctgctgtactacgccgtgacccaggatgccatgctgatcttcgccaacctgagccggggcttcggccggcagggcaagcggaccttcatggccgagagacagtacacacggatggaggactggctgaccgccaagctggcctacgagggcctgagcaagacctacctgtccaagacactggcccagtacacctccaagacatgcagcaactgtgggtttaccatcaccagcgccgactacgacagggtgctggagaagctgaagaagacagcaacaggctggatgaccacaattaacggcaaggagctgaaggtggagggccagattacctactacaacagatacaagagacagaacgtagtcaaggacctgtccgtcgagctggatagactgagcgaagaatctgtgaacaacgacatctcctcctggacaaagggcagaagcggagaagctctgagcctcctgaagaaaagattctcccatagacccgtgcaggagaagttcgtgtgcctgaactgcggcttcgagacacacgcagccgagcaagccgccctgaacatcgccagatcctggctgttcctgcggagccaggagtacaagaaataccagacaaacaagacaaccggcaacaccgataagagagccttcgtcgagacctggcagtccttttaccggaagaagcttaaggaggtgtggaaacctgccgtgcggtctggcggatctggcggaggctccacaagcttctgggagagcgtgaccttccaggacgtggccgtggacttcacctgggaggagtggggccacctgggccccgcccagaaggagctgtacagggaggtgatgctggagaactacaggaacctggtgtgcctgggcctggccgtgagcaagcccgacgtgatctgccagctggagcagggcggcgccccctggtggcccgagggcggcgtgcccggcagcagctgcgccgtgtgggacaccaggaccagccccaagaaaaagagaaaagtctaagctgccttctgcggggcttgccttctggccatgcccttcttctctcccttgcacctgtacctcttggtctttgaataaagcctgagtaggaaggctagcaaaaaaaaaaaaaaaaaaaaaaaaaaaaaaaaaaaaaaaaaaaaaaaaaaaaaaaaaaaaaaaaaaaaaaaaaaaaaaaa

SEQ ID NO: 6647 - RNA, 5797 nt, synthetic construct
  source 1..5797: mol_type = other RNA
aggaaataagagagaaaagaagagtaagaagaaatataagagccaccatggcccctaagaagaagcgtaaagtgagccggatggaacgcctcgtctacgaggtgcggcagaagtgcagaaacatcgaggacatctgcatctcctgcggatctctgaacgtgaccctggagcacccactgttcatcggcggcatgtgccagaactgtaaaaactgttttctggagtgtgcctatcaatacgacgatgacggctaccagagctactgcaccatctgttgcggcggaagagaggtgctgatgtgtggaaataacaactgctgccggtgcttctgcgtggaatgcgtggacctgctggtgggccccggcgccgcccaggccgctattaaggaagatccttggaactgctacatgtgcggccacaagggcacatacggcctgctgagacggagagaggactggcctagcagactgcagatgttcttcgccaataaccacgaccaggagttcgacccccctaaggtgtaccctcccgtccccgccgagaagagaaagcccatccgggtcctgagcctgttcgatggcatcgccaccggtctgctggtgctgaaggacctgggcatccaggtggataggtacattgcctccgaggtgtgcgaggactccatcaccgtgggaatggtgcgtcatcagggcaagatcatgtacgtgggcgacgtgcggagcgtgacacagaagcatatccaggagtggggccctttcgacctggtgatcggcggcagcccttgcaatgacctgagcatcgtgaacccagcccggaagggcctgtacgagggaaccggcagactgttcttcgagttttacagactgctgcacgacgcccggcctaaggaaggcgacgaccggcccttcttttggctgttcgagaatgtggtggccatgggagtcagcgacaagcgggatattagccggttcctggagagcaaccccgtgatgatcgatgccaaggaagtgagcgccgcccaccgggccagatacttctggggcaatctgcctggcatgaacagacccctggccagcaccgtgaacgacaagctggagctgcaggagtgcctggagcacggccggatcgccaagttcagcaaggtgagaaccatcaccacccgaagcaacagcatcaaacaaggcaaggaccagcactttcctgtgttcatgaacgagaaggaggacatcctgtggtgtaccgagatggagagagtgttcgggttcccagtccactacacagatgtcagcaacatgtctagactggccagacagagactgctgggaagaagctggtccgtccctgtgatcagacacctgttcgcccctctgaaggagtacttcgcctgcgtgagcagcggcaacagcaacgccaacagccggggccccagcttctctagcggcctggtgccactgtccctgagagggagccacatgggccccatggagatctacaaaaccgtgagcgcctggaagcggcagcctgtgcgcgtgctgagcctgtttcggaatatcgataaagtcctgaaaagcctgggattcctggagagcggctctggctccggcggtggcaccctgaagtacgtggaggatgtgacaaacgtggtcagacgggatgtggagaagtggggccccttcgatctggtgtacggcagcacccaacccctgggcagctcttgtgaccggtgccctggctggtacatgtttcagttccaccggatcctgcagtacgccctgccgagacaggagtcccagcggccattcttttggattttcatggacaacttgctgctgaccgaggatgaccaggaaactaccactcggttcctgcagaccgaagccgtgaccctgcaggacgtgagaggccgggactaccagaacgccatgcgggtgtggtccaacatccctggactgaaaagcaagcacgcacctctgacccctaaagaagaggagtacctgcaggcccaggtgcggagcagaagcaagctggacgcccctaaggtggatctgctggtgaagaattgcctcctgcccctgagagagtacttcaagtatttcagccagaatagtctgcccctgggcggcccaagcagcggcgcccctcctcccagcggcggcagcccagccggctccccaacctctaccgaggagggcacctctgagtccgccacccccgagagcggccctggcacctccaccgagcccagcgagggcagcgcacccggcagccctgccggcagccccacctccacagaggagggaaccagcaccgagcccagcgaaggcagcgccccaggcaccagcaccgagcctagtgagggcggctctggcggcggcagcgcccaggagattaaacggatcaacaagatcagaagaagacttgtgaaagacagcaacaccaagaaggccggcaagacaggccccatgaaaaccctgctggttagagtgatgacacccgatctgagagagcggctggaaaacctgagaaagaagcctgaaaatatcccccagcccatcagcaatacatctagagccaacctgaataagctgctgaccgattacaccgaaatgaagaaggcgatcctgcatgtgtactgggaagagttccagaaggaccctgtgggcctgatgagccgggtggcccagcctgccagcaagaagatcgatcagaacaagctgaaacctgagatggacgagaagggcaacctgaccaccgccggctttgcctgctctcagtgtggccagcccctgttcgtgtacaagctggagcaggtgtctgagaagggcaaggcttacaccaactacttcggacggtgcaatgtggccgagcacgaaaagctgatcctgctggcccagctgaagcccgagaaggatagcgacgaagccgtgacatatagcctgggaaagtttgggcagagggccctggatttctacagcattcatgtgaccaaggagtccacccaccccgtgaagcccctggcccagatcgccggaaacagatacgcctccggacctgtgggaaaggccctgagcgacgcatgtatgggcacaatcgcctccttcctgtctaagtaccaggacatcatcatcgaacaccagaaggtggtgaagggcaaccagaagagactggagagcctgcgggagctggccggcaaggaaaacctggaataccctagcgtgaccctgccacctcagcctcacaccaaggagggcgttgatgcctacaacgaagtgatcgcccgggtgcgaatgtgggtgaacctgaacctgtggcagaagctgaagctaagcagagatgatgccaagcctctgctgagactgaagggattcccttcctttcctctggtcgagagacaggccaacgaagtggactggtgggacatggtgtgtaacgtgaagaagctgatcaacgagaaaaaggaggatggcaaggtgttttggcagaatctggctggctacaagagacaggaagccctgagaccatacctgagcagcgaggaagatcggaagaagggaaagaaattcgctcggtaccagctgggcgacctgctgctgcacctggaaaagaagcacggcgaggactggggaaaggtgtacgacgaggcctgggagcggattgacaagaaagtggaaggcctgagcaagcacatcaagctggaagaggaacggagaagcgaggacgcccagagcaaggccgccctgaccgactggctgcgggctaaggccagcttcgtgatcgagggcctgaaggaggccgacaaggacgagttctgcagatgcgagctgaagctgcagaagtggtacggggacctgcggggaaagcccttcgccatcgaagccgagaacagcatcctggacatcagcggcttcagcaagcagtacaactgtgccttcatctggcagaaggacggcgtgaagaagctgaacctgtacctgatcatcaactacttcaagggcggcaagctgcggttcaagaagatcaaacctgaagccttcgaagccaacagattctacaccgtgatcaacaaaaagagcggcgagatcgtgcccatggaggtgaacttcaacttcgacgaccccaacctgatcatcctgcctctggcctttggcaagagacagggcagagaattcatctggaacgacctgctgtccctggaaaccggcagcctgaagctggccaacggaagagtgatcgagaagacactgtacaacagaagaacccggcaggatgagcctgccctgttcgtggccctgaccttcgagcggcgggaggtcctggactcctccaatatcaaaccaatgaacctgatcggcgtggcaagaggcgaaaacatccccgccgtgatcgccctgaccgaccccgagggctgcccactgagccggtttaaggatagcctgggaaacccaacccacatcctgagaatcggcgagagctataaggagaagcagcggaccatccaggccaagaaggaggtggagcagcggagagccggcggctacagccggaagtacgccagcaaagccaagaatctggcagacgatatggtgagaaacaccgctagagatctgctgtactacgccgtgacccaggatgccatgctgatcttcgccaacctgagccggggcttcggccggcagggcaagcggaccttcatggccgagagacagtacacacggatggaggactggctgaccgccaagctggcctacgagggcctgagcaagacctacctgtccaagacactggcccagtacacctccaagacatgcagcaactgtgggtttaccatcaccagcgccgactacgacagggtgctggagaagctgaagaagacagcaacaggctggatgaccacaattaacggcaaggagctgaaggtggagggccagattacctactacaacagatacaagagacagaacgtagtcaaggacctgtccgtcgagctggatagactgagcgaagaatctgtgaacaacgacatctcctcctggacaaagggcagaagcggagaagctctgagcctcctgaagaaaagattctcccatagacccgtgcaggagaagttcgtgtgcctgaactgcggcttcgagacacacgcagccgagcaagccgccctgaacatcgccagatcctggctgttcctgcggagccaggagtacaagaaataccagacaaacaagacaaccggcaacaccgataagagagccttcgtcgagacctggcagtccttttaccggaagaagcttaaggaggtgtggaaacctgccgtgcggtctggcggatctggcggaggctccacaagcagccaggtgagcgtgaccttcgaggacgtggccgtgctgttcaccagggacgagtggaggaagctgggccccagccagaggaacgtgtaccaggaggtgatgctggagaactacagcaacctggtgagcctgggcctgctgttcagcaagcccagggtgatcagcctgctgcaggagggcgaggacccctggaaggtggagaaggagagccccggcggccccagcctgggctggaacagcagcaccagccccaagaaaaagagaaaagtctaagctgccttctgcggggcttgccttctggccatgcccttcttctctcccttgcacctgtacctcttggtctttgaataaagcctgagtaggaaggctagcaaaaaaaaaaaaaaaaaaaaaaaaaaaaaaaaaaaaaaaaaaaaaaaaaaaaaaaaaaaaaaaaaaaaaaaaaaaaaaaa

SEQ ID NO: 6648 - RNA, 5797 nt, synthetic construct
  source 1..5797: mol_type = other RNA
aggaaataagagagaaaagaagagtaagaagaaatataagagccaccatggcccctaagaagaagcgtaaagtgagccggatggaacgcctcgtctacgaggtgcggcagaagtgcagaaacatcgaggacatctgcatctcctgcggatctctgaacgtgaccctggagcacccactgttcatcggcggcatgtgccagaactgtaaaaactgttttctggagtgtgcctatcaatacgacgatgacggctaccagagctactgcaccatctgttgcggcggaagagaggtgctgatgtgtggaaataacaactgctgccggtgcttctgcgtggaatgcgtggacctgctggtgggccccggcgccgcccaggccgctattaaggaagatccttggaactgctacatgtgcggccacaagggcacatacggcctgctgagacggagagaggactggcctagcagactgcagatgttcttcgccaataaccacgaccaggagttcgacccccctaaggtgtaccctcccgtccccgccgagaagagaaagcccatccgggtcctgagcctgttcgatggcatcgccaccggtctgctggtgctgaaggacctgggcatccaggtggataggtacattgcctccgaggtgtgcgaggactccatcaccgtgggaatggtgcgtcatcagggcaagatcatgtacgtgggcgacgtgcggagcgtgacacagaagcatatccaggagtggggccctttcgacctggtgatcggcggcagcccttgcaatgacctgagcatcgtgaacccagcccggaagggcctgtacgagggaaccggcagactgttcttcgagttttacagactgctgcacgacgcccggcctaaggaaggcgacgaccggcccttcttttggctgttcgagaatgtggtggccatgggagtcagcgacaagcgggatattagccggttcctggagagcaaccccgtgatgatcgatgccaaggaagtgagcgccgcccaccgggccagatacttctggggcaatctgcctggcatgaacagacccctggccagcaccgtgaacgacaagctggagctgcaggagtgcctggagcacggccggatcgccaagttcagcaaggtgagaaccatcaccacccgaagcaacagcatcaaacaaggcaaggaccagcactttcctgtgttcatgaacgagaaggaggacatcctgtggtgtaccgagatggagagagtgttcgggttcccagtccactacacagatgtcagcaacatgtctagactggccagacagagactgctgggaagaagctggtccgtccctgtgatcagacacctgttcgcccctctgaaggagtacttcgcctgcgtgagcagcggcaacagcaacgccaacagccggggccccagcttctctagcggcctggtgccactgtccctgagagggagccacatgggccccatggagatctacaaaaccgtgagcgcctggaagcggcagcctgtgcgcgtgctgagcctgtttcggaatatcgataaagtcctgaaaagcctgggattcctggagagcggctctggctccggcggtggcaccctgaagtacgtggaggatgtgacaaacgtggtcagacgggatgtggagaagtggggccccttcgatctggtgtacggcagcacccaacccctgggcagctcttgtgaccggtgccctggctggtacatgtttcagttccaccggatcctgcagtacgccctgccgagacaggagtcccagcggccattcttttggattttcatggacaacttgctgctgaccgaggatgaccaggaaactaccactcggttcctgcagaccgaagccgtgaccctgcaggacgtgagaggccgggactaccagaacgccatgcgggtgtggtccaacatccctggactgaaaagcaagcacgcacctctgacccctaaagaagaggagtacctgcaggcccaggtgcggagcagaagcaagctggacgcccctaaggtggatctgctggtgaagaattgcctcctgcccctgagagagtacttcaagtatttcagccagaatagtctgcccctgggcggcccaagcagcggcgcccctcctcccagcggcggcagcccagccggctccccaacctctaccgaggagggcacctctgagtccgccacccccgagagcggccctggcacctccaccgagcccagcgagggcagcgcacccggcagccctgccggcagccccacctccacagaggagggaaccagcaccgagcccagcgaaggcagcgccccaggcaccagcaccgagcctagtgagggcggctctggcggcggcagcgcccaggagattaaacggatcaacaagatcagaagaagacttgtgaaagacagcaacaccaagaaggccggcaagacaggccccatgaaaaccctgctggttagagtgatgacacccgatctgagagagcggctggaaaacctgagaaagaagcctgaaaatatcccccagcccatcagcaatacatctagagccaacctgaataagctgctgaccgattacaccgaaatgaagaaggcgatcctgcatgtgtactgggaagagttccagaaggaccctgtgggcctgatgagccgggtggcccagcctgccagcaagaagatcgatcagaacaagctgaaacctgagatggacgagaagggcaacctgaccaccgccggctttgcctgctctcagtgtggccagcccctgttcgtgtacaagctggagcaggtgtctgagaagggcaaggcttacaccaactacttcggacggtgcaatgtggccgagcacgaaaagctgatcctgctggcccagctgaagcccgagaaggatagcgacgaagccgtgacatatagcctgggaaagtttgggcagagggccctggatttctacagcattcatgtgaccaaggagtccacccaccccgtgaagcccctggcccagatcgccggaaacagatacgcctccggacctgtgggaaaggccctgagcgacgcatgtatgggcacaatcgcctccttcctgtctaagtaccaggacatcatcatcgaacaccagaaggtggtgaagggcaaccagaagagactggagagcctgcgggagctggccggcaaggaaaacctggaataccctagcgtgaccctgccacctcagcctcacaccaaggagggcgttgatgcctacaacgaagtgatcgcccgggtgcgaatgtgggtgaacctgaacctgtggcagaagctgaagctaagcagagatgatgccaagcctctgctgagactgaagggattcccttcctttcctctggtcgagagacaggccaacgaagtggactggtgggacatggtgtgtaacgtgaagaagctgatcaacgagaaaaaggaggatggcaaggtgttttggcagaatctggctggctacaagagacaggaagccctgagaccatacctgagcagcgaggaagatcggaagaagggaaagaaattcgctcggtaccagctgggcgacctgctgctgcacctggaaaagaagcacggcgaggactggggaaaggtgtacgacgaggcctgggagcggattgacaagaaagtggaaggcctgagcaagcacatcaagctggaagaggaacggagaagcgaggacgcccagagcaaggccgccctgaccgactggctgcgggctaaggccagcttcgtgatcgagggcctgaaggaggccgacaaggacgagttctgcagatgcgagctgaagctgcagaagtggtacggggacctgcggggaaagcccttcgccatcgaagccgagaacagcatcctggacatcagcggcttcagcaagcagtacaactgtgccttcatctggcagaaggacggcgtgaagaagctgaacctgtacctgatcatcaactacttcaagggcggcaagctgcggttcaagaagatcaaacctgaagccttcgaagccaacagattctacaccgtgatcaacaaaaagagcggcgagatcgtgcccatggaggtgaacttcaacttcgacgaccccaacctgatcatcctgcctctggcctttggcaagagacagggcagagaattcatctggaacgacctgctgtccctggaaaccggcagcctgaagctggccaacggaagagtgatcgagaagacactgtacaacagaagaacccggcaggatgagcctgccctgttcgtggccctgaccttcgagcggcgggaggtcctggactcctccaatatcaaaccaatgaacctgatcggcgtggcaagaggcgaaaacatccccgccgtgatcgccctgaccgaccccgagggctgcccactgagccggtttaaggatagcctgggaaacccaacccacatcctgagaatcggcgagagctataaggagaagcagcggaccatccaggccaagaaggaggtggagcagcggagagccggcggctacagccggaagtacgccagcaaagccaagaatctggcagacgatatggtgagaaacaccgctagagatctgctgtactacgccgtgacccaggatgccatgctgatcttcgccaacctgagccggggcttcggccggcagggcaagcggaccttcatggccgagagacagtacacacggatggaggactggctgaccgccaagctggcctacgagggcctgagcaagacctacctgtccaagacactggcccagtacacctccaagacatgcagcaactgtgggtttaccatcaccagcgccgactacgacagggtgctggagaagctgaagaagacagcaacaggctggatgaccacaattaacggcaaggagctgaaggtggagggccagattacctactacaacagatacaagagacagaacgtagtcaaggacctgtccgtcgagctggatagactgagcgaagaatctgtgaacaacgacatctcctcctggacaaagggcagaagcggagaagctctgagcctcctgaagaaaagattctcccatagacccgtgcaggagaagttcgtgtgcctgaactgcggcttcgagacacacgcagccgagcaagccgccctgaacatcgccagatcctggctgttcctgcggagccaggagtacaagaaataccagacaaacaagacaaccggcaacaccgataagagagccttcgtcgagacctggcagtccttttaccggaagaagcttaaggaggtgtggaaacctgccgtgcggtctggcggatctggcggaggctccacaagcccccaggagagcgtgaccttcgaggacgtggccgtgaacttcagccacgaggagtggcagtgcctgacccacgcccagaggcacctgtacaaggacgtgatgctggagaactacggcaacatggtgagcctgggcttcagcttcagcaagccccccctgatcagcaggctggagcagggcaccgagccctacgtgcaggacaggcaggactgggagttcctgagctgcagctaccccgtgagcaccagccccaagaaaaagagaaaagtctaagctgccttctgcggggcttgccttctggccatgcccttcttctctcccttgcacctgtacctcttggtctttgaataaagcctgagtaggaaggctagcaaaaaaaaaaaaaaaaaaaaaaaaaaaaaaaaaaaaaaaaaaaaaaaaaaaaaaaaaaaaaaaaaaaaaaaaaaaaaaaa

SEQ ID NO: 6649 - RNA, 5797 nt, synthetic construct
  source 1..5797: mol_type = other RNA
aggaaataagagagaaaagaagagtaagaagaaatataagagccaccatggcccctaagaagaagcgtaaagtgagccggatggaacgcctcgtctacgaggtgcggcagaagtgcagaaacatcgaggacatctgcatctcctgcggatctctgaacgtgaccctggagcacccactgttcatcggcggcatgtgccagaactgtaaaaactgttttctggagtgtgcctatcaatacgacgatgacggctaccagagctactgcaccatctgttgcggcggaagagaggtgctgatgtgtggaaataacaactgctgccggtgcttctgcgtggaatgcgtggacctgctggtgggccccggcgccgcccaggccgctattaaggaagatccttggaactgctacatgtgcggccacaagggcacatacggcctgctgagacggagagaggactggcctagcagactgcagatgttcttcgccaataaccacgaccaggagttcgacccccctaaggtgtaccctcccgtccccgccgagaagagaaagcccatccgggtcctgagcctgttcgatggcatcgccaccggtctgctggtgctgaaggacctgggcatccaggtggataggtacattgcctccgaggtgtgcgaggactccatcaccgtgggaatggtgcgtcatcagggcaagatcatgtacgtgggcgacgtgcggagcgtgacacagaagcatatccaggagtggggccctttcgacctggtgatcggcggcagcccttgcaatgacctgagcatcgtgaacccagcccggaagggcctgtacgagggaaccggcagactgttcttcgagttttacagactgctgcacgacgcccggcctaaggaaggcgacgaccggcccttcttttggctgttcgagaatgtggtggccatgggagtcagcgacaagcgggatattagccggttcctggagagcaaccccgtgatgatcgatgccaaggaagtgagcgccgcccaccgggccagatacttctggggcaatctgcctggcatgaacagacccctggccagcaccgtgaacgacaagctggagctgcaggagtgcctggagcacggccggatcgccaagttcagcaaggtgagaaccatcaccacccgaagcaacagcatcaaacaaggcaaggaccagcactttcctgtgttcatgaacgagaaggaggacatcctgtggtgtaccgagatggagagagtgttcgggttcccagtccactacacagatgtcagcaacatgtctagactggccagacagagactgctgggaagaagctggtccgtccctgtgatcagacacctgttcgcccctctgaaggagtacttcgcctgcgtgagcagcggcaacagcaacgccaacagccggggccccagcttctctagcggcctggtgccactgtccctgagagggagccacatgggccccatggagatctacaaaaccgtgagcgcctggaagcggcagcctgtgcgcgtgctgagcctgtttcggaatatcgataaagtcctgaaaagcctgggattcctggagagcggctctggctccggcggtggcaccctgaagtacgtggaggatgtgacaaacgtggtcagacgggatgtggagaagtggggccccttcgatctggtgtacggcagcacccaacccctgggcagctcttgtgaccggtgccctggctggtacatgtttcagttccaccggatcctgcagtacgccctgccgagacaggagtcccagcggccattcttttggattttcatggacaacttgctgctgaccgaggatgaccaggaaactaccactcggttcctgcagaccgaagccgtgaccctgcaggacgtgagaggccgggactaccagaacgccatgcgggtgtggtccaacatccctggactgaaaagcaagcacgcacctctgacccctaaagaagaggagtacctgcaggcccaggtgcggagcagaagcaagctggacgcccctaaggtggatctgctggtgaagaattgcctcctgcccctgagagagtacttcaagtatttcagccagaatagtctgcccctgggcggcccaagcagcggcgcccctcctcccagcggcggcagcccagccggctccccaacctctaccgaggagggcacctctgagtccgccacccccgagagcggccctggcacctccaccgagcccagcgagggcagcgcacccggcagccctgccggcagccccacctccacagaggagggaaccagcaccgagcccagcgaaggcagcgccccaggcaccagcaccgagcctagtgagggcggctctggcggcggcagcgcccaggagattaaacggatcaacaagatcagaagaagacttgtgaaagacagcaacaccaagaaggccggcaagacaggccccatgaaaaccctgctggttagagtgatgacacccgatctgagagagcggctggaaaacctgagaaagaagcctgaaaatatcccccagcccatcagcaatacatctagagccaacctgaataagctgctgaccgattacaccgaaatgaagaaggcgatcctgcatgtgtactgggaagagttccagaaggaccctgtgggcctgatgagccgggtggcccagcctgccagcaagaagatcgatcagaacaagctgaaacctgagatggacgagaagggcaacctgaccaccgccggctttgcctgctctcagtgtggccagcccctgttcgtgtacaagctggagcaggtgtctgagaagggcaaggcttacaccaactacttcggacggtgcaatgtggccgagcacgaaaagctgatcctgctggcccagctgaagcccgagaaggatagcgacgaagccgtgacatatagcctgggaaagtttgggcagagggccctggatttctacagcattcatgtgaccaaggagtccacccaccccgtgaagcccctggcccagatcgccggaaacagatacgcctccggacctgtgggaaaggccctgagcgacgcatgtatgggcacaatcgcctccttcctgtctaagtaccaggacatcatcatcgaacaccagaaggtggtgaagggcaaccagaagagactggagagcctgcgggagctggccggcaaggaaaacctggaataccctagcgtgaccctgccacctcagcctcacaccaaggagggcgttgatgcctacaacgaagtgatcgcccgggtgcgaatgtgggtgaacctgaacctgtggcagaagctgaagctaagcagagatgatgccaagcctctgctgagactgaagggattcccttcctttcctctggtcgagagacaggccaacgaagtggactggtgggacatggtgtgtaacgtgaagaagctgatcaacgagaaaaaggaggatggcaaggtgttttggcagaatctggctggctacaagagacaggaagccctgagaccatacctgagcagcgaggaagatcggaagaagggaaagaaattcgctcggtaccagctgggcgacctgctgctgcacctggaaaagaagcacggcgaggactggggaaaggtgtacgacgaggcctgggagcggattgacaagaaagtggaaggcctgagcaagcacatcaagctggaagaggaacggagaagcgaggacgcccagagcaaggccgccctgaccgactggctgcgggctaaggccagcttcgtgatcgagggcctgaaggaggccgacaaggacgagttctgcagatgcgagctgaagctgcagaagtggtacggggacctgcggggaaagcccttcgccatcgaagccgagaacagcatcctggacatcagcggcttcagcaagcagtacaactgtgccttcatctggcagaaggacggcgtgaagaagctgaacctgtacctgatcatcaactacttcaagggcggcaagctgcggttcaagaagatcaaacctgaagccttcgaagccaacagattctacaccgtgatcaacaaaaagagcggcgagatcgtgcccatggaggtgaacttcaacttcgacgaccccaacctgatcatcctgcctctggcctttggcaagagacagggcagagaattcatctggaacgacctgctgtccctggaaaccggcagcctgaagctggccaacggaagagtgatcgagaagacactgtacaacagaagaacccggcaggatgagcctgccctgttcgtggccctgaccttcgagcggcgggaggtcctggactcctccaatatcaaaccaatgaacctgatcggcgtggcaagaggcgaaaacatccccgccgtgatcgccctgaccgaccccgagggctgcccactgagccggtttaaggatagcctgggaaacccaacccacatcctgagaatcggcgagagctataaggagaagcagcggaccatccaggccaagaaggaggtggagcagcggagagccggcggctacagccggaagtacgccagcaaagccaagaatctggcagacgatatggtgagaaacaccgctagagatctgctgtactacgccgtgacccaggatgccatgctgatcttcgccaacctgagccggggcttcggccggcagggcaagcggaccttcatggccgagagacagtacacacggatggaggactggctgaccgccaagctggcctacgagggcctgagcaagacctacctgtccaagacactggcccagtacacctccaagacatgcagcaactgtgggtttaccatcaccagcgccgactacgacagggtgctggagaagctgaagaagacagcaacaggctggatgaccacaattaacggcaaggagctgaaggtggagggccagattacctactacaacagatacaagagacagaacgtagtcaaggacctgtccgtcgagctggatagactgagcgaagaatctgtgaacaacgacatctcctcctggacaaagggcagaagcggagaagctctgagcctcctgaagaaaagattctcccatagacccgtgcaggagaagttcgtgtgcctgaactgcggcttcgagacacacgcagccgagcaagccgccctgaacatcgccagatcctggctgttcctgcggagccaggagtacaagaaataccagacaaacaagacaaccggcaacaccgataagagagccttcgtcgagacctggcagtccttttaccggaagaagcttaaggaggtgtggaaacctgccgtgcggtctggcggatctggcggaggctccacaagcatggccgccgccgccctgaggctgcccgcccagggcaccgtgaccttcgaggacgtggccgtgaagttcagccaggaggagtggagcctgctgagcgaggcccagaggtgcctgtaccacgacgtgatgctggagaacctggccctgatcagcagcctgggctgctggtacggcgccaacgacgagacccccagcaagcagaccctgagcatccagcagcagagccccctgaggagccactggaccagccccaagaaaaagagaaaagtctaagctgccttctgcggggcttgccttctggccatgcccttcttctctcccttgcacctgtacctcttggtctttgaataaagcctgagtaggaaggctagcaaaaaaaaaaaaaaaaaaaaaaaaaaaaaaaaaaaaaaaaaaaaaaaaaaaaaaaaaaaaaaaaaaaaaaaaaaaaaaaa

SEQ ID NO: 6650 - RNA, 5797 nt, synthetic construct
  source 1..5797: mol_type = other RNA
aggaaataagagagaaaagaagagtaagaagaaatataagagccaccatggcccctaagaagaagcgtaaagtgagccggatggaacgcctcgtctacgaggtgcggcagaagtgcagaaacatcgaggacatctgcatctcctgcggatctctgaacgtgaccctggagcacccactgttcatcggcggcatgtgccagaactgtaaaaactgttttctggagtgtgcctatcaatacgacgatgacggctaccagagctactgcaccatctgttgcggcggaagagaggtgctgatgtgtggaaataacaactgctgccggtgcttctgcgtggaatgcgtggacctgctggtgggccccggcgccgcccaggccgctattaaggaagatccttggaactgctacatgtgcggccacaagggcacatacggcctgctgagacggagagaggactggcctagcagactgcagatgttcttcgccaataaccacgaccaggagttcgacccccctaaggtgtaccctcccgtccccgccgagaagagaaagcccatccgggtcctgagcctgttcgatggcatcgccaccggtctgctggtgctgaaggacctgggcatccaggtggataggtacattgcctccgaggtgtgcgaggactccatcaccgtgggaatggtgcgtcatcagggcaagatcatgtacgtgggcgacgtgcggagcgtgacacagaagcatatccaggagtggggccctttcgacctggtgatcggcggcagcccttgcaatgacctgagcatcgtgaacccagcccggaagggcctgtacgagggaaccggcagactgttcttcgagttttacagactgctgcacgacgcccggcctaaggaaggcgacgaccggcccttcttttggctgttcgagaatgtggtggccatgggagtcagcgacaagcgggatattagccggttcctggagagcaaccccgtgatgatcgatgccaaggaagtgagcgccgcccaccgggccagatacttctggggcaatctgcctggcatgaacagacccctggccagcaccgtgaacgacaagctggagctgcaggagtgcctggagcacggccggatcgccaagttcagcaaggtgagaaccatcaccacccgaagcaacagcatcaaacaaggcaaggaccagcactttcctgtgttcatgaacgagaaggaggacatcctgtggtgtaccgagatggagagagtgttcgggttcccagtccactacacagatgtcagcaacatgtctagactggccagacagagactgctgggaagaagctggtccgtccctgtgatcagacacctgttcgcccctctgaaggagtacttcgcctgcgtgagcagcggcaacagcaacgccaacagccggggccccagcttctctagcggcctggtgccactgtccctgagagggagccacatgggccccatggagatctacaaaaccgtgagcgcctggaagcggcagcctgtgcgcgtgctgagcctgtttcggaatatcgataaagtcctgaaaagcctgggattcctggagagcggctctggctccggcggtggcaccctgaagtacgtggaggatgtgacaaacgtggtcagacgggatgtggagaagtggggccccttcgatctggtgtacggcagcacccaacccctgggcagctcttgtgaccggtgccctggctggtacatgtttcagttccaccggatcctgcagtacgccctgccgagacaggagtcccagcggccattcttttggattttcatggacaacttgctgctgaccgaggatgaccaggaaactaccactcggttcctgcagaccgaagccgtgaccctgcaggacgtgagaggccgggactaccagaacgccatgcgggtgtggtccaacatccctggactgaaaagcaagcacgcacctctgacccctaaagaagaggagtacctgcaggcccaggtgcggagcagaagcaagctggacgcccctaaggtggatctgctggtgaagaattgcctcctgcccctgagagagtacttcaagtatttcagccagaatagtctgcccctgggcggcccaagcagcggcgcccctcctcccagcggcggcagcccagccggctccccaacctctaccgaggagggcacctctgagtccgccacccccgagagcggccctggcacctccaccgagcccagcgagggcagcgcacccggcagccctgccggcagccccacctccacagaggagggaaccagcaccgagcccagcgaaggcagcgccccaggcaccagcaccgagcctagtgagggcggctctggcggcggcagcgcccaggagattaaacggatcaacaagatcagaagaagacttgtgaaagacagcaacaccaagaaggccggcaagacaggccccatgaaaaccctgctggttagagtgatgacacccgatctgagagagcggctggaaaacctgagaaagaagcctgaaaatatcccccagcccatcagcaatacatctagagccaacctgaataagctgctgaccgattacaccgaaatgaagaaggcgatcctgcatgtgtactgggaagagttccagaaggaccctgtgggcctgatgagccgggtggcccagcctgccagcaagaagatcgatcagaacaagctgaaacctgagatggacgagaagggcaacctgaccaccgccggctttgcctgctctcagtgtggccagcccctgttcgtgtacaagctggagcaggtgtctgagaagggcaaggcttacaccaactacttcggacggtgcaatgtggccgagcacgaaaagctgatcctgctggcccagctgaagcccgagaaggatagcgacgaagccgtgacatatagcctgggaaagtttgggcagagggccctggatttctacagcattcatgtgaccaaggagtccacccaccccgtgaagcccctggcccagatcgccggaaacagatacgcctccggacctgtgggaaaggccctgagcgacgcatgtatgggcacaatcgcctccttcctgtctaagtaccaggacatcatcatcgaacaccagaaggtggtgaagggcaaccagaagagactggagagcctgcgggagctggccggcaaggaaaacctggaataccctagcgtgaccctgccacctcagcctcacaccaaggagggcgttgatgcctacaacgaagtgatcgcccgggtgcgaatgtgggtgaacctgaacctgtggcagaagctgaagctaagcagagatgatgccaagcctctgctgagactgaagggattcccttcctttcctctggtcgagagacaggccaacgaagtggactggtgggacatggtgtgtaacgtgaagaagctgatcaacgagaaaaaggaggatggcaaggtgttttggcagaatctggctggctacaagagacaggaagccctgagaccatacctgagcagcgaggaagatcggaagaagggaaagaaattcgctcggtaccagctgggcgacctgctgctgcacctggaaaagaagcacggcgaggactggggaaaggtgtacgacgaggcctgggagcggattgacaagaaagtggaaggcctgagcaagcacatcaagctggaagaggaacggagaagcgaggacgcccagagcaaggccgccctgaccgactggctgcgggctaaggccagcttcgtgatcgagggcctgaaggaggccgacaaggacgagttctgcagatgcgagctgaagctgcagaagtggtacggggacctgcggggaaagcccttcgccatcgaagccgagaacagcatcctggacatcagcggcttcagcaagcagtacaactgtgccttcatctggcagaaggacggcgtgaagaagctgaacctgtacctgatcatcaactacttcaagggcggcaagctgcggttcaagaagatcaaacctgaagccttcgaagccaacagattctacaccgtgatcaacaaaaagagcggcgagatcgtgcccatggaggtgaacttcaacttcgacgaccccaacctgatcatcctgcctctggcctttggcaagagacagggcagagaattcatctggaacgacctgctgtccctggaaaccggcagcctgaagctggccaacggaagagtgatcgagaagacactgtacaacagaagaacccggcaggatgagcctgccctgttcgtggccctgaccttcgagcggcgggaggtcctggactcctccaatatcaaaccaatgaacctgatcggcgtggcaagaggcgaaaacatccccgccgtgatcgccctgaccgaccccgagggctgcccactgagccggtttaaggatagcctgggaaacccaacccacatcctgagaatcggcgagagctataaggagaagcagcggaccatccaggccaagaaggaggtggagcagcggagagccggcggctacagccggaagtacgccagcaaagccaagaatctggcagacgatatggtgagaaacaccgctagagatctgctgtactacgccgtgacccaggatgccatgctgatcttcgccaacctgagccggggcttcggccggcagggcaagcggaccttcatggccgagagacagtacacacggatggaggactggctgaccgccaagctggcctacgagggcctgagcaagacctacctgtccaagacactggcccagtacacctccaagacatgcagcaactgtgggtttaccatcaccagcgccgactacgacagggtgctggagaagctgaagaagacagcaacaggctggatgaccacaattaacggcaaggagctgaaggtggagggccagattacctactacaacagatacaagagacagaacgtagtcaaggacctgtccgtcgagctggatagactgagcgaagaatctgtgaacaacgacatctcctcctggacaaagggcagaagcggagaagctctgagcctcctgaagaaaagattctcccatagacccgtgcaggagaagttcgtgtgcctgaactgcggcttcgagacacacgcagccgagcaagccgccctgaacatcgccagatcctggctgttcctgcggagccaggagtacaagaaataccagacaaacaagacaaccggcaacaccgataagagagccttcgtcgagacctggcagtccttttaccggaagaagcttaaggaggtgtggaaacctgccgtgcggtctggcggatctggcggaggctccacaagcgagcccggcgccgtgagcttcgccgacgtggccgtgtacttctgcagggaggagtggggctgcctgaggcccgcccagagggccctgtacagggacgtgatgagggagacctacggccacctgagcgccctgggcatcggcggcaacaagcccgccctgatcagctgggtggaggaggaggccgagctgtgggaccccgccgcccaggaccccgaggtggccaagtgccagaccgaggccgacaccagccccaagaaaaagagaaaagtctaagctgccttctgcggggcttgccttctggccatgcccttcttctctcccttgcacctgtacctcttggtctttgaataaagcctgagtaggaaggctagcaaaaaaaaaaaaaaaaaaaaaaaaaaaaaaaaaaaaaaaaaaaaaaaaaaaaaaaaaaaaaaaaaaaaaaaaaaaaaaaa

SEQ ID NO: 6651 - RNA, 5797 nt, synthetic construct
  source 1..5797: mol_type = other RNA
aggaaataagagagaaaagaagagtaagaagaaatataagagccaccatggcccctaagaagaagcgtaaagtgagccggatggaacgcctcgtctacgaggtgcggcagaagtgcagaaacatcgaggacatctgcatctcctgcggatctctgaacgtgaccctggagcacccactgttcatcggcggcatgtgccagaactgtaaaaactgttttctggagtgtgcctatcaatacgacgatgacggctaccagagctactgcaccatctgttgcggcggaagagaggtgctgatgtgtggaaataacaactgctgccggtgcttctgcgtggaatgcgtggacctgctggtgggccccggcgccgcccaggccgctattaaggaagatccttggaactgctacatgtgcggccacaagggcacatacggcctgctgagacggagagaggactggcctagcagactgcagatgttcttcgccaataaccacgaccaggagttcgacccccctaaggtgtaccctcccgtccccgccgagaagagaaagcccatccgggtcctgagcctgttcgatggcatcgccaccggtctgctggtgctgaaggacctgggcatccaggtggataggtacattgcctccgaggtgtgcgaggactccatcaccgtgggaatggtgcgtcatcagggcaagatcatgtacgtgggcgacgtgcggagcgtgacacagaagcatatccaggagtggggccctttcgacctggtgatcggcggcagcccttgcaatgacctgagcatcgtgaacccagcccggaagggcctgtacgagggaaccggcagactgttcttcgagttttacagactgctgcacgacgcccggcctaaggaaggcgacgaccggcccttcttttggctgttcgagaatgtggtggccatgggagtcagcgacaagcgggatattagccggttcctggagagcaaccccgtgatgatcgatgccaaggaagtgagcgccgcccaccgggccagatacttctggggcaatctgcctggcatgaacagacccctggccagcaccgtgaacgacaagctggagctgcaggagtgcctggagcacggccggatcgccaagttcagcaaggtgagaaccatcaccacccgaagcaacagcatcaaacaaggcaaggaccagcactttcctgtgttcatgaacgagaaggaggacatcctgtggtgtaccgagatggagagagtgttcgggttcccagtccactacacagatgtcagcaacatgtctagactggccagacagagactgctgggaagaagctggtccgtccctgtgatcagacacctgttcgcccctctgaaggagtacttcgcctgcgtgagcagcggcaacagcaacgccaacagccggggccccagcttctctagcggcctggtgccactgtccctgagagggagccacatgggccccatggagatctacaaaaccgtgagcgcctggaagcggcagcctgtgcgcgtgctgagcctgtttcggaatatcgataaagtcctgaaaagcctgggattcctggagagcggctctggctccggcggtggcaccctgaagtacgtggaggatgtgacaaacgtggtcagacgggatgtggagaagtggggccccttcgatctggtgtacggcagcacccaacccctgggcagctcttgtgaccggtgccctggctggtacatgtttcagttccaccggatcctgcagtacgccctgccgagacaggagtcccagcggccattcttttggattttcatggacaacttgctgctgaccgaggatgaccaggaaactaccactcggttcctgcagaccgaagccgtgaccctgcaggacgtgagaggccgggactaccagaacgccatgcgggtgtggtccaacatccctggactgaaaagcaagcacgcacctctgacccctaaagaagaggagtacctgcaggcccaggtgcggagcagaagcaagctggacgcccctaaggtggatctgctggtgaagaattgcctcctgcccctgagagagtacttcaagtatttcagccagaatagtctgcccctgggcggcccaagcagcggcgcccctcctcccagcggcggcagcccagccggctccccaacctctaccgaggagggcacctctgagtccgccacccccgagagcggccctggcacctccaccgagcccagcgagggcagcgcacccggcagccctgccggcagccccacctccacagaggagggaaccagcaccgagcccagcgaaggcagcgccccaggcaccagcaccgagcctagtgagggcggctctggcggcggcagcgcccaggagattaaacggatcaacaagatcagaagaagacttgtgaaagacagcaacaccaagaaggccggcaagacaggccccatgaaaaccctgctggttagagtgatgacacccgatctgagagagcggctggaaaacctgagaaagaagcctgaaaatatcccccagcccatcagcaatacatctagagccaacctgaataagctgctgaccgattacaccgaaatgaagaaggcgatcctgcatgtgtactgggaagagttccagaaggaccctgtgggcctgatgagccgggtggcccagcctgccagcaagaagatcgatcagaacaagctgaaacctgagatggacgagaagggcaacctgaccaccgccggctttgcctgctctcagtgtggccagcccctgttcgtgtacaagctggagcaggtgtctgagaagggcaaggcttacaccaactacttcggacggtgcaatgtggccgagcacgaaaagctgatcctgctggcccagctgaagcccgagaaggatagcgacgaagccgtgacatatagcctgggaaagtttgggcagagggccctggatttctacagcattcatgtgaccaaggagtccacccaccccgtgaagcccctggcccagatcgccggaaacagatacgcctccggacctgtgggaaaggccctgagcgacgcatgtatgggcacaatcgcctccttcctgtctaagtaccaggacatcatcatcgaacaccagaaggtggtgaagggcaaccagaagagactggagagcctgcgggagctggccggcaaggaaaacctggaataccctagcgtgaccctgccacctcagcctcacaccaaggagggcgttgatgcctacaacgaagtgatcgcccgggtgcgaatgtgggtgaacctgaacctgtggcagaagctgaagctaagcagagatgatgccaagcctctgctgagactgaagggattcccttcctttcctctggtcgagagacaggccaacgaagtggactggtgggacatggtgtgtaacgtgaagaagctgatcaacgagaaaaaggaggatggcaaggtgttttggcagaatctggctggctacaagagacaggaagccctgagaccatacctgagcagcgaggaagatcggaagaagggaaagaaattcgctcggtaccagctgggcgacctgctgctgcacctggaaaagaagcacggcgaggactggggaaaggtgtacgacgaggcctgggagcggattgacaagaaagtggaaggcctgagcaagcacatcaagctggaagaggaacggagaagcgaggacgcccagagcaaggccgccctgaccgactggctgcgggctaaggccagcttcgtgatcgagggcctgaaggaggccgacaaggacgagttctgcagatgcgagctgaagctgcagaagtggtacggggacctgcggggaaagcccttcgccatcgaagccgagaacagcatcctggacatcagcggcttcagcaagcagtacaactgtgccttcatctggcagaaggacggcgtgaagaagctgaacctgtacctgatcatcaactacttcaagggcggcaagctgcggttcaagaagatcaaacctgaagccttcgaagccaacagattctacaccgtgatcaacaaaaagagcggcgagatcgtgcccatggaggtgaacttcaacttcgacgaccccaacctgatcatcctgcctctggcctttggcaagagacagggcagagaattcatctggaacgacctgctgtccctggaaaccggcagcctgaagctggccaacggaagagtgatcgagaagacactgtacaacagaagaacccggcaggatgagcctgccctgttcgtggccctgaccttcgagcggcgggaggtcctggactcctccaatatcaaaccaatgaacctgatcggcgtggcaagaggcgaaaacatccccgccgtgatcgccctgaccgaccccgagggctgcccactgagccggtttaaggatagcctgggaaacccaacccacatcctgagaatcggcgagagctataaggagaagcagcggaccatccaggccaagaaggaggtggagcagcggagagccggcggctacagccggaagtacgccagcaaagccaagaatctggcagacgatatggtgagaaacaccgctagagatctgctgtactacgccgtgacccaggatgccatgctgatcttcgccaacctgagccggggcttcggccggcagggcaagcggaccttcatggccgagagacagtacacacggatggaggactggctgaccgccaagctggcctacgagggcctgagcaagacctacctgtccaagacactggcccagtacacctccaagacatgcagcaactgtgggtttaccatcaccagcgccgactacgacagggtgctggagaagctgaagaagacagcaacaggctggatgaccacaattaacggcaaggagctgaaggtggagggccagattacctactacaacagatacaagagacagaacgtagtcaaggacctgtccgtcgagctggatagactgagcgaagaatctgtgaacaacgacatctcctcctggacaaagggcagaagcggagaagctctgagcctcctgaagaaaagattctcccatagacccgtgcaggagaagttcgtgtgcctgaactgcggcttcgagacacacgcagccgagcaagccgccctgaacatcgccagatcctggctgttcctgcggagccaggagtacaagaaataccagacaaacaagacaaccggcaacaccgataagagagccttcgtcgagacctggcagtccttttaccggaagaagcttaaggaggtgtggaaacctgccgtgcggtctggcggatctggcggaggctccacaagcagctacggcagcctgagcttcgaggacgtgaccgtgggcttcagccaggaggagtggcagcacctggaccccgcccagaggaccctgtacagggacgtgatgctggagaactacagccacctggtggccgtgggctgctgcgtgcccaagcccgacgtgatcttcaggctggagcagggccagcagccctggctgatcgaggaggagagcctggaccagagctgccccgaggtgtgcagggtgaccagccccaagaaaaagagaaaagtctaagctgccttctgcggggcttgccttctggccatgcccttcttctctcccttgcacctgtacctcttggtctttgaataaagcctgagtaggaaggctagcaaaaaaaaaaaaaaaaaaaaaaaaaaaaaaaaaaaaaaaaaaaaaaaaaaaaaaaaaaaaaaaaaaaaaaaaaaaaaaaa

SEQ ID NO: 6652 - RNA, 5797 nt, synthetic construct
  source 1..5797: mol_type = other RNA
aggaaataagagagaaaagaagagtaagaagaaatataagagccaccatggcccctaagaagaagcgtaaagtgagccggatggaacgcctcgtctacgaggtgcggcagaagtgcagaaacatcgaggacatctgcatctcctgcggatctctgaacgtgaccctggagcacccactgttcatcggcggcatgtgccagaactgtaaaaactgttttctggagtgtgcctatcaatacgacgatgacggctaccagagctactgcaccatctgttgcggcggaagagaggtgctgatgtgtggaaataacaactgctgccggtgcttctgcgtggaatgcgtggacctgctggtgggccccggcgccgcccaggccgctattaaggaagatccttggaactgctacatgtgcggccacaagggcacatacggcctgctgagacggagagaggactggcctagcagactgcagatgttcttcgccaataaccacgaccaggagttcgacccccctaaggtgtaccctcccgtccccgccgagaagagaaagcccatccgggtcctgagcctgttcgatggcatcgccaccggtctgctggtgctgaaggacctgggcatccaggtggataggtacattgcctccgaggtgtgcgaggactccatcaccgtgggaatggtgcgtcatcagggcaagatcatgtacgtgggcgacgtgcggagcgtgacacagaagcatatccaggagtggggccctttcgacctggtgatcggcggcagcccttgcaatgacctgagcatcgtgaacccagcccggaagggcctgtacgagggaaccggcagactgttcttcgagttttacagactgctgcacgacgcccggcctaaggaaggcgacgaccggcccttcttttggctgttcgagaatgtggtggccatgggagtcagcgacaagcgggatattagccggttcctggagagcaaccccgtgatgatcgatgccaaggaagtgagcgccgcccaccgggccagatacttctggggcaatctgcctggcatgaacagacccctggccagcaccgtgaacgacaagctggagctgcaggagtgcctggagcacggccggatcgccaagttcagcaaggtgagaaccatcaccacccgaagcaacagcatcaaacaaggcaaggaccagcactttcctgtgttcatgaacgagaaggaggacatcctgtggtgtaccgagatggagagagtgttcgggttcccagtccactacacagatgtcagcaacatgtctagactggccagacagagactgctgggaagaagctggtccgtccctgtgatcagacacctgttcgcccctctgaaggagtacttcgcctgcgtgagcagcggcaacagcaacgccaacagccggggccccagcttctctagcggcctggtgccactgtccctgagagggagccacatgggccccatggagatctacaaaaccgtgagcgcctggaagcggcagcctgtgcgcgtgctgagcctgtttcggaatatcgataaagtcctgaaaagcctgggattcctggagagcggctctggctccggcggtggcaccctgaagtacgtggaggatgtgacaaacgtggtcagacgggatgtggagaagtggggccccttcgatctggtgtacggcagcacccaacccctgggcagctcttgtgaccggtgccctggctggtacatgtttcagttccaccggatcctgcagtacgccctgccgagacaggagtcccagcggccattcttttggattttcatggacaacttgctgctgaccgaggatgaccaggaaactaccactcggttcctgcagaccgaagccgtgaccctgcaggacgtgagaggccgggactaccagaacgccatgcgggtgtggtccaacatccctggactgaaaagcaagcacgcacctctgacccctaaagaagaggagtacctgcaggcccaggtgcggagcagaagcaagctggacgcccctaaggtggatctgctggtgaagaattgcctcctgcccctgagagagtacttcaagtatttcagccagaatagtctgcccctgggcggcccaagcagcggcgcccctcctcccagcggcggcagcccagccggctccccaacctctaccgaggagggcacctctgagtccgccacccccgagagcggccctggcacctccaccgagcccagcgagggcagcgcacccggcagccctgccggcagccccacctccacagaggagggaaccagcaccgagcccagcgaaggcagcgccccaggcaccagcaccgagcctagtgagggcggctctggcggcggcagcgcccaggagattaaacggatcaacaagatcagaagaagacttgtgaaagacagcaacaccaagaaggccggcaagacaggccccatgaaaaccctgctggttagagtgatgacacccgatctgagagagcggctggaaaacctgagaaagaagcctgaaaatatcccccagcccatcagcaatacatctagagccaacctgaataagctgctgaccgattacaccgaaatgaagaaggcgatcctgcatgtgtactgggaagagttccagaaggaccctgtgggcctgatgagccgggtggcccagcctgccagcaagaagatcgatcagaacaagctgaaacctgagatggacgagaagggcaacctgaccaccgccggctttgcctgctctcagtgtggccagcccctgttcgtgtacaagctggagcaggtgtctgagaagggcaaggcttacaccaactacttcggacggtgcaatgtggccgagcacgaaaagctgatcctgctggcccagctgaagcccgagaaggatagcgacgaagccgtgacatatagcctgggaaagtttgggcagagggccctggatttctacagcattcatgtgaccaaggagtccacccaccccgtgaagcccctggcccagatcgccggaaacagatacgcctccggacctgtgggaaaggccctgagcgacgcatgtatgggcacaatcgcctccttcctgtctaagtaccaggacatcatcatcgaacaccagaaggtggtgaagggcaaccagaagagactggagagcctgcgggagctggccggcaaggaaaacctggaataccctagcgtgaccctgccacctcagcctcacaccaaggagggcgttgatgcctacaacgaagtgatcgcccgggtgcgaatgtgggtgaacctgaacctgtggcagaagctgaagctaagcagagatgatgccaagcctctgctgagactgaagggattcccttcctttcctctggtcgagagacaggccaacgaagtggactggtgggacatggtgtgtaacgtgaagaagctgatcaacgagaaaaaggaggatggcaaggtgttttggcagaatctggctggctacaagagacaggaagccctgagaccatacctgagcagcgaggaagatcggaagaagggaaagaaattcgctcggtaccagctgggcgacctgctgctgcacctggaaaagaagcacggcgaggactggggaaaggtgtacgacgaggcctgggagcggattgacaagaaagtggaaggcctgagcaagcacatcaagctggaagaggaacggagaagcgaggacgcccagagcaaggccgccctgaccgactggctgcgggctaaggccagcttcgtgatcgagggcctgaaggaggccgacaaggacgagttctgcagatgcgagctgaagctgcagaagtggtacggggacctgcggggaaagcccttcgccatcgaagccgagaacagcatcctggacatcagcggcttcagcaagcagtacaactgtgccttcatctggcagaaggacggcgtgaagaagctgaacctgtacctgatcatcaactacttcaagggcggcaagctgcggttcaagaagatcaaacctgaagccttcgaagccaacagattctacaccgtgatcaacaaaaagagcggcgagatcgtgcccatggaggtgaacttcaacttcgacgaccccaacctgatcatcctgcctctggcctttggcaagagacagggcagagaattcatctggaacgacctgctgtccctggaaaccggcagcctgaagctggccaacggaagagtgatcgagaagacactgtacaacagaagaacccggcaggatgagcctgccctgttcgtggccctgaccttcgagcggcgggaggtcctggactcctccaatatcaaaccaatgaacctgatcggcgtggcaagaggcgaaaacatccccgccgtgatcgccctgaccgaccccgagggctgcccactgagccggtttaaggatagcctgggaaacccaacccacatcctgagaatcggcgagagctataaggagaagcagcggaccatccaggccaagaaggaggtggagcagcggagagccggcggctacagccggaagtacgccagcaaagccaagaatctggcagacgatatggtgagaaacaccgctagagatctgctgtactacgccgtgacccaggatgccatgctgatcttcgccaacctgagccggggcttcggccggcagggcaagcggaccttcatggccgagagacagtacacacggatggaggactggctgaccgccaagctggcctacgagggcctgagcaagacctacctgtccaagacactggcccagtacacctccaagacatgcagcaactgtgggtttaccatcaccagcgccgactacgacagggtgctggagaagctgaagaagacagcaacaggctggatgaccacaattaacggcaaggagctgaaggtggagggccagattacctactacaacagatacaagagacagaacgtagtcaaggacctgtccgtcgagctggatagactgagcgaagaatctgtgaacaacgacatctcctcctggacaaagggcagaagcggagaagctctgagcctcctgaagaaaagattctcccatagacccgtgcaggagaagttcgtgtgcctgaactgcggcttcgagacacacgcagccgagcaagccgccctgaacatcgccagatcctggctgttcctgcggagccaggagtacaagaaataccagacaaacaagacaaccggcaacaccgataagagagccttcgtcgagacctggcagtccttttaccggaagaagcttaaggaggtgtggaaacctgccgtgcggtctggcggatctggcggaggctccacaagcagcctggagcccgacagcttcggcgacgtggccgtgctgttcagccaggaggagtgggccaggctggcccccgcccagagggagctgtacagggacgtgatgctggagacctacagccacctggtgagcctgggcctggccgtgagcaagcccgacgtgatcagcttcctggagcagggcaaggagccctggctgggcgagaaggccgccgccggcggcctgggccccgagctggagagcaggaccagccccaagaaaaagagaaaagtctaagctgccttctgcggggcttgccttctggccatgcccttcttctctcccttgcacctgtacctcttggtctttgaataaagcctgagtaggaaggctagcaaaaaaaaaaaaaaaaaaaaaaaaaaaaaaaaaaaaaaaaaaaaaaaaaaaaaaaaaaaaaaaaaaaaaaaaaaaaaaaa

SEQ ID NO: 6653 - RNA, 5797 nt, synthetic construct
  source 1..5797: mol_type = other RNA
aggaaataagagagaaaagaagagtaagaagaaatataagagccaccatggcccctaagaagaagcgtaaagtgagccggatggaacgcctcgtctacgaggtgcggcagaagtgcagaaacatcgaggacatctgcatctcctgcggatctctgaacgtgaccctggagcacccactgttcatcggcggcatgtgccagaactgtaaaaactgttttctggagtgtgcctatcaatacgacgatgacggctaccagagctactgcaccatctgttgcggcggaagagaggtgctgatgtgtggaaataacaactgctgccggtgcttctgcgtggaatgcgtggacctgctggtgggccccggcgccgcccaggccgctattaaggaagatccttggaactgctacatgtgcggccacaagggcacatacggcctgctgagacggagagaggactggcctagcagactgcagatgttcttcgccaataaccacgaccaggagttcgacccccctaaggtgtaccctcccgtccccgccgagaagagaaagcccatccgggtcctgagcctgttcgatggcatcgccaccggtctgctggtgctgaaggacctgggcatccaggtggataggtacattgcctccgaggtgtgcgaggactccatcaccgtgggaatggtgcgtcatcagggcaagatcatgtacgtgggcgacgtgcggagcgtgacacagaagcatatccaggagtggggccctttcgacctggtgatcggcggcagcccttgcaatgacctgagcatcgtgaacccagcccggaagggcctgtacgagggaaccggcagactgttcttcgagttttacagactgctgcacgacgcccggcctaaggaaggcgacgaccggcccttcttttggctgttcgagaatgtggtggccatgggagtcagcgacaagcgggatattagccggttcctggagagcaaccccgtgatgatcgatgccaaggaagtgagcgccgcccaccgggccagatacttctggggcaatctgcctggcatgaacagacccctggccagcaccgtgaacgacaagctggagctgcaggagtgcctggagcacggccggatcgccaagttcagcaaggtgagaaccatcaccacccgaagcaacagcatcaaacaaggcaaggaccagcactttcctgtgttcatgaacgagaaggaggacatcctgtggtgtaccgagatggagagagtgttcgggttcccagtccactacacagatgtcagcaacatgtctagactggccagacagagactgctgggaagaagctggtccgtccctgtgatcagacacctgttcgcccctctgaaggagtacttcgcctgcgtgagcagcggcaacagcaacgccaacagccggggccccagcttctctagcggcctggtgccactgtccctgagagggagccacatgggccccatggagatctacaaaaccgtgagcgcctggaagcggcagcctgtgcgcgtgctgagcctgtttcggaatatcgataaagtcctgaaaagcctgggattcctggagagcggctctggctccggcggtggcaccctgaagtacgtggaggatgtgacaaacgtggtcagacgggatgtggagaagtggggccccttcgatctggtgtacggcagcacccaacccctgggcagctcttgtgaccggtgccctggctggtacatgtttcagttccaccggatcctgcagtacgccctgccgagacaggagtcccagcggccattcttttggattttcatggacaacttgctgctgaccgaggatgaccaggaaactaccactcggttcctgcagaccgaagccgtgaccctgcaggacgtgagaggccgggactaccagaacgccatgcgggtgtggtccaacatccctggactgaaaagcaagcacgcacctctgacccctaaagaagaggagtacctgcaggcccaggtgcggagcagaagcaagctggacgcccctaaggtggatctgctggtgaagaattgcctcctgcccctgagagagtacttcaagtatttcagccagaatagtctgcccctgggcggcccaagcagcggcgcccctcctcccagcggcggcagcccagccggctccccaacctctaccgaggagggcacctctgagtccgccacccccgagagcggccctggcacctccaccgagcccagcgagggcagcgcacccggcagccctgccggcagccccacctccacagaggagggaaccagcaccgagcccagcgaaggcagcgccccaggcaccagcaccgagcctagtgagggcggctctggcggcggcagcgcccaggagattaaacggatcaacaagatcagaagaagacttgtgaaagacagcaacaccaagaaggccggcaagacaggccccatgaaaaccctgctggttagagtgatgacacccgatctgagagagcggctggaaaacctgagaaagaagcctgaaaatatcccccagcccatcagcaatacatctagagccaacctgaataagctgctgaccgattacaccgaaatgaagaaggcgatcctgcatgtgtactgggaagagttccagaaggaccctgtgggcctgatgagccgggtggcccagcctgccagcaagaagatcgatcagaacaagctgaaacctgagatggacgagaagggcaacctgaccaccgccggctttgcctgctctcagtgtggccagcccctgttcgtgtacaagctggagcaggtgtctgagaagggcaaggcttacaccaactacttcggacggtgcaatgtggccgagcacgaaaagctgatcctgctggcccagctgaagcccgagaaggatagcgacgaagccgtgacatatagcctgggaaagtttgggcagagggccctggatttctacagcattcatgtgaccaaggagtccacccaccccgtgaagcccctggcccagatcgccggaaacagatacgcctccggacctgtgggaaaggccctgagcgacgcatgtatgggcacaatcgcctccttcctgtctaagtaccaggacatcatcatcgaacaccagaaggtggtgaagggcaaccagaagagactggagagcctgcgggagctggccggcaaggaaaacctggaataccctagcgtgaccctgccacctcagcctcacaccaaggagggcgttgatgcctacaacgaagtgatcgcccgggtgcgaatgtgggtgaacctgaacctgtggcagaagctgaagctaagcagagatgatgccaagcctctgctgagactgaagggattcccttcctttcctctggtcgagagacaggccaacgaagtggactggtgggacatggtgtgtaacgtgaagaagctgatcaacgagaaaaaggaggatggcaaggtgttttggcagaatctggctggctacaagagacaggaagccctgagaccatacctgagcagcgaggaagatcggaagaagggaaagaaattcgctcggtaccagctgggcgacctgctgctgcacctggaaaagaagcacggcgaggactggggaaaggtgtacgacgaggcctgggagcggattgacaagaaagtggaaggcctgagcaagcacatcaagctggaagaggaacggagaagcgaggacgcccagagcaaggccgccctgaccgactggctgcgggctaaggccagcttcgtgatcgagggcctgaaggaggccgacaaggacgagttctgcagatgcgagctgaagctgcagaagtggtacggggacctgcggggaaagcccttcgccatcgaagccgagaacagcatcctggacatcagcggcttcagcaagcagtacaactgtgccttcatctggcagaaggacggcgtgaagaagctgaacctgtacctgatcatcaactacttcaagggcggcaagctgcggttcaagaagatcaaacctgaagccttcgaagccaacagattctacaccgtgatcaacaaaaagagcggcgagatcgtgcccatggaggtgaacttcaacttcgacgaccccaacctgatcatcctgcctctggcctttggcaagagacagggcagagaattcatctggaacgacctgctgtccctggaaaccggcagcctgaagctggccaacggaagagtgatcgagaagacactgtacaacagaagaacccggcaggatgagcctgccctgttcgtggccctgaccttcgagcggcgggaggtcctggactcctccaatatcaaaccaatgaacctgatcggcgtggcaagaggcgaaaacatccccgccgtgatcgccctgaccgaccccgagggctgcccactgagccggtttaaggatagcctgggaaacccaacccacatcctgagaatcggcgagagctataaggagaagcagcggaccatccaggccaagaaggaggtggagcagcggagagccggcggctacagccggaagtacgccagcaaagccaagaatctggcagacgatatggtgagaaacaccgctagagatctgctgtactacgccgtgacccaggatgccatgctgatcttcgccaacctgagccggggcttcggccggcagggcaagcggaccttcatggccgagagacagtacacacggatggaggactggctgaccgccaagctggcctacgagggcctgagcaagacctacctgtccaagacactggcccagtacacctccaagacatgcagcaactgtgggtttaccatcaccagcgccgactacgacagggtgctggagaagctgaagaagacagcaacaggctggatgaccacaattaacggcaaggagctgaaggtggagggccagattacctactacaacagatacaagagacagaacgtagtcaaggacctgtccgtcgagctggatagactgagcgaagaatctgtgaacaacgacatctcctcctggacaaagggcagaagcggagaagctctgagcctcctgaagaaaagattctcccatagacccgtgcaggagaagttcgtgtgcctgaactgcggcttcgagacacacgcagccgagcaagccgccctgaacatcgccagatcctggctgttcctgcggagccaggagtacaagaaataccagacaaacaagacaaccggcaacaccgataagagagccttcgtcgagacctggcagtccttttaccggaagaagcttaaggaggtgtggaaacctgccgtgcggtctggcggatctggcggaggctccacaagcgcccacgacctggtggtgttcagggacgtgagcgtggacttcagccaggaggagtgggagtgcctgaacagctaccagaggaacctgtacagggacgtgatcctggagaactacagcaacctggtgagcctggccggctgcagcatcagcaagcccgacgtgatcaccctgctggagcagggcaaggagccctggatggtggtgaggaacgagaagaggaggtggaacctggacctggagagcaccagccccaagaaaaagagaaaagtctaagctgccttctgcggggcttgccttctggccatgcccttcttctctcccttgcacctgtacctcttggtctttgaataaagcctgagtaggaaggctagcaaaaaaaaaaaaaaaaaaaaaaaaaaaaaaaaaaaaaaaaaaaaaaaaaaaaaaaaaaaaaaaaaaaaaaaaaaaaaaaa

SEQ ID NO: 6654 - RNA, 5797 nt, synthetic construct
  source 1..5797: mol_type = other RNA
aggaaataagagagaaaagaagagtaagaagaaatataagagccaccatggcccctaagaagaagcgtaaagtgagccggatggaacgcctcgtctacgaggtgcggcagaagtgcagaaacatcgaggacatctgcatctcctgcggatctctgaacgtgaccctggagcacccactgttcatcggcggcatgtgccagaactgtaaaaactgttttctggagtgtgcctatcaatacgacgatgacggctaccagagctactgcaccatctgttgcggcggaagagaggtgctgatgtgtggaaataacaactgctgccggtgcttctgcgtggaatgcgtggacctgctggtgggccccggcgccgcccaggccgctattaaggaagatccttggaactgctacatgtgcggccacaagggcacatacggcctgctgagacggagagaggactggcctagcagactgcagatgttcttcgccaataaccacgaccaggagttcgacccccctaaggtgtaccctcccgtccccgccgagaagagaaagcccatccgggtcctgagcctgttcgatggcatcgccaccggtctgctggtgctgaaggacctgggcatccaggtggataggtacattgcctccgaggtgtgcgaggactccatcaccgtgggaatggtgcgtcatcagggcaagatcatgtacgtgggcgacgtgcggagcgtgacacagaagcatatccaggagtggggccctttcgacctggtgatcggcggcagcccttgcaatgacctgagcatcgtgaacccagcccggaagggcctgtacgagggaaccggcagactgttcttcgagttttacagactgctgcacgacgcccggcctaaggaaggcgacgaccggcccttcttttggctgttcgagaatgtggtggccatgggagtcagcgacaagcgggatattagccggttcctggagagcaaccccgtgatgatcgatgccaaggaagtgagcgccgcccaccgggccagatacttctggggcaatctgcctggcatgaacagacccctggccagcaccgtgaacgacaagctggagctgcaggagtgcctggagcacggccggatcgccaagttcagcaaggtgagaaccatcaccacccgaagcaacagcatcaaacaaggcaaggaccagcactttcctgtgttcatgaacgagaaggaggacatcctgtggtgtaccgagatggagagagtgttcgggttcccagtccactacacagatgtcagcaacatgtctagactggccagacagagactgctgggaagaagctggtccgtccctgtgatcagacacctgttcgcccctctgaaggagtacttcgcctgcgtgagcagcggcaacagcaacgccaacagccggggccccagcttctctagcggcctggtgccactgtccctgagagggagccacatgggccccatggagatctacaaaaccgtgagcgcctggaagcggcagcctgtgcgcgtgctgagcctgtttcggaatatcgataaagtcctgaaaagcctgggattcctggagagcggctctggctccggcggtggcaccctgaagtacgtggaggatgtgacaaacgtggtcagacgggatgtggagaagtggggccccttcgatctggtgtacggcagcacccaacccctgggcagctcttgtgaccggtgccctggctggtacatgtttcagttccaccggatcctgcagtacgccctgccgagacaggagtcccagcggccattcttttggattttcatggacaacttgctgctgaccgaggatgaccaggaaactaccactcggttcctgcagaccgaagccgtgaccctgcaggacgtgagaggccgggactaccagaacgccatgcgggtgtggtccaacatccctggactgaaaagcaagcacgcacctctgacccctaaagaagaggagtacctgcaggcccaggtgcggagcagaagcaagctggacgcccctaaggtggatctgctggtgaagaattgcctcctgcccctgagagagtacttcaagtatttcagccagaatagtctgcccctgggcggcccaagcagcggcgcccctcctcccagcggcggcagcccagccggctccccaacctctaccgaggagggcacctctgagtccgccacccccgagagcggccctggcacctccaccgagcccagcgagggcagcgcacccggcagccctgccggcagccccacctccacagaggagggaaccagcaccgagcccagcgaaggcagcgccccaggcaccagcaccgagcctagtgagggcggctctggcggcggcagcgcccaggagattaaacggatcaacaagatcagaagaagacttgtgaaagacagcaacaccaagaaggccggcaagacaggccccatgaaaaccctgctggttagagtgatgacacccgatctgagagagcggctggaaaacctgagaaagaagcctgaaaatatcccccagcccatcagcaatacatctagagccaacctgaataagctgctgaccgattacaccgaaatgaagaaggcgatcctgcatgtgtactgggaagagttccagaaggaccctgtgggcctgatgagccgggtggcccagcctgccagcaagaagatcgatcagaacaagctgaaacctgagatggacgagaagggcaacctgaccaccgccggctttgcctgctctcagtgtggccagcccctgttcgtgtacaagctggagcaggtgtctgagaagggcaaggcttacaccaactacttcggacggtgcaatgtggccgagcacgaaaagctgatcctgctggcccagctgaagcccgagaaggatagcgacgaagccgtgacatatagcctgggaaagtttgggcagagggccctggatttctacagcattcatgtgaccaaggagtccacccaccccgtgaagcccctggcccagatcgccggaaacagatacgcctccggacctgtgggaaaggccctgagcgacgcatgtatgggcacaatcgcctccttcctgtctaagtaccaggacatcatcatcgaacaccagaaggtggtgaagggcaaccagaagagactggagagcctgcgggagctggccggcaaggaaaacctggaataccctagcgtgaccctgccacctcagcctcacaccaaggagggcgttgatgcctacaacgaagtgatcgcccgggtgcgaatgtgggtgaacctgaacctgtggcagaagctgaagctaagcagagatgatgccaagcctctgctgagactgaagggattcccttcctttcctctggtcgagagacaggccaacgaagtggactggtgggacatggtgtgtaacgtgaagaagctgatcaacgagaaaaaggaggatggcaaggtgttttggcagaatctggctggctacaagagacaggaagccctgagaccatacctgagcagcgaggaagatcggaagaagggaaagaaattcgctcggtaccagctgggcgacctgctgctgcacctggaaaagaagcacggcgaggactggggaaaggtgtacgacgaggcctgggagcggattgacaagaaagtggaaggcctgagcaagcacatcaagctggaagaggaacggagaagcgaggacgcccagagcaaggccgccctgaccgactggctgcgggctaaggccagcttcgtgatcgagggcctgaaggaggccgacaaggacgagttctgcagatgcgagctgaagctgcagaagtggtacggggacctgcggggaaagcccttcgccatcgaagccgagaacagcatcctggacatcagcggcttcagcaagcagtacaactgtgccttcatctggcagaaggacggcgtgaagaagctgaacctgtacctgatcatcaactacttcaagggcggcaagctgcggttcaagaagatcaaacctgaagccttcgaagccaacagattctacaccgtgatcaacaaaaagagcggcgagatcgtgcccatggaggtgaacttcaacttcgacgaccccaacctgatcatcctgcctctggcctttggcaagagacagggcagagaattcatctggaacgacctgctgtccctggaaaccggcagcctgaagctggccaacggaagagtgatcgagaagacactgtacaacagaagaacccggcaggatgagcctgccctgttcgtggccctgaccttcgagcggcgggaggtcctggactcctccaatatcaaaccaatgaacctgatcggcgtggcaagaggcgaaaacatccccgccgtgatcgccctgaccgaccccgagggctgcccactgagccggtttaaggatagcctgggaaacccaacccacatcctgagaatcggcgagagctataaggagaagcagcggaccatccaggccaagaaggaggtggagcagcggagagccggcggctacagccggaagtacgccagcaaagccaagaatctggcagacgatatggtgagaaacaccgctagagatctgctgtactacgccgtgacccaggatgccatgctgatcttcgccaacctgagccggggcttcggccggcagggcaagcggaccttcatggccgagagacagtacacacggatggaggactggctgaccgccaagctggcctacgagggcctgagcaagacctacctgtccaagacactggcccagtacacctccaagacatgcagcaactgtgggtttaccatcaccagcgccgactacgacagggtgctggagaagctgaagaagacagcaacaggctggatgaccacaattaacggcaaggagctgaaggtggagggccagattacctactacaacagatacaagagacagaacgtagtcaaggacctgtccgtcgagctggatagactgagcgaagaatctgtgaacaacgacatctcctcctggacaaagggcagaagcggagaagctctgagcctcctgaagaaaagattctcccatagacccgtgcaggagaagttcgtgtgcctgaactgcggcttcgagacacacgcagccgagcaagccgccctgaacatcgccagatcctggctgttcctgcggagccaggagtacaagaaataccagacaaacaagacaaccggcaacaccgataagagagccttcgtcgagacctggcagtccttttaccggaagaagcttaaggaggtgtggaaacctgccgtgcggtctggcggatctggcggaggctccacaagcagcgtgatgttcagcgacgtgagcatcgacttcagcctggaggagtgggagttcctgaacctggagcagagggacctgtacagggacgtgatgctggagaactacagcaacctggtgagcctgggctgcttcatcagcaagcccgacgtgatcagcctgctggagcagggcaaggagccctggaaggtggtgaggcagggcaggaggcagtaccccgacctggagaccaactacgagatcaagaccagccccaagaaaaagagaaaagtctaagctgccttctgcggggcttgccttctggccatgcccttcttctctcccttgcacctgtacctcttggtctttgaataaagcctgagtaggaaggctagcaaaaaaaaaaaaaaaaaaaaaaaaaaaaaaaaaaaaaaaaaaaaaaaaaaaaaaaaaaaaaaaaaaaaaaaaaaaaaaaa

SEQ ID NO: 6655 - RNA, 5797 nt, synthetic construct
  source 1..5797: mol_type = other RNA
aggaaataagagagaaaagaagagtaagaagaaatataagagccaccatggcccctaagaagaagcgtaaagtgagccggatggaacgcctcgtctacgaggtgcggcagaagtgcagaaacatcgaggacatctgcatctcctgcggatctctgaacgtgaccctggagcacccactgttcatcggcggcatgtgccagaactgtaaaaactgttttctggagtgtgcctatcaatacgacgatgacggctaccagagctactgcaccatctgttgcggcggaagagaggtgctgatgtgtggaaataacaactgctgccggtgcttctgcgtggaatgcgtggacctgctggtgggccccggcgccgcccaggccgctattaaggaagatccttggaactgctacatgtgcggccacaagggcacatacggcctgctgagacggagagaggactggcctagcagactgcagatgttcttcgccaataaccacgaccaggagttcgacccccctaaggtgtaccctcccgtccccgccgagaagagaaagcccatccgggtcctgagcctgttcgatggcatcgccaccggtctgctggtgctgaaggacctgggcatccaggtggataggtacattgcctccgaggtgtgcgaggactccatcaccgtgggaatggtgcgtcatcagggcaagatcatgtacgtgggcgacgtgcggagcgtgacacagaagcatatccaggagtggggccctttcgacctggtgatcggcggcagcccttgcaatgacctgagcatcgtgaacccagcccggaagggcctgtacgagggaaccggcagactgttcttcgagttttacagactgctgcacgacgcccggcctaaggaaggcgacgaccggcccttcttttggctgttcgagaatgtggtggccatgggagtcagcgacaagcgggatattagccggttcctggagagcaaccccgtgatgatcgatgccaaggaagtgagcgccgcccaccgggccagatacttctggggcaatctgcctggcatgaacagacccctggccagcaccgtgaacgacaagctggagctgcaggagtgcctggagcacggccggatcgccaagttcagcaaggtgagaaccatcaccacccgaagcaacagcatcaaacaaggcaaggaccagcactttcctgtgttcatgaacgagaaggaggacatcctgtggtgtaccgagatggagagagtgttcgggttcccagtccactacacagatgtcagcaacatgtctagactggccagacagagactgctgggaagaagctggtccgtccctgtgatcagacacctgttcgcccctctgaaggagtacttcgcctgcgtgagcagcggcaacagcaacgccaacagccggggccccagcttctctagcggcctggtgccactgtccctgagagggagccacatgggccccatggagatctacaaaaccgtgagcgcctggaagcggcagcctgtgcgcgtgctgagcctgtttcggaatatcgataaagtcctgaaaagcctgggattcctggagagcggctctggctccggcggtggcaccctgaagtacgtggaggatgtgacaaacgtggtcagacgggatgtggagaagtggggccccttcgatctggtgtacggcagcacccaacccctgggcagctcttgtgaccggtgccctggctggtacatgtttcagttccaccggatcctgcagtacgccctgccgagacaggagtcccagcggccattcttttggattttcatggacaacttgctgctgaccgaggatgaccaggaaactaccactcggttcctgcagaccgaagccgtgaccctgcaggacgtgagaggccgggactaccagaacgccatgcgggtgtggtccaacatccctggactgaaaagcaagcacgcacctctgacccctaaagaagaggagtacctgcaggcccaggtgcggagcagaagcaagctggacgcccctaaggtggatctgctggtgaagaattgcctcctgcccctgagagagtacttcaagtatttcagccagaatagtctgcccctgggcggcccaagcagcggcgcccctcctcccagcggcggcagcccagccggctccccaacctctaccgaggagggcacctctgagtccgccacccccgagagcggccctggcacctccaccgagcccagcgagggcagcgcacccggcagccctgccggcagccccacctccacagaggagggaaccagcaccgagcccagcgaaggcagcgccccaggcaccagcaccgagcctagtgagggcggctctggcggcggcagcgcccaggagattaaacggatcaacaagatcagaagaagacttgtgaaagacagcaacaccaagaaggccggcaagacaggccccatgaaaaccctgctggttagagtgatgacacccgatctgagagagcggctggaaaacctgagaaagaagcctgaaaatatcccccagcccatcagcaatacatctagagccaacctgaataagctgctgaccgattacaccgaaatgaagaaggcgatcctgcatgtgtactgggaagagttccagaaggaccctgtgggcctgatgagccgggtggcccagcctgccagcaagaagatcgatcagaacaagctgaaacctgagatggacgagaagggcaacctgaccaccgccggctttgcctgctctcagtgtggccagcccctgttcgtgtacaagctggagcaggtgtctgagaagggcaaggcttacaccaactacttcggacggtgcaatgtggccgagcacgaaaagctgatcctgctggcccagctgaagcccgagaaggatagcgacgaagccgtgacatatagcctgggaaagtttgggcagagggccctggatttctacagcattcatgtgaccaaggagtccacccaccccgtgaagcccctggcccagatcgccggaaacagatacgcctccggacctgtgggaaaggccctgagcgacgcatgtatgggcacaatcgcctccttcctgtctaagtaccaggacatcatcatcgaacaccagaaggtggtgaagggcaaccagaagagactggagagcctgcgggagctggccggcaaggaaaacctggaataccctagcgtgaccctgccacctcagcctcacaccaaggagggcgttgatgcctacaacgaagtgatcgcccgggtgcgaatgtgggtgaacctgaacctgtggcagaagctgaagctaagcagagatgatgccaagcctctgctgagactgaagggattcccttcctttcctctggtcgagagacaggccaacgaagtggactggtgggacatggtgtgtaacgtgaagaagctgatcaacgagaaaaaggaggatggcaaggtgttttggcagaatctggctggctacaagagacaggaagccctgagaccatacctgagcagcgaggaagatcggaagaagggaaagaaattcgctcggtaccagctgggcgacctgctgctgcacctggaaaagaagcacggcgaggactggggaaaggtgtacgacgaggcctgggagcggattgacaagaaagtggaaggcctgagcaagcacatcaagctggaagaggaacggagaagcgaggacgcccagagcaaggccgccctgaccgactggctgcgggctaaggccagcttcgtgatcgagggcctgaaggaggccgacaaggacgagttctgcagatgcgagctgaagctgcagaagtggtacggggacctgcggggaaagcccttcgccatcgaagccgagaacagcatcctggacatcagcggcttcagcaagcagtacaactgtgccttcatctggcagaaggacggcgtgaagaagctgaacctgtacctgatcatcaactacttcaagggcggcaagctgcggttcaagaagatcaaacctgaagccttcgaagccaacagattctacaccgtgatcaacaaaaagagcggcgagatcgtgcccatggaggtgaacttcaacttcgacgaccccaacctgatcatcctgcctctggcctttggcaagagacagggcagagaattcatctggaacgacctgctgtccctggaaaccggcagcctgaagctggccaacggaagagtgatcgagaagacactgtacaacagaagaacccggcaggatgagcctgccctgttcgtggccctgaccttcgagcggcgggaggtcctggactcctccaatatcaaaccaatgaacctgatcggcgtggcaagaggcgaaaacatccccgccgtgatcgccctgaccgaccccgagggctgcccactgagccggtttaaggatagcctgggaaacccaacccacatcctgagaatcggcgagagctataaggagaagcagcggaccatccaggccaagaaggaggtggagcagcggagagccggcggctacagccggaagtacgccagcaaagccaagaatctggcagacgatatggtgagaaacaccgctagagatctgctgtactacgccgtgacccaggatgccatgctgatcttcgccaacctgagccggggcttcggccggcagggcaagcggaccttcatggccgagagacagtacacacggatggaggactggctgaccgccaagctggcctacgagggcctgagcaagacctacctgtccaagacactggcccagtacacctccaagacatgcagcaactgtgggtttaccatcaccagcgccgactacgacagggtgctggagaagctgaagaagacagcaacaggctggatgaccacaattaacggcaaggagctgaaggtggagggccagattacctactacaacagatacaagagacagaacgtagtcaaggacctgtccgtcgagctggatagactgagcgaagaatctgtgaacaacgacatctcctcctggacaaagggcagaagcggagaagctctgagcctcctgaagaaaagattctcccatagacccgtgcaggagaagttcgtgtgcctgaactgcggcttcgagacacacgcagccgagcaagccgccctgaacatcgccagatcctggctgttcctgcggagccaggagtacaagaaataccagacaaacaagacaaccggcaacaccgataagagagccttcgtcgagacctggcagtccttttaccggaagaagcttaaggaggtgtggaaacctgccgtgcggtctggcggatctggcggaggctccacaagcgccgtgacccagctgaccttcgaggacgtggccgtggacttcacccccgaggagtggaggtgcctgacccccgcccagagggccctgtacagggacgtgatgctggacacctacaggaacctggtgagcgtgggcgtgagcccccccagcatgagcgtgatcctgcccctggagttccaggaggagccctgggtggcccagagccacgtgaccaccctgggcggcctgaacggctgggagggcaccagccccaagaaaaagagaaaagtctaagctgccttctgcggggcttgccttctggccatgcccttcttctctcccttgcacctgtacctcttggtctttgaataaagcctgagtaggaaggctagcaaaaaaaaaaaaaaaaaaaaaaaaaaaaaaaaaaaaaaaaaaaaaaaaaaaaaaaaaaaaaaaaaaaaaaaaaaaaaaaa

SEQ ID NO: 6656 - RNA, 5797 nt, synthetic construct
  source 1..5797: mol_type = other RNA
aggaaataagagagaaaagaagagtaagaagaaatataagagccaccatggcccctaagaagaagcgtaaagtgagccggatggaacgcctcgtctacgaggtgcggcagaagtgcagaaacatcgaggacatctgcatctcctgcggatctctgaacgtgaccctggagcacccactgttcatcggcggcatgtgccagaactgtaaaaactgttttctggagtgtgcctatcaatacgacgatgacggctaccagagctactgcaccatctgttgcggcggaagagaggtgctgatgtgtggaaataacaactgctgccggtgcttctgcgtggaatgcgtggacctgctggtgggccccggcgccgcccaggccgctattaaggaagatccttggaactgctacatgtgcggccacaagggcacatacggcctgctgagacggagagaggactggcctagcagactgcagatgttcttcgccaataaccacgaccaggagttcgacccccctaaggtgtaccctcccgtccccgccgagaagagaaagcccatccgggtcctgagcctgttcgatggcatcgccaccggtctgctggtgctgaaggacctgggcatccaggtggataggtacattgcctccgaggtgtgcgaggactccatcaccgtgggaatggtgcgtcatcagggcaagatcatgtacgtgggcgacgtgcggagcgtgacacagaagcatatccaggagtggggccctttcgacctggtgatcggcggcagcccttgcaatgacctgagcatcgtgaacccagcccggaagggcctgtacgagggaaccggcagactgttcttcgagttttacagactgctgcacgacgcccggcctaaggaaggcgacgaccggcccttcttttggctgttcgagaatgtggtggccatgggagtcagcgacaagcgggatattagccggttcctggagagcaaccccgtgatgatcgatgccaaggaagtgagcgccgcccaccgggccagatacttctggggcaatctgcctggcatgaacagacccctggccagcaccgtgaacgacaagctggagctgcaggagtgcctggagcacggccggatcgccaagttcagcaaggtgagaaccatcaccacccgaagcaacagcatcaaacaaggcaaggaccagcactttcctgtgttcatgaacgagaaggaggacatcctgtggtgtaccgagatggagagagtgttcgggttcccagtccactacacagatgtcagcaacatgtctagactggccagacagagactgctgggaagaagctggtccgtccctgtgatcagacacctgttcgcccctctgaaggagtacttcgcctgcgtgagcagcggcaacagcaacgccaacagccggggccccagcttctctagcggcctggtgccactgtccctgagagggagccacatgggccccatggagatctacaaaaccgtgagcgcctggaagcggcagcctgtgcgcgtgctgagcctgtttcggaatatcgataaagtcctgaaaagcctgggattcctggagagcggctctggctccggcggtggcaccctgaagtacgtggaggatgtgacaaacgtggtcagacgggatgtggagaagtggggccccttcgatctggtgtacggcagcacccaacccctgggcagctcttgtgaccggtgccctggctggtacatgtttcagttccaccggatcctgcagtacgccctgccgagacaggagtcccagcggccattcttttggattttcatggacaacttgctgctgaccgaggatgaccaggaaactaccactcggttcctgcagaccgaagccgtgaccctgcaggacgtgagaggccgggactaccagaacgccatgcgggtgtggtccaacatccctggactgaaaagcaagcacgcacctctgacccctaaagaagaggagtacctgcaggcccaggtgcggagcagaagcaagctggacgcccctaaggtggatctgctggtgaagaattgcctcctgcccctgagagagtacttcaagtatttcagccagaatagtctgcccctgggcggcccaagcagcggcgcccctcctcccagcggcggcagcccagccggctccccaacctctaccgaggagggcacctctgagtccgccacccccgagagcggccctggcacctccaccgagcccagcgagggcagcgcacccggcagccctgccggcagccccacctccacagaggagggaaccagcaccgagcccagcgaaggcagcgccccaggcaccagcaccgagcctagtgagggcggctctggcggcggcagcgcccaggagattaaacggatcaacaagatcagaagaagacttgtgaaagacagcaacaccaagaaggccggcaagacaggccccatgaaaaccctgctggttagagtgatgacacccgatctgagagagcggctggaaaacctgagaaagaagcctgaaaatatcccccagcccatcagcaatacatctagagccaacctgaataagctgctgaccgattacaccgaaatgaagaaggcgatcctgcatgtgtactgggaagagttccagaaggaccctgtgggcctgatgagccgggtggcccagcctgccagcaagaagatcgatcagaacaagctgaaacctgagatggacgagaagggcaacctgaccaccgccggctttgcctgctctcagtgtggccagcccctgttcgtgtacaagctggagcaggtgtctgagaagggcaaggcttacaccaactacttcggacggtgcaatgtggccgagcacgaaaagctgatcctgctggcccagctgaagcccgagaaggatagcgacgaagccgtgacatatagcctgggaaagtttgggcagagggccctggatttctacagcattcatgtgaccaaggagtccacccaccccgtgaagcccctggcccagatcgccggaaacagatacgcctccggacctgtgggaaaggccctgagcgacgcatgtatgggcacaatcgcctccttcctgtctaagtaccaggacatcatcatcgaacaccagaaggtggtgaagggcaaccagaagagactggagagcctgcgggagctggccggcaaggaaaacctggaataccctagcgtgaccctgccacctcagcctcacaccaaggagggcgttgatgcctacaacgaagtgatcgcccgggtgcgaatgtgggtgaacctgaacctgtggcagaagctgaagctaagcagagatgatgccaagcctctgctgagactgaagggattcccttcctttcctctggtcgagagacaggccaacgaagtggactggtgggacatggtgtgtaacgtgaagaagctgatcaacgagaaaaaggaggatggcaaggtgttttggcagaatctggctggctacaagagacaggaagccctgagaccatacctgagcagcgaggaagatcggaagaagggaaagaaattcgctcggtaccagctgggcgacctgctgctgcacctggaaaagaagcacggcgaggactggggaaaggtgtacgacgaggcctgggagcggattgacaagaaagtggaaggcctgagcaagcacatcaagctggaagaggaacggagaagcgaggacgcccagagcaaggccgccctgaccgactggctgcgggctaaggccagcttcgtgatcgagggcctgaaggaggccgacaaggacgagttctgcagatgcgagctgaagctgcagaagtggtacggggacctgcggggaaagcccttcgccatcgaagccgagaacagcatcctggacatcagcggcttcagcaagcagtacaactgtgccttcatctggcagaaggacggcgtgaagaagctgaacctgtacctgatcatcaactacttcaagggcggcaagctgcggttcaagaagatcaaacctgaagccttcgaagccaacagattctacaccgtgatcaacaaaaagagcggcgagatcgtgcccatggaggtgaacttcaacttcgacgaccccaacctgatcatcctgcctctggcctttggcaagagacagggcagagaattcatctggaacgacctgctgtccctggaaaccggcagcctgaagctggccaacggaagagtgatcgagaagacactgtacaacagaagaacccggcaggatgagcctgccctgttcgtggccctgaccttcgagcggcgggaggtcctggactcctccaatatcaaaccaatgaacctgatcggcgtggcaagaggcgaaaacatccccgccgtgatcgccctgaccgaccccgagggctgcccactgagccggtttaaggatagcctgggaaacccaacccacatcctgagaatcggcgagagctataaggagaagcagcggaccatccaggccaagaaggaggtggagcagcggagagccggcggctacagccggaagtacgccagcaaagccaagaatctggcagacgatatggtgagaaacaccgctagagatctgctgtactacgccgtgacccaggatgccatgctgatcttcgccaacctgagccggggcttcggccggcagggcaagcggaccttcatggccgagagacagtacacacggatggaggactggctgaccgccaagctggcctacgagggcctgagcaagacctacctgtccaagacactggcccagtacacctccaagacatgcagcaactgtgggtttaccatcaccagcgccgactacgacagggtgctggagaagctgaagaagacagcaacaggctggatgaccacaattaacggcaaggagctgaaggtggagggccagattacctactacaacagatacaagagacagaacgtagtcaaggacctgtccgtcgagctggatagactgagcgaagaatctgtgaacaacgacatctcctcctggacaaagggcagaagcggagaagctctgagcctcctgaagaaaagattctcccatagacccgtgcaggagaagttcgtgtgcctgaactgcggcttcgagacacacgcagccgagcaagccgccctgaacatcgccagatcctggctgttcctgcggagccaggagtacaagaaataccagacaaacaagacaaccggcaacaccgataagagagccttcgtcgagacctggcagtccttttaccggaagaagcttaaggaggtgtggaaacctgccgtgcggtctggcggatctggcggaggctccacaagccaccaggaggtggtgaccttcgaggacgtggccgtgtacttcaccaggaccgagtgggccggcctgagccccgcccagagggccctgtacaggagcgtgatgctggagatctacaggagcctgaccagcctgggctaccccgtgcccaagcccgccctgatcagcctgctggagaggggcgacctgcccgtgggcctggagacccaggacaacccccccgcccagggcaccagggacatctacaccagccccaagaaaaagagaaaagtctaagctgccttctgcggggcttgccttctggccatgcccttcttctctcccttgcacctgtacctcttggtctttgaataaagcctgagtaggaaggctagcaaaaaaaaaaaaaaaaaaaaaaaaaaaaaaaaaaaaaaaaaaaaaaaaaaaaaaaaaaaaaaaaaaaaaaaaaaaaaaaa

SEQ ID NO: 6657 - RNA, 5797 nt, synthetic construct
  source 1..5797: mol_type = other RNA
aggaaataagagagaaaagaagagtaagaagaaatataagagccaccatggcccctaagaagaagcgtaaagtgagccggatggaacgcctcgtctacgaggtgcggcagaagtgcagaaacatcgaggacatctgcatctcctgcggatctctgaacgtgaccctggagcacccactgttcatcggcggcatgtgccagaactgtaaaaactgttttctggagtgtgcctatcaatacgacgatgacggctaccagagctactgcaccatctgttgcggcggaagagaggtgctgatgtgtggaaataacaactgctgccggtgcttctgcgtggaatgcgtggacctgctggtgggccccggcgccgcccaggccgctattaaggaagatccttggaactgctacatgtgcggccacaagggcacatacggcctgctgagacggagagaggactggcctagcagactgcagatgttcttcgccaataaccacgaccaggagttcgacccccctaaggtgtaccctcccgtccccgccgagaagagaaagcccatccgggtcctgagcctgttcgatggcatcgccaccggtctgctggtgctgaaggacctgggcatccaggtggataggtacattgcctccgaggtgtgcgaggactccatcaccgtgggaatggtgcgtcatcagggcaagatcatgtacgtgggcgacgtgcggagcgtgacacagaagcatatccaggagtggggccctttcgacctggtgatcggcggcagcccttgcaatgacctgagcatcgtgaacccagcccggaagggcctgtacgagggaaccggcagactgttcttcgagttttacagactgctgcacgacgcccggcctaaggaaggcgacgaccggcccttcttttggctgttcgagaatgtggtggccatgggagtcagcgacaagcgggatattagccggttcctggagagcaaccccgtgatgatcgatgccaaggaagtgagcgccgcccaccgggccagatacttctggggcaatctgcctggcatgaacagacccctggccagcaccgtgaacgacaagctggagctgcaggagtgcctggagcacggccggatcgccaagttcagcaaggtgagaaccatcaccacccgaagcaacagcatcaaacaaggcaaggaccagcactttcctgtgttcatgaacgagaaggaggacatcctgtggtgtaccgagatggagagagtgttcgggttcccagtccactacacagatgtcagcaacatgtctagactggccagacagagactgctgggaagaagctggtccgtccctgtgatcagacacctgttcgcccctctgaaggagtacttcgcctgcgtgagcagcggcaacagcaacgccaacagccggggccccagcttctctagcggcctggtgccactgtccctgagagggagccacatgggccccatggagatctacaaaaccgtgagcgcctggaagcggcagcctgtgcgcgtgctgagcctgtttcggaatatcgataaagtcctgaaaagcctgggattcctggagagcggctctggctccggcggtggcaccctgaagtacgtggaggatgtgacaaacgtggtcagacgggatgtggagaagtggggccccttcgatctggtgtacggcagcacccaacccctgggcagctcttgtgaccggtgccctggctggtacatgtttcagttccaccggatcctgcagtacgccctgccgagacaggagtcccagcggccattcttttggattttcatggacaacttgctgctgaccgaggatgaccaggaaactaccactcggttcctgcagaccgaagccgtgaccctgcaggacgtgagaggccgggactaccagaacgccatgcgggtgtggtccaacatccctggactgaaaagcaagcacgcacctctgacccctaaagaagaggagtacctgcaggcccaggtgcggagcagaagcaagctggacgcccctaaggtggatctgctggtgaagaattgcctcctgcccctgagagagtacttcaagtatttcagccagaatagtctgcccctgggcggcccaagcagcggcgcccctcctcccagcggcggcagcccagccggctccccaacctctaccgaggagggcacctctgagtccgccacccccgagagcggccctggcacctccaccgagcccagcgagggcagcgcacccggcagccctgccggcagccccacctccacagaggagggaaccagcaccgagcccagcgaaggcagcgccccaggcaccagcaccgagcctagtgagggcggctctggcggcggcagcgcccaggagattaaacggatcaacaagatcagaagaagacttgtgaaagacagcaacaccaagaaggccggcaagacaggccccatgaaaaccctgctggttagagtgatgacacccgatctgagagagcggctggaaaacctgagaaagaagcctgaaaatatcccccagcccatcagcaatacatctagagccaacctgaataagctgctgaccgattacaccgaaatgaagaaggcgatcctgcatgtgtactgggaagagttccagaaggaccctgtgggcctgatgagccgggtggcccagcctgccagcaagaagatcgatcagaacaagctgaaacctgagatggacgagaagggcaacctgaccaccgccggctttgcctgctctcagtgtggccagcccctgttcgtgtacaagctggagcaggtgtctgagaagggcaaggcttacaccaactacttcggacggtgcaatgtggccgagcacgaaaagctgatcctgctggcccagctgaagcccgagaaggatagcgacgaagccgtgacatatagcctgggaaagtttgggcagagggccctggatttctacagcattcatgtgaccaaggagtccacccaccccgtgaagcccctggcccagatcgccggaaacagatacgcctccggacctgtgggaaaggccctgagcgacgcatgtatgggcacaatcgcctccttcctgtctaagtaccaggacatcatcatcgaacaccagaaggtggtgaagggcaaccagaagagactggagagcctgcgggagctggccggcaaggaaaacctggaataccctagcgtgaccctgccacctcagcctcacaccaaggagggcgttgatgcctacaacgaagtgatcgcccgggtgcgaatgtgggtgaacctgaacctgtggcagaagctgaagctaagcagagatgatgccaagcctctgctgagactgaagggattcccttcctttcctctggtcgagagacaggccaacgaagtggactggtgggacatggtgtgtaacgtgaagaagctgatcaacgagaaaaaggaggatggcaaggtgttttggcagaatctggctggctacaagagacaggaagccctgagaccatacctgagcagcgaggaagatcggaagaagggaaagaaattcgctcggtaccagctgggcgacctgctgctgcacctggaaaagaagcacggcgaggactggggaaaggtgtacgacgaggcctgggagcggattgacaagaaagtggaaggcctgagcaagcacatcaagctggaagaggaacggagaagcgaggacgcccagagcaaggccgccctgaccgactggctgcgggctaaggccagcttcgtgatcgagggcctgaaggaggccgacaaggacgagttctgcagatgcgagctgaagctgcagaagtggtacggggacctgcggggaaagcccttcgccatcgaagccgagaacagcatcctggacatcagcggcttcagcaagcagtacaactgtgccttcatctggcagaaggacggcgtgaagaagctgaacctgtacctgatcatcaactacttcaagggcggcaagctgcggttcaagaagatcaaacctgaagccttcgaagccaacagattctacaccgtgatcaacaaaaagagcggcgagatcgtgcccatggaggtgaacttcaacttcgacgaccccaacctgatcatcctgcctctggcctttggcaagagacagggcagagaattcatctggaacgacctgctgtccctggaaaccggcagcctgaagctggccaacggaagagtgatcgagaagacactgtacaacagaagaacccggcaggatgagcctgccctgttcgtggccctgaccttcgagcggcgggaggtcctggactcctccaatatcaaaccaatgaacctgatcggcgtggcaagaggcgaaaacatccccgccgtgatcgccctgaccgaccccgagggctgcccactgagccggtttaaggatagcctgggaaacccaacccacatcctgagaatcggcgagagctataaggagaagcagcggaccatccaggccaagaaggaggtggagcagcggagagccggcggctacagccggaagtacgccagcaaagccaagaatctggcagacgatatggtgagaaacaccgctagagatctgctgtactacgccgtgacccaggatgccatgctgatcttcgccaacctgagccggggcttcggccggcagggcaagcggaccttcatggccgagagacagtacacacggatggaggactggctgaccgccaagctggcctacgagggcctgagcaagacctacctgtccaagacactggcccagtacacctccaagacatgcagcaactgtgggtttaccatcaccagcgccgactacgacagggtgctggagaagctgaagaagacagcaacaggctggatgaccacaattaacggcaaggagctgaaggtggagggccagattacctactacaacagatacaagagacagaacgtagtcaaggacctgtccgtcgagctggatagactgagcgaagaatctgtgaacaacgacatctcctcctggacaaagggcagaagcggagaagctctgagcctcctgaagaaaagattctcccatagacccgtgcaggagaagttcgtgtgcctgaactgcggcttcgagacacacgcagccgagcaagccgccctgaacatcgccagatcctggctgttcctgcggagccaggagtacaagaaataccagacaaacaagacaaccggcaacaccgataagagagccttcgtcgagacctggcagtccttttaccggaagaagcttaaggaggtgtggaaacctgccgtgcggtctggcggatctggcggaggctccacaagcgcccaggagagcgtgatgttcagcgacgtgagcgtggacttcagccaggaggagtgggagtgcctgaacgacgaccagagggacctgtacagggacgtgatgctggagaactacagcaacctggtgagcatgggccacagcgtgagcaagcccaacgtgatcagctacctggagcagggcaaggagccctggctggtggacagggagctgaccaggggccagtggcccgtgctggagagcaggaccagccccaagaaaaagagaaaagtctaagctgccttctgcggggcttgccttctggccatgcccttcttctctcccttgcacctgtacctcttggtctttgaataaagcctgagtaggaaggctagcaaaaaaaaaaaaaaaaaaaaaaaaaaaaaaaaaaaaaaaaaaaaaaaaaaaaaaaaaaaaaaaaaaaaaaaaaaaaaaaa

SEQ ID NO: 6658 - RNA, 5797 nt, synthetic construct
  source 1..5797: mol_type = other RNA
aggaaataagagagaaaagaagagtaagaagaaatataagagccaccatggcccctaagaagaagcgtaaagtgagccggatggaacgcctcgtctacgaggtgcggcagaagtgcagaaacatcgaggacatctgcatctcctgcggatctctgaacgtgaccctggagcacccactgttcatcggcggcatgtgccagaactgtaaaaactgttttctggagtgtgcctatcaatacgacgatgacggctaccagagctactgcaccatctgttgcggcggaagagaggtgctgatgtgtggaaataacaactgctgccggtgcttctgcgtggaatgcgtggacctgctggtgggccccggcgccgcccaggccgctattaaggaagatccttggaactgctacatgtgcggccacaagggcacatacggcctgctgagacggagagaggactggcctagcagactgcagatgttcttcgccaataaccacgaccaggagttcgacccccctaaggtgtaccctcccgtccccgccgagaagagaaagcccatccgggtcctgagcctgttcgatggcatcgccaccggtctgctggtgctgaaggacctgggcatccaggtggataggtacattgcctccgaggtgtgcgaggactccatcaccgtgggaatggtgcgtcatcagggcaagatcatgtacgtgggcgacgtgcggagcgtgacacagaagcatatccaggagtggggccctttcgacctggtgatcggcggcagcccttgcaatgacctgagcatcgtgaacccagcccggaagggcctgtacgagggaaccggcagactgttcttcgagttttacagactgctgcacgacgcccggcctaaggaaggcgacgaccggcccttcttttggctgttcgagaatgtggtggccatgggagtcagcgacaagcgggatattagccggttcctggagagcaaccccgtgatgatcgatgccaaggaagtgagcgccgcccaccgggccagatacttctggggcaatctgcctggcatgaacagacccctggccagcaccgtgaacgacaagctggagctgcaggagtgcctggagcacggccggatcgccaagttcagcaaggtgagaaccatcaccacccgaagcaacagcatcaaacaaggcaaggaccagcactttcctgtgttcatgaacgagaaggaggacatcctgtggtgtaccgagatggagagagtgttcgggttcccagtccactacacagatgtcagcaacatgtctagactggccagacagagactgctgggaagaagctggtccgtccctgtgatcagacacctgttcgcccctctgaaggagtacttcgcctgcgtgagcagcggcaacagcaacgccaacagccggggccccagcttctctagcggcctggtgccactgtccctgagagggagccacatgggccccatggagatctacaaaaccgtgagcgcctggaagcggcagcctgtgcgcgtgctgagcctgtttcggaatatcgataaagtcctgaaaagcctgggattcctggagagcggctctggctccggcggtggcaccctgaagtacgtggaggatgtgacaaacgtggtcagacgggatgtggagaagtggggccccttcgatctggtgtacggcagcacccaacccctgggcagctcttgtgaccggtgccctggctggtacatgtttcagttccaccggatcctgcagtacgccctgccgagacaggagtcccagcggccattcttttggattttcatggacaacttgctgctgaccgaggatgaccaggaaactaccactcggttcctgcagaccgaagccgtgaccctgcaggacgtgagaggccgggactaccagaacgccatgcgggtgtggtccaacatccctggactgaaaagcaagcacgcacctctgacccctaaagaagaggagtacctgcaggcccaggtgcggagcagaagcaagctggacgcccctaaggtggatctgctggtgaagaattgcctcctgcccctgagagagtacttcaagtatttcagccagaatagtctgcccctgggcggcccaagcagcggcgcccctcctcccagcggcggcagcccagccggctccccaacctctaccgaggagggcacctctgagtccgccacccccgagagcggccctggcacctccaccgagcccagcgagggcagcgcacccggcagccctgccggcagccccacctccacagaggagggaaccagcaccgagcccagcgaaggcagcgccccaggcaccagcaccgagcctagtgagggcggctctggcggcggcagcgcccaggagattaaacggatcaacaagatcagaagaagacttgtgaaagacagcaacaccaagaaggccggcaagacaggccccatgaaaaccctgctggttagagtgatgacacccgatctgagagagcggctggaaaacctgagaaagaagcctgaaaatatcccccagcccatcagcaatacatctagagccaacctgaataagctgctgaccgattacaccgaaatgaagaaggcgatcctgcatgtgtactgggaagagttccagaaggaccctgtgggcctgatgagccgggtggcccagcctgccagcaagaagatcgatcagaacaagctgaaacctgagatggacgagaagggcaacctgaccaccgccggctttgcctgctctcagtgtggccagcccctgttcgtgtacaagctggagcaggtgtctgagaagggcaaggcttacaccaactacttcggacggtgcaatgtggccgagcacgaaaagctgatcctgctggcccagctgaagcccgagaaggatagcgacgaagccgtgacatatagcctgggaaagtttgggcagagggccctggatttctacagcattcatgtgaccaaggagtccacccaccccgtgaagcccctggcccagatcgccggaaacagatacgcctccggacctgtgggaaaggccctgagcgacgcatgtatgggcacaatcgcctccttcctgtctaagtaccaggacatcatcatcgaacaccagaaggtggtgaagggcaaccagaagagactggagagcctgcgggagctggccggcaaggaaaacctggaataccctagcgtgaccctgccacctcagcctcacaccaaggagggcgttgatgcctacaacgaagtgatcgcccgggtgcgaatgtgggtgaacctgaacctgtggcagaagctgaagctaagcagagatgatgccaagcctctgctgagactgaagggattcccttcctttcctctggtcgagagacaggccaacgaagtggactggtgggacatggtgtgtaacgtgaagaagctgatcaacgagaaaaaggaggatggcaaggtgttttggcagaatctggctggctacaagagacaggaagccctgagaccatacctgagcagcgaggaagatcggaagaagggaaagaaattcgctcggtaccagctgggcgacctgctgctgcacctggaaaagaagcacggcgaggactggggaaaggtgtacgacgaggcctgggagcggattgacaagaaagtggaaggcctgagcaagcacatcaagctggaagaggaacggagaagcgaggacgcccagagcaaggccgccctgaccgactggctgcgggctaaggccagcttcgtgatcgagggcctgaaggaggccgacaaggacgagttctgcagatgcgagctgaagctgcagaagtggtacggggacctgcggggaaagcccttcgccatcgaagccgagaacagcatcctggacatcagcggcttcagcaagcagtacaactgtgccttcatctggcagaaggacggcgtgaagaagctgaacctgtacctgatcatcaactacttcaagggcggcaagctgcggttcaagaagatcaaacctgaagccttcgaagccaacagattctacaccgtgatcaacaaaaagagcggcgagatcgtgcccatggaggtgaacttcaacttcgacgaccccaacctgatcatcctgcctctggcctttggcaagagacagggcagagaattcatctggaacgacctgctgtccctggaaaccggcagcctgaagctggccaacggaagagtgatcgagaagacactgtacaacagaagaacccggcaggatgagcctgccctgttcgtggccctgaccttcgagcggcgggaggtcctggactcctccaatatcaaaccaatgaacctgatcggcgtggcaagaggcgaaaacatccccgccgtgatcgccctgaccgaccccgagggctgcccactgagccggtttaaggatagcctgggaaacccaacccacatcctgagaatcggcgagagctataaggagaagcagcggaccatccaggccaagaaggaggtggagcagcggagagccggcggctacagccggaagtacgccagcaaagccaagaatctggcagacgatatggtgagaaacaccgctagagatctgctgtactacgccgtgacccaggatgccatgctgatcttcgccaacctgagccggggcttcggccggcagggcaagcggaccttcatggccgagagacagtacacacggatggaggactggctgaccgccaagctggcctacgagggcctgagcaagacctacctgtccaagacactggcccagtacacctccaagacatgcagcaactgtgggtttaccatcaccagcgccgactacgacagggtgctggagaagctgaagaagacagcaacaggctggatgaccacaattaacggcaaggagctgaaggtggagggccagattacctactacaacagatacaagagacagaacgtagtcaaggacctgtccgtcgagctggatagactgagcgaagaatctgtgaacaacgacatctcctcctggacaaagggcagaagcggagaagctctgagcctcctgaagaaaagattctcccatagacccgtgcaggagaagttcgtgtgcctgaactgcggcttcgagacacacgcagccgagcaagccgccctgaacatcgccagatcctggctgttcctgcggagccaggagtacaagaaataccagacaaacaagacaaccggcaacaccgataagagagccttcgtcgagacctggcagtccttttaccggaagaagcttaaggaggtgtggaaacctgccgtgcggtctggcggatctggcggaggctccacaagcatggtgagcttcgaggacgtggccgtgcccctgagccaggaggagtggaactgcctgatccccgcccagaggggcctgtacagggacgtgatgctggagacctacggcaacctggtgagcctgggcctgcaggccagcaagcccgacgtgatcagcaggctggagcagggcgacgagccctggaccccccacatcctgaggacccagggcagctggagctggaggcacaagagggagggctacaccagccccaagaaaaagagaaaagtctaagctgccttctgcggggcttgccttctggccatgcccttcttctctcccttgcacctgtacctcttggtctttgaataaagcctgagtaggaaggctagcaaaaaaaaaaaaaaaaaaaaaaaaaaaaaaaaaaaaaaaaaaaaaaaaaaaaaaaaaaaaaaaaaaaaaaaaaaaaaaaa

SEQ ID NO: 6659 - RNA, 5797 nt, synthetic construct
  source 1..5797: mol_type = other RNA
aggaaataagagagaaaagaagagtaagaagaaatataagagccaccatggcccctaagaagaagcgtaaagtgagccggatggaacgcctcgtctacgaggtgcggcagaagtgcagaaacatcgaggacatctgcatctcctgcggatctctgaacgtgaccctggagcacccactgttcatcggcggcatgtgccagaactgtaaaaactgttttctggagtgtgcctatcaatacgacgatgacggctaccagagctactgcaccatctgttgcggcggaagagaggtgctgatgtgtggaaataacaactgctgccggtgcttctgcgtggaatgcgtggacctgctggtgggccccggcgccgcccaggccgctattaaggaagatccttggaactgctacatgtgcggccacaagggcacatacggcctgctgagacggagagaggactggcctagcagactgcagatgttcttcgccaataaccacgaccaggagttcgacccccctaaggtgtaccctcccgtccccgccgagaagagaaagcccatccgggtcctgagcctgttcgatggcatcgccaccggtctgctggtgctgaaggacctgggcatccaggtggataggtacattgcctccgaggtgtgcgaggactccatcaccgtgggaatggtgcgtcatcagggcaagatcatgtacgtgggcgacgtgcggagcgtgacacagaagcatatccaggagtggggccctttcgacctggtgatcggcggcagcccttgcaatgacctgagcatcgtgaacccagcccggaagggcctgtacgagggaaccggcagactgttcttcgagttttacagactgctgcacgacgcccggcctaaggaaggcgacgaccggcccttcttttggctgttcgagaatgtggtggccatgggagtcagcgacaagcgggatattagccggttcctggagagcaaccccgtgatgatcgatgccaaggaagtgagcgccgcccaccgggccagatacttctggggcaatctgcctggcatgaacagacccctggccagcaccgtgaacgacaagctggagctgcaggagtgcctggagcacggccggatcgccaagttcagcaaggtgagaaccatcaccacccgaagcaacagcatcaaacaaggcaaggaccagcactttcctgtgttcatgaacgagaaggaggacatcctgtggtgtaccgagatggagagagtgttcgggttcccagtccactacacagatgtcagcaacatgtctagactggccagacagagactgctgggaagaagctggtccgtccctgtgatcagacacctgttcgcccctctgaaggagtacttcgcctgcgtgagcagcggcaacagcaacgccaacagccggggccccagcttctctagcggcctggtgccactgtccctgagagggagccacatgggccccatggagatctacaaaaccgtgagcgcctggaagcggcagcctgtgcgcgtgctgagcctgtttcggaatatcgataaagtcctgaaaagcctgggattcctggagagcggctctggctccggcggtggcaccctgaagtacgtggaggatgtgacaaacgtggtcagacgggatgtggagaagtggggccccttcgatctggtgtacggcagcacccaacccctgggcagctcttgtgaccggtgccctggctggtacatgtttcagttccaccggatcctgcagtacgccctgccgagacaggagtcccagcggccattcttttggattttcatggacaacttgctgctgaccgaggatgaccaggaaactaccactcggttcctgcagaccgaagccgtgaccctgcaggacgtgagaggccgggactaccagaacgccatgcgggtgtggtccaacatccctggactgaaaagcaagcacgcacctctgacccctaaagaagaggagtacctgcaggcccaggtgcggagcagaagcaagctggacgcccctaaggtggatctgctggtgaagaattgcctcctgcccctgagagagtacttcaagtatttcagccagaatagtctgcccctgggcggcccaagcagcggcgcccctcctcccagcggcggcagcccagccggctccccaacctctaccgaggagggcacctctgagtccgccacccccgagagcggccctggcacctccaccgagcccagcgagggcagcgcacccggcagccctgccggcagccccacctccacagaggagggaaccagcaccgagcccagcgaaggcagcgccccaggcaccagcaccgagcctagtgagggcggctctggcggcggcagcgcccaggagattaaacggatcaacaagatcagaagaagacttgtgaaagacagcaacaccaagaaggccggcaagacaggccccatgaaaaccctgctggttagagtgatgacacccgatctgagagagcggctggaaaacctgagaaagaagcctgaaaatatcccccagcccatcagcaatacatctagagccaacctgaataagctgctgaccgattacaccgaaatgaagaaggcgatcctgcatgtgtactgggaagagttccagaaggaccctgtgggcctgatgagccgggtggcccagcctgccagcaagaagatcgatcagaacaagctgaaacctgagatggacgagaagggcaacctgaccaccgccggctttgcctgctctcagtgtggccagcccctgttcgtgtacaagctggagcaggtgtctgagaagggcaaggcttacaccaactacttcggacggtgcaatgtggccgagcacgaaaagctgatcctgctggcccagctgaagcccgagaaggatagcgacgaagccgtgacatatagcctgggaaagtttgggcagagggccctggatttctacagcattcatgtgaccaaggagtccacccaccccgtgaagcccctggcccagatcgccggaaacagatacgcctccggacctgtgggaaaggccctgagcgacgcatgtatgggcacaatcgcctccttcctgtctaagtaccaggacatcatcatcgaacaccagaaggtggtgaagggcaaccagaagagactggagagcctgcgggagctggccggcaaggaaaacctggaataccctagcgtgaccctgccacctcagcctcacaccaaggagggcgttgatgcctacaacgaagtgatcgcccgggtgcgaatgtgggtgaacctgaacctgtggcagaagctgaagctaagcagagatgatgccaagcctctgctgagactgaagggattcccttcctttcctctggtcgagagacaggccaacgaagtggactggtgggacatggtgtgtaacgtgaagaagctgatcaacgagaaaaaggaggatggcaaggtgttttggcagaatctggctggctacaagagacaggaagccctgagaccatacctgagcagcgaggaagatcggaagaagggaaagaaattcgctcggtaccagctgggcgacctgctgctgcacctggaaaagaagcacggcgaggactggggaaaggtgtacgacgaggcctgggagcggattgacaagaaagtggaaggcctgagcaagcacatcaagctggaagaggaacggagaagcgaggacgcccagagcaaggccgccctgaccgactggctgcgggctaaggccagcttcgtgatcgagggcctgaaggaggccgacaaggacgagttctgcagatgcgagctgaagctgcagaagtggtacggggacctgcggggaaagcccttcgccatcgaagccgagaacagcatcctggacatcagcggcttcagcaagcagtacaactgtgccttcatctggcagaaggacggcgtgaagaagctgaacctgtacctgatcatcaactacttcaagggcggcaagctgcggttcaagaagatcaaacctgaagccttcgaagccaacagattctacaccgtgatcaacaaaaagagcggcgagatcgtgcccatggaggtgaacttcaacttcgacgaccccaacctgatcatcctgcctctggcctttggcaagagacagggcagagaattcatctggaacgacctgctgtccctggaaaccggcagcctgaagctggccaacggaagagtgatcgagaagacactgtacaacagaagaacccggcaggatgagcctgccctgttcgtggccctgaccttcgagcggcgggaggtcctggactcctccaatatcaaaccaatgaacctgatcggcgtggcaagaggcgaaaacatccccgccgtgatcgccctgaccgaccccgagggctgcccactgagccggtttaaggatagcctgggaaacccaacccacatcctgagaatcggcgagagctataaggagaagcagcggaccatccaggccaagaaggaggtggagcagcggagagccggcggctacagccggaagtacgccagcaaagccaagaatctggcagacgatatggtgagaaacaccgctagagatctgctgtactacgccgtgacccaggatgccatgctgatcttcgccaacctgagccggggcttcggccggcagggcaagcggaccttcatggccgagagacagtacacacggatggaggactggctgaccgccaagctggcctacgagggcctgagcaagacctacctgtccaagacactggcccagtacacctccaagacatgcagcaactgtgggtttaccatcaccagcgccgactacgacagggtgctggagaagctgaagaagacagcaacaggctggatgaccacaattaacggcaaggagctgaaggtggagggccagattacctactacaacagatacaagagacagaacgtagtcaaggacctgtccgtcgagctggatagactgagcgaagaatctgtgaacaacgacatctcctcctggacaaagggcagaagcggagaagctctgagcctcctgaagaaaagattctcccatagacccgtgcaggagaagttcgtgtgcctgaactgcggcttcgagacacacgcagccgagcaagccgccctgaacatcgccagatcctggctgttcctgcggagccaggagtacaagaaataccagacaaacaagacaaccggcaacaccgataagagagccttcgtcgagacctggcagtccttttaccggaagaagcttaaggaggtgtggaaacctgccgtgcggtctggcggatctggcggaggctccacaagcagccagatccccctgaccttccaggacgtggccgtggacttcacctgggaggagtggggcctgctggagcccagccagaaggacatgtactgggacgtgatgctggagatctacgagaacttcatcagcctgggcggcgtgcccctgagcatccccgacgtgatcagccagctggagaggatggaggccccctggatgacccagggcggcgtgctgatcagcaccttcctggacagcagcaccaccagccccaagaaaaagagaaaagtctaagctgccttctgcggggcttgccttctggccatgcccttcttctctcccttgcacctgtacctcttggtctttgaataaagcctgagtaggaaggctagcaaaaaaaaaaaaaaaaaaaaaaaaaaaaaaaaaaaaaaaaaaaaaaaaaaaaaaaaaaaaaaaaaaaaaaaaaaaaaaaa

SEQ ID NO: 6660 - RNA, 5797 nt, synthetic construct
  source 1..5797: mol_type = other RNA
aggaaataagagagaaaagaagagtaagaagaaatataagagccaccatggcccctaagaagaagcgtaaagtgagccggatggaacgcctcgtctacgaggtgcggcagaagtgcagaaacatcgaggacatctgcatctcctgcggatctctgaacgtgaccctggagcacccactgttcatcggcggcatgtgccagaactgtaaaaactgttttctggagtgtgcctatcaatacgacgatgacggctaccagagctactgcaccatctgttgcggcggaagagaggtgctgatgtgtggaaataacaactgctgccggtgcttctgcgtggaatgcgtggacctgctggtgggccccggcgccgcccaggccgctattaaggaagatccttggaactgctacatgtgcggccacaagggcacatacggcctgctgagacggagagaggactggcctagcagactgcagatgttcttcgccaataaccacgaccaggagttcgacccccctaaggtgtaccctcccgtccccgccgagaagagaaagcccatccgggtcctgagcctgttcgatggcatcgccaccggtctgctggtgctgaaggacctgggcatccaggtggataggtacattgcctccgaggtgtgcgaggactccatcaccgtgggaatggtgcgtcatcagggcaagatcatgtacgtgggcgacgtgcggagcgtgacacagaagcatatccaggagtggggccctttcgacctggtgatcggcggcagcccttgcaatgacctgagcatcgtgaacccagcccggaagggcctgtacgagggaaccggcagactgttcttcgagttttacagactgctgcacgacgcccggcctaaggaaggcgacgaccggcccttcttttggctgttcgagaatgtggtggccatgggagtcagcgacaagcgggatattagccggttcctggagagcaaccccgtgatgatcgatgccaaggaagtgagcgccgcccaccgggccagatacttctggggcaatctgcctggcatgaacagacccctggccagcaccgtgaacgacaagctggagctgcaggagtgcctggagcacggccggatcgccaagttcagcaaggtgagaaccatcaccacccgaagcaacagcatcaaacaaggcaaggaccagcactttcctgtgttcatgaacgagaaggaggacatcctgtggtgtaccgagatggagagagtgttcgggttcccagtccactacacagatgtcagcaacatgtctagactggccagacagagactgctgggaagaagctggtccgtccctgtgatcagacacctgttcgcccctctgaaggagtacttcgcctgcgtgagcagcggcaacagcaacgccaacagccggggccccagcttctctagcggcctggtgccactgtccctgagagggagccacatgggccccatggagatctacaaaaccgtgagcgcctggaagcggcagcctgtgcgcgtgctgagcctgtttcggaatatcgataaagtcctgaaaagcctgggattcctggagagcggctctggctccggcggtggcaccctgaagtacgtggaggatgtgacaaacgtggtcagacgggatgtggagaagtggggccccttcgatctggtgtacggcagcacccaacccctgggcagctcttgtgaccggtgccctggctggtacatgtttcagttccaccggatcctgcagtacgccctgccgagacaggagtcccagcggccattcttttggattttcatggacaacttgctgctgaccgaggatgaccaggaaactaccactcggttcctgcagaccgaagccgtgaccctgcaggacgtgagaggccgggactaccagaacgccatgcgggtgtggtccaacatccctggactgaaaagcaagcacgcacctctgacccctaaagaagaggagtacctgcaggcccaggtgcggagcagaagcaagctggacgcccctaaggtggatctgctggtgaagaattgcctcctgcccctgagagagtacttcaagtatttcagccagaatagtctgcccctgggcggcccaagcagcggcgcccctcctcccagcggcggcagcccagccggctccccaacctctaccgaggagggcacctctgagtccgccacccccgagagcggccctggcacctccaccgagcccagcgagggcagcgcacccggcagccctgccggcagccccacctccacagaggagggaaccagcaccgagcccagcgaaggcagcgccccaggcaccagcaccgagcctagtgagggcggctctggcggcggcagcgcccaggagattaaacggatcaacaagatcagaagaagacttgtgaaagacagcaacaccaagaaggccggcaagacaggccccatgaaaaccctgctggttagagtgatgacacccgatctgagagagcggctggaaaacctgagaaagaagcctgaaaatatcccccagcccatcagcaatacatctagagccaacctgaataagctgctgaccgattacaccgaaatgaagaaggcgatcctgcatgtgtactgggaagagttccagaaggaccctgtgggcctgatgagccgggtggcccagcctgccagcaagaagatcgatcagaacaagctgaaacctgagatggacgagaagggcaacctgaccaccgccggctttgcctgctctcagtgtggccagcccctgttcgtgtacaagctggagcaggtgtctgagaagggcaaggcttacaccaactacttcggacggtgcaatgtggccgagcacgaaaagctgatcctgctggcccagctgaagcccgagaaggatagcgacgaagccgtgacatatagcctgggaaagtttgggcagagggccctggatttctacagcattcatgtgaccaaggagtccacccaccccgtgaagcccctggcccagatcgccggaaacagatacgcctccggacctgtgggaaaggccctgagcgacgcatgtatgggcacaatcgcctccttcctgtctaagtaccaggacatcatcatcgaacaccagaaggtggtgaagggcaaccagaagagactggagagcctgcgggagctggccggcaaggaaaacctggaataccctagcgtgaccctgccacctcagcctcacaccaaggagggcgttgatgcctacaacgaagtgatcgcccgggtgcgaatgtgggtgaacctgaacctgtggcagaagctgaagctaagcagagatgatgccaagcctctgctgagactgaagggattcccttcctttcctctggtcgagagacaggccaacgaagtggactggtgggacatggtgtgtaacgtgaagaagctgatcaacgagaaaaaggaggatggcaaggtgttttggcagaatctggctggctacaagagacaggaagccctgagaccatacctgagcagcgaggaagatcggaagaagggaaagaaattcgctcggtaccagctgggcgacctgctgctgcacctggaaaagaagcacggcgaggactggggaaaggtgtacgacgaggcctgggagcggattgacaagaaagtggaaggcctgagcaagcacatcaagctggaagaggaacggagaagcgaggacgcccagagcaaggccgccctgaccgactggctgcgggctaaggccagcttcgtgatcgagggcctgaaggaggccgacaaggacgagttctgcagatgcgagctgaagctgcagaagtggtacggggacctgcggggaaagcccttcgccatcgaagccgagaacagcatcctggacatcagcggcttcagcaagcagtacaactgtgccttcatctggcagaaggacggcgtgaagaagctgaacctgtacctgatcatcaactacttcaagggcggcaagctgcggttcaagaagatcaaacctgaagccttcgaagccaacagattctacaccgtgatcaacaaaaagagcggcgagatcgtgcccatggaggtgaacttcaacttcgacgaccccaacctgatcatcctgcctctggcctttggcaagagacagggcagagaattcatctggaacgacctgctgtccctggaaaccggcagcctgaagctggccaacggaagagtgatcgagaagacactgtacaacagaagaacccggcaggatgagcctgccctgttcgtggccctgaccttcgagcggcgggaggtcctggactcctccaatatcaaaccaatgaacctgatcggcgtggcaagaggcgaaaacatccccgccgtgatcgccctgaccgaccccgagggctgcccactgagccggtttaaggatagcctgggaaacccaacccacatcctgagaatcggcgagagctataaggagaagcagcggaccatccaggccaagaaggaggtggagcagcggagagccggcggctacagccggaagtacgccagcaaagccaagaatctggcagacgatatggtgagaaacaccgctagagatctgctgtactacgccgtgacccaggatgccatgctgatcttcgccaacctgagccggggcttcggccggcagggcaagcggaccttcatggccgagagacagtacacacggatggaggactggctgaccgccaagctggcctacgagggcctgagcaagacctacctgtccaagacactggcccagtacacctccaagacatgcagcaactgtgggtttaccatcaccagcgccgactacgacagggtgctggagaagctgaagaagacagcaacaggctggatgaccacaattaacggcaaggagctgaaggtggagggccagattacctactacaacagatacaagagacagaacgtagtcaaggacctgtccgtcgagctggatagactgagcgaagaatctgtgaacaacgacatctcctcctggacaaagggcagaagcggagaagctctgagcctcctgaagaaaagattctcccatagacccgtgcaggagaagttcgtgtgcctgaactgcggcttcgagacacacgcagccgagcaagccgccctgaacatcgccagatcctggctgttcctgcggagccaggagtacaagaaataccagacaaacaagacaaccggcaacaccgataagagagccttcgtcgagacctggcagtccttttaccggaagaagcttaaggaggtgtggaaacctgccgtgcggtctggcggatctggcggaggctccacaagcgcccaggagagcgtgatgttcagcgacgtgagcatcgacttcagccaggaggagtgggagtgcctgaacgacgaccagagggacctgtacagggacgtgatgctggagaactacagcaacctggtgagcatggccggccacagcatcagcaagcccaacgtgatcagctacctggagcagggcaaggagccctggctggtggacagggagatcaccagcggccagtggcccgtgctggagagcaccagccccaagaaaaagagaaaagtctaagctgccttctgcggggcttgccttctggccatgcccttcttctctcccttgcacctgtacctcttggtctttgaataaagcctgagtaggaaggctagcaaaaaaaaaaaaaaaaaaaaaaaaaaaaaaaaaaaaaaaaaaaaaaaaaaaaaaaaaaaaaaaaaaaaaaaaaaaaaaaa

SEQ ID NO: 6661 - RNA, 5797 nt, synthetic construct
  source 1..5797: mol_type = other RNA
aggaaataagagagaaaagaagagtaagaagaaatataagagccaccatggcccctaagaagaagcgtaaagtgagccggatggaacgcctcgtctacgaggtgcggcagaagtgcagaaacatcgaggacatctgcatctcctgcggatctctgaacgtgaccctggagcacccactgttcatcggcggcatgtgccagaactgtaaaaactgttttctggagtgtgcctatcaatacgacgatgacggctaccagagctactgcaccatctgttgcggcggaagagaggtgctgatgtgtggaaataacaactgctgccggtgcttctgcgtggaatgcgtggacctgctggtgggccccggcgccgcccaggccgctattaaggaagatccttggaactgctacatgtgcggccacaagggcacatacggcctgctgagacggagagaggactggcctagcagactgcagatgttcttcgccaataaccacgaccaggagttcgacccccctaaggtgtaccctcccgtccccgccgagaagagaaagcccatccgggtcctgagcctgttcgatggcatcgccaccggtctgctggtgctgaaggacctgggcatccaggtggataggtacattgcctccgaggtgtgcgaggactccatcaccgtgggaatggtgcgtcatcagggcaagatcatgtacgtgggcgacgtgcggagcgtgacacagaagcatatccaggagtggggccctttcgacctggtgatcggcggcagcccttgcaatgacctgagcatcgtgaacccagcccggaagggcctgtacgagggaaccggcagactgttcttcgagttttacagactgctgcacgacgcccggcctaaggaaggcgacgaccggcccttcttttggctgttcgagaatgtggtggccatgggagtcagcgacaagcgggatattagccggttcctggagagcaaccccgtgatgatcgatgccaaggaagtgagcgccgcccaccgggccagatacttctggggcaatctgcctggcatgaacagacccctggccagcaccgtgaacgacaagctggagctgcaggagtgcctggagcacggccggatcgccaagttcagcaaggtgagaaccatcaccacccgaagcaacagcatcaaacaaggcaaggaccagcactttcctgtgttcatgaacgagaaggaggacatcctgtggtgtaccgagatggagagagtgttcgggttcccagtccactacacagatgtcagcaacatgtctagactggccagacagagactgctgggaagaagctggtccgtccctgtgatcagacacctgttcgcccctctgaaggagtacttcgcctgcgtgagcagcggcaacagcaacgccaacagccggggccccagcttctctagcggcctggtgccactgtccctgagagggagccacatgggccccatggagatctacaaaaccgtgagcgcctggaagcggcagcctgtgcgcgtgctgagcctgtttcggaatatcgataaagtcctgaaaagcctgggattcctggagagcggctctggctccggcggtggcaccctgaagtacgtggaggatgtgacaaacgtggtcagacgggatgtggagaagtggggccccttcgatctggtgtacggcagcacccaacccctgggcagctcttgtgaccggtgccctggctggtacatgtttcagttccaccggatcctgcagtacgccctgccgagacaggagtcccagcggccattcttttggattttcatggacaacttgctgctgaccgaggatgaccaggaaactaccactcggttcctgcagaccgaagccgtgaccctgcaggacgtgagaggccgggactaccagaacgccatgcgggtgtggtccaacatccctggactgaaaagcaagcacgcacctctgacccctaaagaagaggagtacctgcaggcccaggtgcggagcagaagcaagctggacgcccctaaggtggatctgctggtgaagaattgcctcctgcccctgagagagtacttcaagtatttcagccagaatagtctgcccctgggcggcccaagcagcggcgcccctcctcccagcggcggcagcccagccggctccccaacctctaccgaggagggcacctctgagtccgccacccccgagagcggccctggcacctccaccgagcccagcgagggcagcgcacccggcagccctgccggcagccccacctccacagaggagggaaccagcaccgagcccagcgaaggcagcgccccaggcaccagcaccgagcctagtgagggcggctctggcggcggcagcgcccaggagattaaacggatcaacaagatcagaagaagacttgtgaaagacagcaacaccaagaaggccggcaagacaggccccatgaaaaccctgctggttagagtgatgacacccgatctgagagagcggctggaaaacctgagaaagaagcctgaaaatatcccccagcccatcagcaatacatctagagccaacctgaataagctgctgaccgattacaccgaaatgaagaaggcgatcctgcatgtgtactgggaagagttccagaaggaccctgtgggcctgatgagccgggtggcccagcctgccagcaagaagatcgatcagaacaagctgaaacctgagatggacgagaagggcaacctgaccaccgccggctttgcctgctctcagtgtggccagcccctgttcgtgtacaagctggagcaggtgtctgagaagggcaaggcttacaccaactacttcggacggtgcaatgtggccgagcacgaaaagctgatcctgctggcccagctgaagcccgagaaggatagcgacgaagccgtgacatatagcctgggaaagtttgggcagagggccctggatttctacagcattcatgtgaccaaggagtccacccaccccgtgaagcccctggcccagatcgccggaaacagatacgcctccggacctgtgggaaaggccctgagcgacgcatgtatgggcacaatcgcctccttcctgtctaagtaccaggacatcatcatcgaacaccagaaggtggtgaagggcaaccagaagagactggagagcctgcgggagctggccggcaaggaaaacctggaataccctagcgtgaccctgccacctcagcctcacaccaaggagggcgttgatgcctacaacgaagtgatcgcccgggtgcgaatgtgggtgaacctgaacctgtggcagaagctgaagctaagcagagatgatgccaagcctctgctgagactgaagggattcccttcctttcctctggtcgagagacaggccaacgaagtggactggtgggacatggtgtgtaacgtgaagaagctgatcaacgagaaaaaggaggatggcaaggtgttttggcagaatctggctggctacaagagacaggaagccctgagaccatacctgagcagcgaggaagatcggaagaagggaaagaaattcgctcggtaccagctgggcgacctgctgctgcacctggaaaagaagcacggcgaggactggggaaaggtgtacgacgaggcctgggagcggattgacaagaaagtggaaggcctgagcaagcacatcaagctggaagaggaacggagaagcgaggacgcccagagcaaggccgccctgaccgactggctgcgggctaaggccagcttcgtgatcgagggcctgaaggaggccgacaaggacgagttctgcagatgcgagctgaagctgcagaagtggtacggggacctgcggggaaagcccttcgccatcgaagccgagaacagcatcctggacatcagcggcttcagcaagcagtacaactgtgccttcatctggcagaaggacggcgtgaagaagctgaacctgtacctgatcatcaactacttcaagggcggcaagctgcggttcaagaagatcaaacctgaagccttcgaagccaacagattctacaccgtgatcaacaaaaagagcggcgagatcgtgcccatggaggtgaacttcaacttcgacgaccccaacctgatcatcctgcctctggcctttggcaagagacagggcagagaattcatctggaacgacctgctgtccctggaaaccggcagcctgaagctggccaacggaagagtgatcgagaagacactgtacaacagaagaacccggcaggatgagcctgccctgttcgtggccctgaccttcgagcggcgggaggtcctggactcctccaatatcaaaccaatgaacctgatcggcgtggcaagaggcgaaaacatccccgccgtgatcgccctgaccgaccccgagggctgcccactgagccggtttaaggatagcctgggaaacccaacccacatcctgagaatcggcgagagctataaggagaagcagcggaccatccaggccaagaaggaggtggagcagcggagagccggcggctacagccggaagtacgccagcaaagccaagaatctggcagacgatatggtgagaaacaccgctagagatctgctgtactacgccgtgacccaggatgccatgctgatcttcgccaacctgagccggggcttcggccggcagggcaagcggaccttcatggccgagagacagtacacacggatggaggactggctgaccgccaagctggcctacgagggcctgagcaagacctacctgtccaagacactggcccagtacacctccaagacatgcagcaactgtgggtttaccatcaccagcgccgactacgacagggtgctggagaagctgaagaagacagcaacaggctggatgaccacaattaacggcaaggagctgaaggtggagggccagattacctactacaacagatacaagagacagaacgtagtcaaggacctgtccgtcgagctggatagactgagcgaagaatctgtgaacaacgacatctcctcctggacaaagggcagaagcggagaagctctgagcctcctgaagaaaagattctcccatagacccgtgcaggagaagttcgtgtgcctgaactgcggcttcgagacacacgcagccgagcaagccgccctgaacatcgccagatcctggctgttcctgcggagccaggagtacaagaaataccagacaaacaagacaaccggcaacaccgataagagagccttcgtcgagacctggcagtccttttaccggaagaagcttaaggaggtgtggaaacctgccgtgcggtctggcggatctggcggaggctccacaagcatggccctggtgaccttcagggacgtggccatcgacttcagccagaaggagtgggagtgcctggacaccacccagaggaagctgtacagggacgtgatgctggagaactacaacaacctggtgagcctgggctacagcggcagcaagcccgacgtgatcaccctgctggagcagggcaaggagccctgcgtggccgccagggacgtgaccggcaggcagtgccccggcctgctgagcaggcacaccagccccaagaaaaagagaaaagtctaagctgccttctgcggggcttgccttctggccatgcccttcttctctcccttgcacctgtacctcttggtctttgaataaagcctgagtaggaaggctagcaaaaaaaaaaaaaaaaaaaaaaaaaaaaaaaaaaaaaaaaaaaaaaaaaaaaaaaaaaaaaaaaaaaaaaaaaaaaaaaa

SEQ ID NO: 6662 - RNA, 5797 nt, synthetic construct
  source 1..5797: mol_type = other RNA
aggaaataagagagaaaagaagagtaagaagaaatataagagccaccatggcccctaagaagaagcgtaaagtgagccggatggaacgcctcgtctacgaggtgcggcagaagtgcagaaacatcgaggacatctgcatctcctgcggatctctgaacgtgaccctggagcacccactgttcatcggcggcatgtgccagaactgtaaaaactgttttctggagtgtgcctatcaatacgacgatgacggctaccagagctactgcaccatctgttgcggcggaagagaggtgctgatgtgtggaaataacaactgctgccggtgcttctgcgtggaatgcgtggacctgctggtgggccccggcgccgcccaggccgctattaaggaagatccttggaactgctacatgtgcggccacaagggcacatacggcctgctgagacggagagaggactggcctagcagactgcagatgttcttcgccaataaccacgaccaggagttcgacccccctaaggtgtaccctcccgtccccgccgagaagagaaagcccatccgggtcctgagcctgttcgatggcatcgccaccggtctgctggtgctgaaggacctgggcatccaggtggataggtacattgcctccgaggtgtgcgaggactccatcaccgtgggaatggtgcgtcatcagggcaagatcatgtacgtgggcgacgtgcggagcgtgacacagaagcatatccaggagtggggccctttcgacctggtgatcggcggcagcccttgcaatgacctgagcatcgtgaacccagcccggaagggcctgtacgagggaaccggcagactgttcttcgagttttacagactgctgcacgacgcccggcctaaggaaggcgacgaccggcccttcttttggctgttcgagaatgtggtggccatgggagtcagcgacaagcgggatattagccggttcctggagagcaaccccgtgatgatcgatgccaaggaagtgagcgccgcccaccgggccagatacttctggggcaatctgcctggcatgaacagacccctggccagcaccgtgaacgacaagctggagctgcaggagtgcctggagcacggccggatcgccaagttcagcaaggtgagaaccatcaccacccgaagcaacagcatcaaacaaggcaaggaccagcactttcctgtgttcatgaacgagaaggaggacatcctgtggtgtaccgagatggagagagtgttcgggttcccagtccactacacagatgtcagcaacatgtctagactggccagacagagactgctgggaagaagctggtccgtccctgtgatcagacacctgttcgcccctctgaaggagtacttcgcctgcgtgagcagcggcaacagcaacgccaacagccggggccccagcttctctagcggcctggtgccactgtccctgagagggagccacatgggccccatggagatctacaaaaccgtgagcgcctggaagcggcagcctgtgcgcgtgctgagcctgtttcggaatatcgataaagtcctgaaaagcctgggattcctggagagcggctctggctccggcggtggcaccctgaagtacgtggaggatgtgacaaacgtggtcagacgggatgtggagaagtggggccccttcgatctggtgtacggcagcacccaacccctgggcagctcttgtgaccggtgccctggctggtacatgtttcagttccaccggatcctgcagtacgccctgccgagacaggagtcccagcggccattcttttggattttcatggacaacttgctgctgaccgaggatgaccaggaaactaccactcggttcctgcagaccgaagccgtgaccctgcaggacgtgagaggccgggactaccagaacgccatgcgggtgtggtccaacatccctggactgaaaagcaagcacgcacctctgacccctaaagaagaggagtacctgcaggcccaggtgcggagcagaagcaagctggacgcccctaaggtggatctgctggtgaagaattgcctcctgcccctgagagagtacttcaagtatttcagccagaatagtctgcccctgggcggcccaagcagcggcgcccctcctcccagcggcggcagcccagccggctccccaacctctaccgaggagggcacctctgagtccgccacccccgagagcggccctggcacctccaccgagcccagcgagggcagcgcacccggcagccctgccggcagccccacctccacagaggagggaaccagcaccgagcccagcgaaggcagcgccccaggcaccagcaccgagcctagtgagggcggctctggcggcggcagcgcccaggagattaaacggatcaacaagatcagaagaagacttgtgaaagacagcaacaccaagaaggccggcaagacaggccccatgaaaaccctgctggttagagtgatgacacccgatctgagagagcggctggaaaacctgagaaagaagcctgaaaatatcccccagcccatcagcaatacatctagagccaacctgaataagctgctgaccgattacaccgaaatgaagaaggcgatcctgcatgtgtactgggaagagttccagaaggaccctgtgggcctgatgagccgggtggcccagcctgccagcaagaagatcgatcagaacaagctgaaacctgagatggacgagaagggcaacctgaccaccgccggctttgcctgctctcagtgtggccagcccctgttcgtgtacaagctggagcaggtgtctgagaagggcaaggcttacaccaactacttcggacggtgcaatgtggccgagcacgaaaagctgatcctgctggcccagctgaagcccgagaaggatagcgacgaagccgtgacatatagcctgggaaagtttgggcagagggccctggatttctacagcattcatgtgaccaaggagtccacccaccccgtgaagcccctggcccagatcgccggaaacagatacgcctccggacctgtgggaaaggccctgagcgacgcatgtatgggcacaatcgcctccttcctgtctaagtaccaggacatcatcatcgaacaccagaaggtggtgaagggcaaccagaagagactggagagcctgcgggagctggccggcaaggaaaacctggaataccctagcgtgaccctgccacctcagcctcacaccaaggagggcgttgatgcctacaacgaagtgatcgcccgggtgcgaatgtgggtgaacctgaacctgtggcagaagctgaagctaagcagagatgatgccaagcctctgctgagactgaagggattcccttcctttcctctggtcgagagacaggccaacgaagtggactggtgggacatggtgtgtaacgtgaagaagctgatcaacgagaaaaaggaggatggcaaggtgttttggcagaatctggctggctacaagagacaggaagccctgagaccatacctgagcagcgaggaagatcggaagaagggaaagaaattcgctcggtaccagctgggcgacctgctgctgcacctggaaaagaagcacggcgaggactggggaaaggtgtacgacgaggcctgggagcggattgacaagaaagtggaaggcctgagcaagcacatcaagctggaagaggaacggagaagcgaggacgcccagagcaaggccgccctgaccgactggctgcgggctaaggccagcttcgtgatcgagggcctgaaggaggccgacaaggacgagttctgcagatgcgagctgaagctgcagaagtggtacggggacctgcggggaaagcccttcgccatcgaagccgagaacagcatcctggacatcagcggcttcagcaagcagtacaactgtgccttcatctggcagaaggacggcgtgaagaagctgaacctgtacctgatcatcaactacttcaagggcggcaagctgcggttcaagaagatcaaacctgaagccttcgaagccaacagattctacaccgtgatcaacaaaaagagcggcgagatcgtgcccatggaggtgaacttcaacttcgacgaccccaacctgatcatcctgcctctggcctttggcaagagacagggcagagaattcatctggaacgacctgctgtccctggaaaccggcagcctgaagctggccaacggaagagtgatcgagaagacactgtacaacagaagaacccggcaggatgagcctgccctgttcgtggccctgaccttcgagcggcgggaggtcctggactcctccaatatcaaaccaatgaacctgatcggcgtggcaagaggcgaaaacatccccgccgtgatcgccctgaccgaccccgagggctgcccactgagccggtttaaggatagcctgggaaacccaacccacatcctgagaatcggcgagagctataaggagaagcagcggaccatccaggccaagaaggaggtggagcagcggagagccggcggctacagccggaagtacgccagcaaagccaagaatctggcagacgatatggtgagaaacaccgctagagatctgctgtactacgccgtgacccaggatgccatgctgatcttcgccaacctgagccggggcttcggccggcagggcaagcggaccttcatggccgagagacagtacacacggatggaggactggctgaccgccaagctggcctacgagggcctgagcaagacctacctgtccaagacactggcccagtacacctccaagacatgcagcaactgtgggtttaccatcaccagcgccgactacgacagggtgctggagaagctgaagaagacagcaacaggctggatgaccacaattaacggcaaggagctgaaggtggagggccagattacctactacaacagatacaagagacagaacgtagtcaaggacctgtccgtcgagctggatagactgagcgaagaatctgtgaacaacgacatctcctcctggacaaagggcagaagcggagaagctctgagcctcctgaagaaaagattctcccatagacccgtgcaggagaagttcgtgtgcctgaactgcggcttcgagacacacgcagccgagcaagccgccctgaacatcgccagatcctggctgttcctgcggagccaggagtacaagaaataccagacaaacaagacaaccggcaacaccgataagagagccttcgtcgagacctggcagtccttttaccggaagaagcttaaggaggtgtggaaacctgccgtgcggtctggcggatctggcggaggctccacaagcgccgtgacccagctgaccttcgaggacgtggccgtggacttcacccaggaggagtggaggtgcctgacccaggcccagaggaccctgtacagggacgtgatgctggacacctacggcaacctggtgagcgtgggcgtgagcccccccagcatgagcgtgatcctgcccctggagttccaggaggacccctgggtggccaagagccacgtgaccacccccggcgagctgaacggctgggagggcaccagccccaagaaaaagagaaaagtctaagctgccttctgcggggcttgccttctggccatgcccttcttctctcccttgcacctgtacctcttggtctttgaataaagcctgagtaggaaggctagcaaaaaaaaaaaaaaaaaaaaaaaaaaaaaaaaaaaaaaaaaaaaaaaaaaaaaaaaaaaaaaaaaaaaaaaaaaaaaaaa

SEQ ID NO: 6663 - RNA, 5797 nt, synthetic construct
  source 1..5797: mol_type = other RNA
aggaaataagagagaaaagaagagtaagaagaaatataagagccaccatggcccctaagaagaagcgtaaagtgagccggatggaacgcctcgtctacgaggtgcggcagaagtgcagaaacatcgaggacatctgcatctcctgcggatctctgaacgtgaccctggagcacccactgttcatcggcggcatgtgccagaactgtaaaaactgttttctggagtgtgcctatcaatacgacgatgacggctaccagagctactgcaccatctgttgcggcggaagagaggtgctgatgtgtggaaataacaactgctgccggtgcttctgcgtggaatgcgtggacctgctggtgggccccggcgccgcccaggccgctattaaggaagatccttggaactgctacatgtgcggccacaagggcacatacggcctgctgagacggagagaggactggcctagcagactgcagatgttcttcgccaataaccacgaccaggagttcgacccccctaaggtgtaccctcccgtccccgccgagaagagaaagcccatccgggtcctgagcctgttcgatggcatcgccaccggtctgctggtgctgaaggacctgggcatccaggtggataggtacattgcctccgaggtgtgcgaggactccatcaccgtgggaatggtgcgtcatcagggcaagatcatgtacgtgggcgacgtgcggagcgtgacacagaagcatatccaggagtggggccctttcgacctggtgatcggcggcagcccttgcaatgacctgagcatcgtgaacccagcccggaagggcctgtacgagggaaccggcagactgttcttcgagttttacagactgctgcacgacgcccggcctaaggaaggcgacgaccggcccttcttttggctgttcgagaatgtggtggccatgggagtcagcgacaagcgggatattagccggttcctggagagcaaccccgtgatgatcgatgccaaggaagtgagcgccgcccaccgggccagatacttctggggcaatctgcctggcatgaacagacccctggccagcaccgtgaacgacaagctggagctgcaggagtgcctggagcacggccggatcgccaagttcagcaaggtgagaaccatcaccacccgaagcaacagcatcaaacaaggcaaggaccagcactttcctgtgttcatgaacgagaaggaggacatcctgtggtgtaccgagatggagagagtgttcgggttcccagtccactacacagatgtcagcaacatgtctagactggccagacagagactgctgggaagaagctggtccgtccctgtgatcagacacctgttcgcccctctgaaggagtacttcgcctgcgtgagcagcggcaacagcaacgccaacagccggggccccagcttctctagcggcctggtgccactgtccctgagagggagccacatgggccccatggagatctacaaaaccgtgagcgcctggaagcggcagcctgtgcgcgtgctgagcctgtttcggaatatcgataaagtcctgaaaagcctgggattcctggagagcggctctggctccggcggtggcaccctgaagtacgtggaggatgtgacaaacgtggtcagacgggatgtggagaagtggggccccttcgatctggtgtacggcagcacccaacccctgggcagctcttgtgaccggtgccctggctggtacatgtttcagttccaccggatcctgcagtacgccctgccgagacaggagtcccagcggccattcttttggattttcatggacaacttgctgctgaccgaggatgaccaggaaactaccactcggttcctgcagaccgaagccgtgaccctgcaggacgtgagaggccgggactaccagaacgccatgcgggtgtggtccaacatccctggactgaaaagcaagcacgcacctctgacccctaaagaagaggagtacctgcaggcccaggtgcggagcagaagcaagctggacgcccctaaggtggatctgctggtgaagaattgcctcctgcccctgagagagtacttcaagtatttcagccagaatagtctgcccctgggcggcccaagcagcggcgcccctcctcccagcggcggcagcccagccggctccccaacctctaccgaggagggcacctctgagtccgccacccccgagagcggccctggcacctccaccgagcccagcgagggcagcgcacccggcagccctgccggcagccccacctccacagaggagggaaccagcaccgagcccagcgaaggcagcgccccaggcaccagcaccgagcctagtgagggcggctctggcggcggcagcgcccaggagattaaacggatcaacaagatcagaagaagacttgtgaaagacagcaacaccaagaaggccggcaagacaggccccatgaaaaccctgctggttagagtgatgacacccgatctgagagagcggctggaaaacctgagaaagaagcctgaaaatatcccccagcccatcagcaatacatctagagccaacctgaataagctgctgaccgattacaccgaaatgaagaaggcgatcctgcatgtgtactgggaagagttccagaaggaccctgtgggcctgatgagccgggtggcccagcctgccagcaagaagatcgatcagaacaagctgaaacctgagatggacgagaagggcaacctgaccaccgccggctttgcctgctctcagtgtggccagcccctgttcgtgtacaagctggagcaggtgtctgagaagggcaaggcttacaccaactacttcggacggtgcaatgtggccgagcacgaaaagctgatcctgctggcccagctgaagcccgagaaggatagcgacgaagccgtgacatatagcctgggaaagtttgggcagagggccctggatttctacagcattcatgtgaccaaggagtccacccaccccgtgaagcccctggcccagatcgccggaaacagatacgcctccggacctgtgggaaaggccctgagcgacgcatgtatgggcacaatcgcctccttcctgtctaagtaccaggacatcatcatcgaacaccagaaggtggtgaagggcaaccagaagagactggagagcctgcgggagctggccggcaaggaaaacctggaataccctagcgtgaccctgccacctcagcctcacaccaaggagggcgttgatgcctacaacgaagtgatcgcccgggtgcgaatgtgggtgaacctgaacctgtggcagaagctgaagctaagcagagatgatgccaagcctctgctgagactgaagggattcccttcctttcctctggtcgagagacaggccaacgaagtggactggtgggacatggtgtgtaacgtgaagaagctgatcaacgagaaaaaggaggatggcaaggtgttttggcagaatctggctggctacaagagacaggaagccctgagaccatacctgagcagcgaggaagatcggaagaagggaaagaaattcgctcggtaccagctgggcgacctgctgctgcacctggaaaagaagcacggcgaggactggggaaaggtgtacgacgaggcctgggagcggattgacaagaaagtggaaggcctgagcaagcacatcaagctggaagaggaacggagaagcgaggacgcccagagcaaggccgccctgaccgactggctgcgggctaaggccagcttcgtgatcgagggcctgaaggaggccgacaaggacgagttctgcagatgcgagctgaagctgcagaagtggtacggggacctgcggggaaagcccttcgccatcgaagccgagaacagcatcctggacatcagcggcttcagcaagcagtacaactgtgccttcatctggcagaaggacggcgtgaagaagctgaacctgtacctgatcatcaactacttcaagggcggcaagctgcggttcaagaagatcaaacctgaagccttcgaagccaacagattctacaccgtgatcaacaaaaagagcggcgagatcgtgcccatggaggtgaacttcaacttcgacgaccccaacctgatcatcctgcctctggcctttggcaagagacagggcagagaattcatctggaacgacctgctgtccctggaaaccggcagcctgaagctggccaacggaagagtgatcgagaagacactgtacaacagaagaacccggcaggatgagcctgccctgttcgtggccctgaccttcgagcggcgggaggtcctggactcctccaatatcaaaccaatgaacctgatcggcgtggcaagaggcgaaaacatccccgccgtgatcgccctgaccgaccccgagggctgcccactgagccggtttaaggatagcctgggaaacccaacccacatcctgagaatcggcgagagctataaggagaagcagcggaccatccaggccaagaaggaggtggagcagcggagagccggcggctacagccggaagtacgccagcaaagccaagaatctggcagacgatatggtgagaaacaccgctagagatctgctgtactacgccgtgacccaggatgccatgctgatcttcgccaacctgagccggggcttcggccggcagggcaagcggaccttcatggccgagagacagtacacacggatggaggactggctgaccgccaagctggcctacgagggcctgagcaagacctacctgtccaagacactggcccagtacacctccaagacatgcagcaactgtgggtttaccatcaccagcgccgactacgacagggtgctggagaagctgaagaagacagcaacaggctggatgaccacaattaacggcaaggagctgaaggtggagggccagattacctactacaacagatacaagagacagaacgtagtcaaggacctgtccgtcgagctggatagactgagcgaagaatctgtgaacaacgacatctcctcctggacaaagggcagaagcggagaagctctgagcctcctgaagaaaagattctcccatagacccgtgcaggagaagttcgtgtgcctgaactgcggcttcgagacacacgcagccgagcaagccgccctgaacatcgccagatcctggctgttcctgcggagccaggagtacaagaaataccagacaaacaagacaaccggcaacaccgataagagagccttcgtcgagacctggcagtccttttaccggaagaagcttaaggaggtgtggaaacctgccgtgcggtctggcggatctggcggaggctccacaagccaggccgaggtgaccttcgaggacgtggccgtgctgctgagcagggaggagtggggcaggctgggccccgtgcagaagggcctgtacagggacgtgatgctggagacctacaggaacctggtgagcctgggcgccggccccaccggccccaagcccgaggtgatcacccagctggagaggggcgacgagccctgggtgctggacgtgcagggcagggagggccccaccatcgacggcagcgccaccagccccaagaaaaagagaaaagtctaagctgccttctgcggggcttgccttctggccatgcccttcttctctcccttgcacctgtacctcttggtctttgaataaagcctgagtaggaaggctagcaaaaaaaaaaaaaaaaaaaaaaaaaaaaaaaaaaaaaaaaaaaaaaaaaaaaaaaaaaaaaaaaaaaaaaaaaaaaaaaa

SEQ ID NO: 6664 - RNA, 5797 nt, synthetic construct
  source 1..5797: mol_type = other RNA
aggaaataagagagaaaagaagagtaagaagaaatataagagccaccatggcccctaagaagaagcgtaaagtgagccggatggaacgcctcgtctacgaggtgcggcagaagtgcagaaacatcgaggacatctgcatctcctgcggatctctgaacgtgaccctggagcacccactgttcatcggcggcatgtgccagaactgtaaaaactgttttctggagtgtgcctatcaatacgacgatgacggctaccagagctactgcaccatctgttgcggcggaagagaggtgctgatgtgtggaaataacaactgctgccggtgcttctgcgtggaatgcgtggacctgctggtgggccccggcgccgcccaggccgctattaaggaagatccttggaactgctacatgtgcggccacaagggcacatacggcctgctgagacggagagaggactggcctagcagactgcagatgttcttcgccaataaccacgaccaggagttcgacccccctaaggtgtaccctcccgtccccgccgagaagagaaagcccatccgggtcctgagcctgttcgatggcatcgccaccggtctgctggtgctgaaggacctgggcatccaggtggataggtacattgcctccgaggtgtgcgaggactccatcaccgtgggaatggtgcgtcatcagggcaagatcatgtacgtgggcgacgtgcggagcgtgacacagaagcatatccaggagtggggccctttcgacctggtgatcggcggcagcccttgcaatgacctgagcatcgtgaacccagcccggaagggcctgtacgagggaaccggcagactgttcttcgagttttacagactgctgcacgacgcccggcctaaggaaggcgacgaccggcccttcttttggctgttcgagaatgtggtggccatgggagtcagcgacaagcgggatattagccggttcctggagagcaaccccgtgatgatcgatgccaaggaagtgagcgccgcccaccgggccagatacttctggggcaatctgcctggcatgaacagacccctggccagcaccgtgaacgacaagctggagctgcaggagtgcctggagcacggccggatcgccaagttcagcaaggtgagaaccatcaccacccgaagcaacagcatcaaacaaggcaaggaccagcactttcctgtgttcatgaacgagaaggaggacatcctgtggtgtaccgagatggagagagtgttcgggttcccagtccactacacagatgtcagcaacatgtctagactggccagacagagactgctgggaagaagctggtccgtccctgtgatcagacacctgttcgcccctctgaaggagtacttcgcctgcgtgagcagcggcaacagcaacgccaacagccggggccccagcttctctagcggcctggtgccactgtccctgagagggagccacatgggccccatggagatctacaaaaccgtgagcgcctggaagcggcagcctgtgcgcgtgctgagcctgtttcggaatatcgataaagtcctgaaaagcctgggattcctggagagcggctctggctccggcggtggcaccctgaagtacgtggaggatgtgacaaacgtggtcagacgggatgtggagaagtggggccccttcgatctggtgtacggcagcacccaacccctgggcagctcttgtgaccggtgccctggctggtacatgtttcagttccaccggatcctgcagtacgccctgccgagacaggagtcccagcggccattcttttggattttcatggacaacttgctgctgaccgaggatgaccaggaaactaccactcggttcctgcagaccgaagccgtgaccctgcaggacgtgagaggccgggactaccagaacgccatgcgggtgtggtccaacatccctggactgaaaagcaagcacgcacctctgacccctaaagaagaggagtacctgcaggcccaggtgcggagcagaagcaagctggacgcccctaaggtggatctgctggtgaagaattgcctcctgcccctgagagagtacttcaagtatttcagccagaatagtctgcccctgggcggcccaagcagcggcgcccctcctcccagcggcggcagcccagccggctccccaacctctaccgaggagggcacctctgagtccgccacccccgagagcggccctggcacctccaccgagcccagcgagggcagcgcacccggcagccctgccggcagccccacctccacagaggagggaaccagcaccgagcccagcgaaggcagcgccccaggcaccagcaccgagcctagtgagggcggctctggcggcggcagcgcccaggagattaaacggatcaacaagatcagaagaagacttgtgaaagacagcaacaccaagaaggccggcaagacaggccccatgaaaaccctgctggttagagtgatgacacccgatctgagagagcggctggaaaacctgagaaagaagcctgaaaatatcccccagcccatcagcaatacatctagagccaacctgaataagctgctgaccgattacaccgaaatgaagaaggcgatcctgcatgtgtactgggaagagttccagaaggaccctgtgggcctgatgagccgggtggcccagcctgccagcaagaagatcgatcagaacaagctgaaacctgagatggacgagaagggcaacctgaccaccgccggctttgcctgctctcagtgtggccagcccctgttcgtgtacaagctggagcaggtgtctgagaagggcaaggcttacaccaactacttcggacggtgcaatgtggccgagcacgaaaagctgatcctgctggcccagctgaagcccgagaaggatagcgacgaagccgtgacatatagcctgggaaagtttgggcagagggccctggatttctacagcattcatgtgaccaaggagtccacccaccccgtgaagcccctggcccagatcgccggaaacagatacgcctccggacctgtgggaaaggccctgagcgacgcatgtatgggcacaatcgcctccttcctgtctaagtaccaggacatcatcatcgaacaccagaaggtggtgaagggcaaccagaagagactggagagcctgcgggagctggccggcaaggaaaacctggaataccctagcgtgaccctgccacctcagcctcacaccaaggagggcgttgatgcctacaacgaagtgatcgcccgggtgcgaatgtgggtgaacctgaacctgtggcagaagctgaagctaagcagagatgatgccaagcctctgctgagactgaagggattcccttcctttcctctggtcgagagacaggccaacgaagtggactggtgggacatggtgtgtaacgtgaagaagctgatcaacgagaaaaaggaggatggcaaggtgttttggcagaatctggctggctacaagagacaggaagccctgagaccatacctgagcagcgaggaagatcggaagaagggaaagaaattcgctcggtaccagctgggcgacctgctgctgcacctggaaaagaagcacggcgaggactggggaaaggtgtacgacgaggcctgggagcggattgacaagaaagtggaaggcctgagcaagcacatcaagctggaagaggaacggagaagcgaggacgcccagagcaaggccgccctgaccgactggctgcgggctaaggccagcttcgtgatcgagggcctgaaggaggccgacaaggacgagttctgcagatgcgagctgaagctgcagaagtggtacggggacctgcggggaaagcccttcgccatcgaagccgagaacagcatcctggacatcagcggcttcagcaagcagtacaactgtgccttcatctggcagaaggacggcgtgaagaagctgaacctgtacctgatcatcaactacttcaagggcggcaagctgcggttcaagaagatcaaacctgaagccttcgaagccaacagattctacaccgtgatcaacaaaaagagcggcgagatcgtgcccatggaggtgaacttcaacttcgacgaccccaacctgatcatcctgcctctggcctttggcaagagacagggcagagaattcatctggaacgacctgctgtccctggaaaccggcagcctgaagctggccaacggaagagtgatcgagaagacactgtacaacagaagaacccggcaggatgagcctgccctgttcgtggccctgaccttcgagcggcgggaggtcctggactcctccaatatcaaaccaatgaacctgatcggcgtggcaagaggcgaaaacatccccgccgtgatcgccctgaccgaccccgagggctgcccactgagccggtttaaggatagcctgggaaacccaacccacatcctgagaatcggcgagagctataaggagaagcagcggaccatccaggccaagaaggaggtggagcagcggagagccggcggctacagccggaagtacgccagcaaagccaagaatctggcagacgatatggtgagaaacaccgctagagatctgctgtactacgccgtgacccaggatgccatgctgatcttcgccaacctgagccggggcttcggccggcagggcaagcggaccttcatggccgagagacagtacacacggatggaggactggctgaccgccaagctggcctacgagggcctgagcaagacctacctgtccaagacactggcccagtacacctccaagacatgcagcaactgtgggtttaccatcaccagcgccgactacgacagggtgctggagaagctgaagaagacagcaacaggctggatgaccacaattaacggcaaggagctgaaggtggagggccagattacctactacaacagatacaagagacagaacgtagtcaaggacctgtccgtcgagctggatagactgagcgaagaatctgtgaacaacgacatctcctcctggacaaagggcagaagcggagaagctctgagcctcctgaagaaaagattctcccatagacccgtgcaggagaagttcgtgtgcctgaactgcggcttcgagacacacgcagccgagcaagccgccctgaacatcgccagatcctggctgttcctgcggagccaggagtacaagaaataccagacaaacaagacaaccggcaacaccgataagagagccttcgtcgagacctggcagtccttttaccggaagaagcttaaggaggtgtggaaacctgccgtgcggtctggcggatctggcggaggctccacaagccccagcgtgcccgtgaccttcagggacgtgttcgtgcagttcagcagggacgagtgggccctgctggacgacgagcagaaggagctgcaccagagcgtgatgcagagcaactacgaggtgctgatgagcctgtactgcgacctggccaagcccgaggtgctgctgcagatggagaggggcgagccctgcctgcccgccgagcccgacctgcagggcgccgccgtgagcctgaaccccgccgccaccagccccaagaaaaagagaaaagtctaagctgccttctgcggggcttgccttctggccatgcccttcttctctcccttgcacctgtacctcttggtctttgaataaagcctgagtaggaaggctagcaaaaaaaaaaaaaaaaaaaaaaaaaaaaaaaaaaaaaaaaaaaaaaaaaaaaaaaaaaaaaaaaaaaaaaaaaaaaaaaa

SEQ ID NO: 6665 - RNA, 5797 nt, synthetic construct
  source 1..5797: mol_type = other RNA
aggaaataagagagaaaagaagagtaagaagaaatataagagccaccatggcccctaagaagaagcgtaaagtgagccggatggaacgcctcgtctacgaggtgcggcagaagtgcagaaacatcgaggacatctgcatctcctgcggatctctgaacgtgaccctggagcacccactgttcatcggcggcatgtgccagaactgtaaaaactgttttctggagtgtgcctatcaatacgacgatgacggctaccagagctactgcaccatctgttgcggcggaagagaggtgctgatgtgtggaaataacaactgctgccggtgcttctgcgtggaatgcgtggacctgctggtgggccccggcgccgcccaggccgctattaaggaagatccttggaactgctacatgtgcggccacaagggcacatacggcctgctgagacggagagaggactggcctagcagactgcagatgttcttcgccaataaccacgaccaggagttcgacccccctaaggtgtaccctcccgtccccgccgagaagagaaagcccatccgggtcctgagcctgttcgatggcatcgccaccggtctgctggtgctgaaggacctgggcatccaggtggataggtacattgcctccgaggtgtgcgaggactccatcaccgtgggaatggtgcgtcatcagggcaagatcatgtacgtgggcgacgtgcggagcgtgacacagaagcatatccaggagtggggccctttcgacctggtgatcggcggcagcccttgcaatgacctgagcatcgtgaacccagcccggaagggcctgtacgagggaaccggcagactgttcttcgagttttacagactgctgcacgacgcccggcctaaggaaggcgacgaccggcccttcttttggctgttcgagaatgtggtggccatgggagtcagcgacaagcgggatattagccggttcctggagagcaaccccgtgatgatcgatgccaaggaagtgagcgccgcccaccgggccagatacttctggggcaatctgcctggcatgaacagacccctggccagcaccgtgaacgacaagctggagctgcaggagtgcctggagcacggccggatcgccaagttcagcaaggtgagaaccatcaccacccgaagcaacagcatcaaacaaggcaaggaccagcactttcctgtgttcatgaacgagaaggaggacatcctgtggtgtaccgagatggagagagtgttcgggttcccagtccactacacagatgtcagcaacatgtctagactggccagacagagactgctgggaagaagctggtccgtccctgtgatcagacacctgttcgcccctctgaaggagtacttcgcctgcgtgagcagcggcaacagcaacgccaacagccggggccccagcttctctagcggcctggtgccactgtccctgagagggagccacatgggccccatggagatctacaaaaccgtgagcgcctggaagcggcagcctgtgcgcgtgctgagcctgtttcggaatatcgataaagtcctgaaaagcctgggattcctggagagcggctctggctccggcggtggcaccctgaagtacgtggaggatgtgacaaacgtggtcagacgggatgtggagaagtggggccccttcgatctggtgtacggcagcacccaacccctgggcagctcttgtgaccggtgccctggctggtacatgtttcagttccaccggatcctgcagtacgccctgccgagacaggagtcccagcggccattcttttggattttcatggacaacttgctgctgaccgaggatgaccaggaaactaccactcggttcctgcagaccgaagccgtgaccctgcaggacgtgagaggccgggactaccagaacgccatgcgggtgtggtccaacatccctggactgaaaagcaagcacgcacctctgacccctaaagaagaggagtacctgcaggcccaggtgcggagcagaagcaagctggacgcccctaaggtggatctgctggtgaagaattgcctcctgcccctgagagagtacttcaagtatttcagccagaatagtctgcccctgggcggcccaagcagcggcgcccctcctcccagcggcggcagcccagccggctccccaacctctaccgaggagggcacctctgagtccgccacccccgagagcggccctggcacctccaccgagcccagcgagggcagcgcacccggcagccctgccggcagccccacctccacagaggagggaaccagcaccgagcccagcgaaggcagcgccccaggcaccagcaccgagcctagtgagggcggctctggcggcggcagcgcccaggagattaaacggatcaacaagatcagaagaagacttgtgaaagacagcaacaccaagaaggccggcaagacaggccccatgaaaaccctgctggttagagtgatgacacccgatctgagagagcggctggaaaacctgagaaagaagcctgaaaatatcccccagcccatcagcaatacatctagagccaacctgaataagctgctgaccgattacaccgaaatgaagaaggcgatcctgcatgtgtactgggaagagttccagaaggaccctgtgggcctgatgagccgggtggcccagcctgccagcaagaagatcgatcagaacaagctgaaacctgagatggacgagaagggcaacctgaccaccgccggctttgcctgctctcagtgtggccagcccctgttcgtgtacaagctggagcaggtgtctgagaagggcaaggcttacaccaactacttcggacggtgcaatgtggccgagcacgaaaagctgatcctgctggcccagctgaagcccgagaaggatagcgacgaagccgtgacatatagcctgggaaagtttgggcagagggccctggatttctacagcattcatgtgaccaaggagtccacccaccccgtgaagcccctggcccagatcgccggaaacagatacgcctccggacctgtgggaaaggccctgagcgacgcatgtatgggcacaatcgcctccttcctgtctaagtaccaggacatcatcatcgaacaccagaaggtggtgaagggcaaccagaagagactggagagcctgcgggagctggccggcaaggaaaacctggaataccctagcgtgaccctgccacctcagcctcacaccaaggagggcgttgatgcctacaacgaagtgatcgcccgggtgcgaatgtgggtgaacctgaacctgtggcagaagctgaagctaagcagagatgatgccaagcctctgctgagactgaagggattcccttcctttcctctggtcgagagacaggccaacgaagtggactggtgggacatggtgtgtaacgtgaagaagctgatcaacgagaaaaaggaggatggcaaggtgttttggcagaatctggctggctacaagagacaggaagccctgagaccatacctgagcagcgaggaagatcggaagaagggaaagaaattcgctcggtaccagctgggcgacctgctgctgcacctggaaaagaagcacggcgaggactggggaaaggtgtacgacgaggcctgggagcggattgacaagaaagtggaaggcctgagcaagcacatcaagctggaagaggaacggagaagcgaggacgcccagagcaaggccgccctgaccgactggctgcgggctaaggccagcttcgtgatcgagggcctgaaggaggccgacaaggacgagttctgcagatgcgagctgaagctgcagaagtggtacggggacctgcggggaaagcccttcgccatcgaagccgagaacagcatcctggacatcagcggcttcagcaagcagtacaactgtgccttcatctggcagaaggacggcgtgaagaagctgaacctgtacctgatcatcaactacttcaagggcggcaagctgcggttcaagaagatcaaacctgaagccttcgaagccaacagattctacaccgtgatcaacaaaaagagcggcgagatcgtgcccatggaggtgaacttcaacttcgacgaccccaacctgatcatcctgcctctggcctttggcaagagacagggcagagaattcatctggaacgacctgctgtccctggaaaccggcagcctgaagctggccaacggaagagtgatcgagaagacactgtacaacagaagaacccggcaggatgagcctgccctgttcgtggccctgaccttcgagcggcgggaggtcctggactcctccaatatcaaaccaatgaacctgatcggcgtggcaagaggcgaaaacatccccgccgtgatcgccctgaccgaccccgagggctgcccactgagccggtttaaggatagcctgggaaacccaacccacatcctgagaatcggcgagagctataaggagaagcagcggaccatccaggccaagaaggaggtggagcagcggagagccggcggctacagccggaagtacgccagcaaagccaagaatctggcagacgatatggtgagaaacaccgctagagatctgctgtactacgccgtgacccaggatgccatgctgatcttcgccaacctgagccggggcttcggccggcagggcaagcggaccttcatggccgagagacagtacacacggatggaggactggctgaccgccaagctggcctacgagggcctgagcaagacctacctgtccaagacactggcccagtacacctccaagacatgcagcaactgtgggtttaccatcaccagcgccgactacgacagggtgctggagaagctgaagaagacagcaacaggctggatgaccacaattaacggcaaggagctgaaggtggagggccagattacctactacaacagatacaagagacagaacgtagtcaaggacctgtccgtcgagctggatagactgagcgaagaatctgtgaacaacgacatctcctcctggacaaagggcagaagcggagaagctctgagcctcctgaagaaaagattctcccatagacccgtgcaggagaagttcgtgtgcctgaactgcggcttcgagacacacgcagccgagcaagccgccctgaacatcgccagatcctggctgttcctgcggagccaggagtacaagaaataccagacaaacaagacaaccggcaacaccgataagagagccttcgtcgagacctggcagtccttttaccggaagaagcttaaggaggtgtggaaacctgccgtgcggtctggcggatctggcggaggctccacaagcttccaggagcccgtgaccttcgaggacgtggccgtgtacttcacccagaacgagtgggccagcctgcaccccacccagagggccctgtacagggaggtgatgctggagaactacgccaacgtgaccagcctgctggccttccccttccccaagcccgccctgatcagccacctggagaggggcgaggccccctggggccccgacccctgggacaccgagatccccaggggcatcagccagggcaccagccccaagaaaaagagaaaagtctaagctgccttctgcggggcttgccttctggccatgcccttcttctctcccttgcacctgtacctcttggtctttgaataaagcctgagtaggaaggctagcaaaaaaaaaaaaaaaaaaaaaaaaaaaaaaaaaaaaaaaaaaaaaaaaaaaaaaaaaaaaaaaaaaaaaaaaaaaaaaaa

SEQ ID NO: 6666 - RNA, 5797 nt, synthetic construct
  source 1..5797: mol_type = other RNA
aggaaataagagagaaaagaagagtaagaagaaatataagagccaccatggcccctaagaagaagcgtaaagtgagccggatggaacgcctcgtctacgaggtgcggcagaagtgcagaaacatcgaggacatctgcatctcctgcggatctctgaacgtgaccctggagcacccactgttcatcggcggcatgtgccagaactgtaaaaactgttttctggagtgtgcctatcaatacgacgatgacggctaccagagctactgcaccatctgttgcggcggaagagaggtgctgatgtgtggaaataacaactgctgccggtgcttctgcgtggaatgcgtggacctgctggtgggccccggcgccgcccaggccgctattaaggaagatccttggaactgctacatgtgcggccacaagggcacatacggcctgctgagacggagagaggactggcctagcagactgcagatgttcttcgccaataaccacgaccaggagttcgacccccctaaggtgtaccctcccgtccccgccgagaagagaaagcccatccgggtcctgagcctgttcgatggcatcgccaccggtctgctggtgctgaaggacctgggcatccaggtggataggtacattgcctccgaggtgtgcgaggactccatcaccgtgggaatggtgcgtcatcagggcaagatcatgtacgtgggcgacgtgcggagcgtgacacagaagcatatccaggagtggggccctttcgacctggtgatcggcggcagcccttgcaatgacctgagcatcgtgaacccagcccggaagggcctgtacgagggaaccggcagactgttcttcgagttttacagactgctgcacgacgcccggcctaaggaaggcgacgaccggcccttcttttggctgttcgagaatgtggtggccatgggagtcagcgacaagcgggatattagccggttcctggagagcaaccccgtgatgatcgatgccaaggaagtgagcgccgcccaccgggccagatacttctggggcaatctgcctggcatgaacagacccctggccagcaccgtgaacgacaagctggagctgcaggagtgcctggagcacggccggatcgccaagttcagcaaggtgagaaccatcaccacccgaagcaacagcatcaaacaaggcaaggaccagcactttcctgtgttcatgaacgagaaggaggacatcctgtggtgtaccgagatggagagagtgttcgggttcccagtccactacacagatgtcagcaacatgtctagactggccagacagagactgctgggaagaagctggtccgtccctgtgatcagacacctgttcgcccctctgaaggagtacttcgcctgcgtgagcagcggcaacagcaacgccaacagccggggccccagcttctctagcggcctggtgccactgtccctgagagggagccacatgggccccatggagatctacaaaaccgtgagcgcctggaagcggcagcctgtgcgcgtgctgagcctgtttcggaatatcgataaagtcctgaaaagcctgggattcctggagagcggctctggctccggcggtggcaccctgaagtacgtggaggatgtgacaaacgtggtcagacgggatgtggagaagtggggccccttcgatctggtgtacggcagcacccaacccctgggcagctcttgtgaccggtgccctggctggtacatgtttcagttccaccggatcctgcagtacgccctgccgagacaggagtcccagcggccattcttttggattttcatggacaacttgctgctgaccgaggatgaccaggaaactaccactcggttcctgcagaccgaagccgtgaccctgcaggacgtgagaggccgggactaccagaacgccatgcgggtgtggtccaacatccctggactgaaaagcaagcacgcacctctgacccctaaagaagaggagtacctgcaggcccaggtgcggagcagaagcaagctggacgcccctaaggtggatctgctggtgaagaattgcctcctgcccctgagagagtacttcaagtatttcagccagaatagtctgcccctgggcggcccaagcagcggcgcccctcctcccagcggcggcagcccagccggctccccaacctctaccgaggagggcacctctgagtccgccacccccgagagcggccctggcacctccaccgagcccagcgagggcagcgcacccggcagccctgccggcagccccacctccacagaggagggaaccagcaccgagcccagcgaaggcagcgccccaggcaccagcaccgagcctagtgagggcggctctggcggcggcagcgcccaggagattaaacggatcaacaagatcagaagaagacttgtgaaagacagcaacaccaagaaggccggcaagacaggccccatgaaaaccctgctggttagagtgatgacacccgatctgagagagcggctggaaaacctgagaaagaagcctgaaaatatcccccagcccatcagcaatacatctagagccaacctgaataagctgctgaccgattacaccgaaatgaagaaggcgatcctgcatgtgtactgggaagagttccagaaggaccctgtgggcctgatgagccgggtggcccagcctgccagcaagaagatcgatcagaacaagctgaaacctgagatggacgagaagggcaacctgaccaccgccggctttgcctgctctcagtgtggccagcccctgttcgtgtacaagctggagcaggtgtctgagaagggcaaggcttacaccaactacttcggacggtgcaatgtggccgagcacgaaaagctgatcctgctggcccagctgaagcccgagaaggatagcgacgaagccgtgacatatagcctgggaaagtttgggcagagggccctggatttctacagcattcatgtgaccaaggagtccacccaccccgtgaagcccctggcccagatcgccggaaacagatacgcctccggacctgtgggaaaggccctgagcgacgcatgtatgggcacaatcgcctccttcctgtctaagtaccaggacatcatcatcgaacaccagaaggtggtgaagggcaaccagaagagactggagagcctgcgggagctggccggcaaggaaaacctggaataccctagcgtgaccctgccacctcagcctcacaccaaggagggcgttgatgcctacaacgaagtgatcgcccgggtgcgaatgtgggtgaacctgaacctgtggcagaagctgaagctaagcagagatgatgccaagcctctgctgagactgaagggattcccttcctttcctctggtcgagagacaggccaacgaagtggactggtgggacatggtgtgtaacgtgaagaagctgatcaacgagaaaaaggaggatggcaaggtgttttggcagaatctggctggctacaagagacaggaagccctgagaccatacctgagcagcgaggaagatcggaagaagggaaagaaattcgctcggtaccagctgggcgacctgctgctgcacctggaaaagaagcacggcgaggactggggaaaggtgtacgacgaggcctgggagcggattgacaagaaagtggaaggcctgagcaagcacatcaagctggaagaggaacggagaagcgaggacgcccagagcaaggccgccctgaccgactggctgcgggctaaggccagcttcgtgatcgagggcctgaaggaggccgacaaggacgagttctgcagatgcgagctgaagctgcagaagtggtacggggacctgcggggaaagcccttcgccatcgaagccgagaacagcatcctggacatcagcggcttcagcaagcagtacaactgtgccttcatctggcagaaggacggcgtgaagaagctgaacctgtacctgatcatcaactacttcaagggcggcaagctgcggttcaagaagatcaaacctgaagccttcgaagccaacagattctacaccgtgatcaacaaaaagagcggcgagatcgtgcccatggaggtgaacttcaacttcgacgaccccaacctgatcatcctgcctctggcctttggcaagagacagggcagagaattcatctggaacgacctgctgtccctggaaaccggcagcctgaagctggccaacggaagagtgatcgagaagacactgtacaacagaagaacccggcaggatgagcctgccctgttcgtggccctgaccttcgagcggcgggaggtcctggactcctccaatatcaaaccaatgaacctgatcggcgtggcaagaggcgaaaacatccccgccgtgatcgccctgaccgaccccgagggctgcccactgagccggtttaaggatagcctgggaaacccaacccacatcctgagaatcggcgagagctataaggagaagcagcggaccatccaggccaagaaggaggtggagcagcggagagccggcggctacagccggaagtacgccagcaaagccaagaatctggcagacgatatggtgagaaacaccgctagagatctgctgtactacgccgtgacccaggatgccatgctgatcttcgccaacctgagccggggcttcggccggcagggcaagcggaccttcatggccgagagacagtacacacggatggaggactggctgaccgccaagctggcctacgagggcctgagcaagacctacctgtccaagacactggcccagtacacctccaagacatgcagcaactgtgggtttaccatcaccagcgccgactacgacagggtgctggagaagctgaagaagacagcaacaggctggatgaccacaattaacggcaaggagctgaaggtggagggccagattacctactacaacagatacaagagacagaacgtagtcaaggacctgtccgtcgagctggatagactgagcgaagaatctgtgaacaacgacatctcctcctggacaaagggcagaagcggagaagctctgagcctcctgaagaaaagattctcccatagacccgtgcaggagaagttcgtgtgcctgaactgcggcttcgagacacacgcagccgagcaagccgccctgaacatcgccagatcctggctgttcctgcggagccaggagtacaagaaataccagacaaacaagacaaccggcaacaccgataagagagccttcgtcgagacctggcagtccttttaccggaagaagcttaaggaggtgtggaaacctgccgtgcggtctggcggatctggcggaggctccacaagcggcgaggaggccgtgaccttcagggacgtggccctggacttcacctgggaggagtggggctgcctgagcgccgcccagagggagctgtacaaggacgtgatgctggagaactacaggaacctggtgagcctgggcctgcccggccccaagcccggcctgatcagctggctggagggcgaggaggagccccacccctgggacagcctggtgcacgccgccaggagcaccagcctgagcaaggccaccagccccaagaaaaagagaaaagtctaagctgccttctgcggggcttgccttctggccatgcccttcttctctcccttgcacctgtacctcttggtctttgaataaagcctgagtaggaaggctagcaaaaaaaaaaaaaaaaaaaaaaaaaaaaaaaaaaaaaaaaaaaaaaaaaaaaaaaaaaaaaaaaaaaaaaaaaaaaaaaa

SEQ ID NO: 6667 - RNA, 5797 nt, synthetic construct
  source 1..5797: mol_type = other RNA
aggaaataagagagaaaagaagagtaagaagaaatataagagccaccatggcccctaagaagaagcgtaaagtgagccggatggaacgcctcgtctacgaggtgcggcagaagtgcagaaacatcgaggacatctgcatctcctgcggatctctgaacgtgaccctggagcacccactgttcatcggcggcatgtgccagaactgtaaaaactgttttctggagtgtgcctatcaatacgacgatgacggctaccagagctactgcaccatctgttgcggcggaagagaggtgctgatgtgtggaaataacaactgctgccggtgcttctgcgtggaatgcgtggacctgctggtgggccccggcgccgcccaggccgctattaaggaagatccttggaactgctacatgtgcggccacaagggcacatacggcctgctgagacggagagaggactggcctagcagactgcagatgttcttcgccaataaccacgaccaggagttcgacccccctaaggtgtaccctcccgtccccgccgagaagagaaagcccatccgggtcctgagcctgttcgatggcatcgccaccggtctgctggtgctgaaggacctgggcatccaggtggataggtacattgcctccgaggtgtgcgaggactccatcaccgtgggaatggtgcgtcatcagggcaagatcatgtacgtgggcgacgtgcggagcgtgacacagaagcatatccaggagtggggccctttcgacctggtgatcggcggcagcccttgcaatgacctgagcatcgtgaacccagcccggaagggcctgtacgagggaaccggcagactgttcttcgagttttacagactgctgcacgacgcccggcctaaggaaggcgacgaccggcccttcttttggctgttcgagaatgtggtggccatgggagtcagcgacaagcgggatattagccggttcctggagagcaaccccgtgatgatcgatgccaaggaagtgagcgccgcccaccgggccagatacttctggggcaatctgcctggcatgaacagacccctggccagcaccgtgaacgacaagctggagctgcaggagtgcctggagcacggccggatcgccaagttcagcaaggtgagaaccatcaccacccgaagcaacagcatcaaacaaggcaaggaccagcactttcctgtgttcatgaacgagaaggaggacatcctgtggtgtaccgagatggagagagtgttcgggttcccagtccactacacagatgtcagcaacatgtctagactggccagacagagactgctgggaagaagctggtccgtccctgtgatcagacacctgttcgcccctctgaaggagtacttcgcctgcgtgagcagcggcaacagcaacgccaacagccggggccccagcttctctagcggcctggtgccactgtccctgagagggagccacatgggccccatggagatctacaaaaccgtgagcgcctggaagcggcagcctgtgcgcgtgctgagcctgtttcggaatatcgataaagtcctgaaaagcctgggattcctggagagcggctctggctccggcggtggcaccctgaagtacgtggaggatgtgacaaacgtggtcagacgggatgtggagaagtggggccccttcgatctggtgtacggcagcacccaacccctgggcagctcttgtgaccggtgccctggctggtacatgtttcagttccaccggatcctgcagtacgccctgccgagacaggagtcccagcggccattcttttggattttcatggacaacttgctgctgaccgaggatgaccaggaaactaccactcggttcctgcagaccgaagccgtgaccctgcaggacgtgagaggccgggactaccagaacgccatgcgggtgtggtccaacatccctggactgaaaagcaagcacgcacctctgacccctaaagaagaggagtacctgcaggcccaggtgcggagcagaagcaagctggacgcccctaaggtggatctgctggtgaagaattgcctcctgcccctgagagagtacttcaagtatttcagccagaatagtctgcccctgggcggcccaagcagcggcgcccctcctcccagcggcggcagcccagccggctccccaacctctaccgaggagggcacctctgagtccgccacccccgagagcggccctggcacctccaccgagcccagcgagggcagcgcacccggcagccctgccggcagccccacctccacagaggagggaaccagcaccgagcccagcgaaggcagcgccccaggcaccagcaccgagcctagtgagggcggctctggcggcggcagcgcccaggagattaaacggatcaacaagatcagaagaagacttgtgaaagacagcaacaccaagaaggccggcaagacaggccccatgaaaaccctgctggttagagtgatgacacccgatctgagagagcggctggaaaacctgagaaagaagcctgaaaatatcccccagcccatcagcaatacatctagagccaacctgaataagctgctgaccgattacaccgaaatgaagaaggcgatcctgcatgtgtactgggaagagttccagaaggaccctgtgggcctgatgagccgggtggcccagcctgccagcaagaagatcgatcagaacaagctgaaacctgagatggacgagaagggcaacctgaccaccgccggctttgcctgctctcagtgtggccagcccctgttcgtgtacaagctggagcaggtgtctgagaagggcaaggcttacaccaactacttcggacggtgcaatgtggccgagcacgaaaagctgatcctgctggcccagctgaagcccgagaaggatagcgacgaagccgtgacatatagcctgggaaagtttgggcagagggccctggatttctacagcattcatgtgaccaaggagtccacccaccccgtgaagcccctggcccagatcgccggaaacagatacgcctccggacctgtgggaaaggccctgagcgacgcatgtatgggcacaatcgcctccttcctgtctaagtaccaggacatcatcatcgaacaccagaaggtggtgaagggcaaccagaagagactggagagcctgcgggagctggccggcaaggaaaacctggaataccctagcgtgaccctgccacctcagcctcacaccaaggagggcgttgatgcctacaacgaagtgatcgcccgggtgcgaatgtgggtgaacctgaacctgtggcagaagctgaagctaagcagagatgatgccaagcctctgctgagactgaagggattcccttcctttcctctggtcgagagacaggccaacgaagtggactggtgggacatggtgtgtaacgtgaagaagctgatcaacgagaaaaaggaggatggcaaggtgttttggcagaatctggctggctacaagagacaggaagccctgagaccatacctgagcagcgaggaagatcggaagaagggaaagaaattcgctcggtaccagctgggcgacctgctgctgcacctggaaaagaagcacggcgaggactggggaaaggtgtacgacgaggcctgggagcggattgacaagaaagtggaaggcctgagcaagcacatcaagctggaagaggaacggagaagcgaggacgcccagagcaaggccgccctgaccgactggctgcgggctaaggccagcttcgtgatcgagggcctgaaggaggccgacaaggacgagttctgcagatgcgagctgaagctgcagaagtggtacggggacctgcggggaaagcccttcgccatcgaagccgagaacagcatcctggacatcagcggcttcagcaagcagtacaactgtgccttcatctggcagaaggacggcgtgaagaagctgaacctgtacctgatcatcaactacttcaagggcggcaagctgcggttcaagaagatcaaacctgaagccttcgaagccaacagattctacaccgtgatcaacaaaaagagcggcgagatcgtgcccatggaggtgaacttcaacttcgacgaccccaacctgatcatcctgcctctggcctttggcaagagacagggcagagaattcatctggaacgacctgctgtccctggaaaccggcagcctgaagctggccaacggaagagtgatcgagaagacactgtacaacagaagaacccggcaggatgagcctgccctgttcgtggccctgaccttcgagcggcgggaggtcctggactcctccaatatcaaaccaatgaacctgatcggcgtggcaagaggcgaaaacatccccgccgtgatcgccctgaccgaccccgagggctgcccactgagccggtttaaggatagcctgggaaacccaacccacatcctgagaatcggcgagagctataaggagaagcagcggaccatccaggccaagaaggaggtggagcagcggagagccggcggctacagccggaagtacgccagcaaagccaagaatctggcagacgatatggtgagaaacaccgctagagatctgctgtactacgccgtgacccaggatgccatgctgatcttcgccaacctgagccggggcttcggccggcagggcaagcggaccttcatggccgagagacagtacacacggatggaggactggctgaccgccaagctggcctacgagggcctgagcaagacctacctgtccaagacactggcccagtacacctccaagacatgcagcaactgtgggtttaccatcaccagcgccgactacgacagggtgctggagaagctgaagaagacagcaacaggctggatgaccacaattaacggcaaggagctgaaggtggagggccagattacctactacaacagatacaagagacagaacgtagtcaaggacctgtccgtcgagctggatagactgagcgaagaatctgtgaacaacgacatctcctcctggacaaagggcagaagcggagaagctctgagcctcctgaagaaaagattctcccatagacccgtgcaggagaagttcgtgtgcctgaactgcggcttcgagacacacgcagccgagcaagccgccctgaacatcgccagatcctggctgttcctgcggagccaggagtacaagaaataccagacaaacaagacaaccggcaacaccgataagagagccttcgtcgagacctggcagtccttttaccggaagaagcttaaggaggtgtggaaacctgccgtgcggtctggcggatctggcggaggctccacaagcagccagaccctggtgaccttcaaggacgtgttcgtggacttcaccagggaggagtggaagctgctggacaccgcccagcagatcgtgtacaggaacgtgatgctggagaactacaagaacctggtgagcctgggctaccagctgaccaagcccgacgtgatcctgaggctggagaagggcgaggagccctgggtggtggagaggggcatccaccaggagacccaccccgacagcgagaccgccaccagccccaagaaaaagagaaaagtctaagctgccttctgcggggcttgccttctggccatgcccttcttctctcccttgcacctgtacctcttggtctttgaataaagcctgagtaggaaggctagcaaaaaaaaaaaaaaaaaaaaaaaaaaaaaaaaaaaaaaaaaaaaaaaaaaaaaaaaaaaaaaaaaaaaaaaaaaaaaaaa

SEQ ID NO: 6668 - RNA, 5797 nt, synthetic construct
  source 1..5797: mol_type = other RNA
aggaaataagagagaaaagaagagtaagaagaaatataagagccaccatggcccctaagaagaagcgtaaagtgagccggatggaacgcctcgtctacgaggtgcggcagaagtgcagaaacatcgaggacatctgcatctcctgcggatctctgaacgtgaccctggagcacccactgttcatcggcggcatgtgccagaactgtaaaaactgttttctggagtgtgcctatcaatacgacgatgacggctaccagagctactgcaccatctgttgcggcggaagagaggtgctgatgtgtggaaataacaactgctgccggtgcttctgcgtggaatgcgtggacctgctggtgggccccggcgccgcccaggccgctattaaggaagatccttggaactgctacatgtgcggccacaagggcacatacggcctgctgagacggagagaggactggcctagcagactgcagatgttcttcgccaataaccacgaccaggagttcgacccccctaaggtgtaccctcccgtccccgccgagaagagaaagcccatccgggtcctgagcctgttcgatggcatcgccaccggtctgctggtgctgaaggacctgggcatccaggtggataggtacattgcctccgaggtgtgcgaggactccatcaccgtgggaatggtgcgtcatcagggcaagatcatgtacgtgggcgacgtgcggagcgtgacacagaagcatatccaggagtggggccctttcgacctggtgatcggcggcagcccttgcaatgacctgagcatcgtgaacccagcccggaagggcctgtacgagggaaccggcagactgttcttcgagttttacagactgctgcacgacgcccggcctaaggaaggcgacgaccggcccttcttttggctgttcgagaatgtggtggccatgggagtcagcgacaagcgggatattagccggttcctggagagcaaccccgtgatgatcgatgccaaggaagtgagcgccgcccaccgggccagatacttctggggcaatctgcctggcatgaacagacccctggccagcaccgtgaacgacaagctggagctgcaggagtgcctggagcacggccggatcgccaagttcagcaaggtgagaaccatcaccacccgaagcaacagcatcaaacaaggcaaggaccagcactttcctgtgttcatgaacgagaaggaggacatcctgtggtgtaccgagatggagagagtgttcgggttcccagtccactacacagatgtcagcaacatgtctagactggccagacagagactgctgggaagaagctggtccgtccctgtgatcagacacctgttcgcccctctgaaggagtacttcgcctgcgtgagcagcggcaacagcaacgccaacagccggggccccagcttctctagcggcctggtgccactgtccctgagagggagccacatgggccccatggagatctacaaaaccgtgagcgcctggaagcggcagcctgtgcgcgtgctgagcctgtttcggaatatcgataaagtcctgaaaagcctgggattcctggagagcggctctggctccggcggtggcaccctgaagtacgtggaggatgtgacaaacgtggtcagacgggatgtggagaagtggggccccttcgatctggtgtacggcagcacccaacccctgggcagctcttgtgaccggtgccctggctggtacatgtttcagttccaccggatcctgcagtacgccctgccgagacaggagtcccagcggccattcttttggattttcatggacaacttgctgctgaccgaggatgaccaggaaactaccactcggttcctgcagaccgaagccgtgaccctgcaggacgtgagaggccgggactaccagaacgccatgcgggtgtggtccaacatccctggactgaaaagcaagcacgcacctctgacccctaaagaagaggagtacctgcaggcccaggtgcggagcagaagcaagctggacgcccctaaggtggatctgctggtgaagaattgcctcctgcccctgagagagtacttcaagtatttcagccagaatagtctgcccctgggcggcccaagcagcggcgcccctcctcccagcggcggcagcccagccggctccccaacctctaccgaggagggcacctctgagtccgccacccccgagagcggccctggcacctccaccgagcccagcgagggcagcgcacccggcagccctgccggcagccccacctccacagaggagggaaccagcaccgagcccagcgaaggcagcgccccaggcaccagcaccgagcctagtgagggcggctctggcggcggcagcgcccaggagattaaacggatcaacaagatcagaagaagacttgtgaaagacagcaacaccaagaaggccggcaagacaggccccatgaaaaccctgctggttagagtgatgacacccgatctgagagagcggctggaaaacctgagaaagaagcctgaaaatatcccccagcccatcagcaatacatctagagccaacctgaataagctgctgaccgattacaccgaaatgaagaaggcgatcctgcatgtgtactgggaagagttccagaaggaccctgtgggcctgatgagccgggtggcccagcctgccagcaagaagatcgatcagaacaagctgaaacctgagatggacgagaagggcaacctgaccaccgccggctttgcctgctctcagtgtggccagcccctgttcgtgtacaagctggagcaggtgtctgagaagggcaaggcttacaccaactacttcggacggtgcaatgtggccgagcacgaaaagctgatcctgctggcccagctgaagcccgagaaggatagcgacgaagccgtgacatatagcctgggaaagtttgggcagagggccctggatttctacagcattcatgtgaccaaggagtccacccaccccgtgaagcccctggcccagatcgccggaaacagatacgcctccggacctgtgggaaaggccctgagcgacgcatgtatgggcacaatcgcctccttcctgtctaagtaccaggacatcatcatcgaacaccagaaggtggtgaagggcaaccagaagagactggagagcctgcgggagctggccggcaaggaaaacctggaataccctagcgtgaccctgccacctcagcctcacaccaaggagggcgttgatgcctacaacgaagtgatcgcccgggtgcgaatgtgggtgaacctgaacctgtggcagaagctgaagctaagcagagatgatgccaagcctctgctgagactgaagggattcccttcctttcctctggtcgagagacaggccaacgaagtggactggtgggacatggtgtgtaacgtgaagaagctgatcaacgagaaaaaggaggatggcaaggtgttttggcagaatctggctggctacaagagacaggaagccctgagaccatacctgagcagcgaggaagatcggaagaagggaaagaaattcgctcggtaccagctgggcgacctgctgctgcacctggaaaagaagcacggcgaggactggggaaaggtgtacgacgaggcctgggagcggattgacaagaaagtggaaggcctgagcaagcacatcaagctggaagaggaacggagaagcgaggacgcccagagcaaggccgccctgaccgactggctgcgggctaaggccagcttcgtgatcgagggcctgaaggaggccgacaaggacgagttctgcagatgcgagctgaagctgcagaagtggtacggggacctgcggggaaagcccttcgccatcgaagccgagaacagcatcctggacatcagcggcttcagcaagcagtacaactgtgccttcatctggcagaaggacggcgtgaagaagctgaacctgtacctgatcatcaactacttcaagggcggcaagctgcggttcaagaagatcaaacctgaagccttcgaagccaacagattctacaccgtgatcaacaaaaagagcggcgagatcgtgcccatggaggtgaacttcaacttcgacgaccccaacctgatcatcctgcctctggcctttggcaagagacagggcagagaattcatctggaacgacctgctgtccctggaaaccggcagcctgaagctggccaacggaagagtgatcgagaagacactgtacaacagaagaacccggcaggatgagcctgccctgttcgtggccctgaccttcgagcggcgggaggtcctggactcctccaatatcaaaccaatgaacctgatcggcgtggcaagaggcgaaaacatccccgccgtgatcgccctgaccgaccccgagggctgcccactgagccggtttaaggatagcctgggaaacccaacccacatcctgagaatcggcgagagctataaggagaagcagcggaccatccaggccaagaaggaggtggagcagcggagagccggcggctacagccggaagtacgccagcaaagccaagaatctggcagacgatatggtgagaaacaccgctagagatctgctgtactacgccgtgacccaggatgccatgctgatcttcgccaacctgagccggggcttcggccggcagggcaagcggaccttcatggccgagagacagtacacacggatggaggactggctgaccgccaagctggcctacgagggcctgagcaagacctacctgtccaagacactggcccagtacacctccaagacatgcagcaactgtgggtttaccatcaccagcgccgactacgacagggtgctggagaagctgaagaagacagcaacaggctggatgaccacaattaacggcaaggagctgaaggtggagggccagattacctactacaacagatacaagagacagaacgtagtcaaggacctgtccgtcgagctggatagactgagcgaagaatctgtgaacaacgacatctcctcctggacaaagggcagaagcggagaagctctgagcctcctgaagaaaagattctcccatagacccgtgcaggagaagttcgtgtgcctgaactgcggcttcgagacacacgcagccgagcaagccgccctgaacatcgccagatcctggctgttcctgcggagccaggagtacaagaaataccagacaaacaagacaaccggcaacaccgataagagagccttcgtcgagacctggcagtccttttaccggaagaagcttaaggaggtgtggaaacctgccgtgcggtctggcggatctggcggaggctccacaagccccaaggcccccgtgaccttcggcgacgtggccatctacttcagcaaggaggagtgggagtgcctgagccccaaccagaaggacctgtacgaggacgtgatgatggagaactaccagaacctggccagcatcggcttcagctgcaggaggcccaacgtgatcaccctgctggagaagggcgaggccccctggatggccgagcccctgaggaggaggcagggccccgacagcggcagcaagaagaccagccccaagaaaaagagaaaagtctaagctgccttctgcggggcttgccttctggccatgcccttcttctctcccttgcacctgtacctcttggtctttgaataaagcctgagtaggaaggctagcaaaaaaaaaaaaaaaaaaaaaaaaaaaaaaaaaaaaaaaaaaaaaaaaaaaaaaaaaaaaaaaaaaaaaaaaaaaaaaaa

SEQ ID NO: 6669 - RNA, 5797 nt, synthetic construct
  source 1..5797: mol_type = other RNA
aggaaataagagagaaaagaagagtaagaagaaatataagagccaccatggcccctaagaagaagcgtaaagtgagccggatggaacgcctcgtctacgaggtgcggcagaagtgcagaaacatcgaggacatctgcatctcctgcggatctctgaacgtgaccctggagcacccactgttcatcggcggcatgtgccagaactgtaaaaactgttttctggagtgtgcctatcaatacgacgatgacggctaccagagctactgcaccatctgttgcggcggaagagaggtgctgatgtgtggaaataacaactgctgccggtgcttctgcgtggaatgcgtggacctgctggtgggccccggcgccgcccaggccgctattaaggaagatccttggaactgctacatgtgcggccacaagggcacatacggcctgctgagacggagagaggactggcctagcagactgcagatgttcttcgccaataaccacgaccaggagttcgacccccctaaggtgtaccctcccgtccccgccgagaagagaaagcccatccgggtcctgagcctgttcgatggcatcgccaccggtctgctggtgctgaaggacctgggcatccaggtggataggtacattgcctccgaggtgtgcgaggactccatcaccgtgggaatggtgcgtcatcagggcaagatcatgtacgtgggcgacgtgcggagcgtgacacagaagcatatccaggagtggggccctttcgacctggtgatcggcggcagcccttgcaatgacctgagcatcgtgaacccagcccggaagggcctgtacgagggaaccggcagactgttcttcgagttttacagactgctgcacgacgcccggcctaaggaaggcgacgaccggcccttcttttggctgttcgagaatgtggtggccatgggagtcagcgacaagcgggatattagccggttcctggagagcaaccccgtgatgatcgatgccaaggaagtgagcgccgcccaccgggccagatacttctggggcaatctgcctggcatgaacagacccctggccagcaccgtgaacgacaagctggagctgcaggagtgcctggagcacggccggatcgccaagttcagcaaggtgagaaccatcaccacccgaagcaacagcatcaaacaaggcaaggaccagcactttcctgtgttcatgaacgagaaggaggacatcctgtggtgtaccgagatggagagagtgttcgggttcccagtccactacacagatgtcagcaacatgtctagactggccagacagagactgctgggaagaagctggtccgtccctgtgatcagacacctgttcgcccctctgaaggagtacttcgcctgcgtgagcagcggcaacagcaacgccaacagccggggccccagcttctctagcggcctggtgccactgtccctgagagggagccacatgggccccatggagatctacaaaaccgtgagcgcctggaagcggcagcctgtgcgcgtgctgagcctgtttcggaatatcgataaagtcctgaaaagcctgggattcctggagagcggctctggctccggcggtggcaccctgaagtacgtggaggatgtgacaaacgtggtcagacgggatgtggagaagtggggccccttcgatctggtgtacggcagcacccaacccctgggcagctcttgtgaccggtgccctggctggtacatgtttcagttccaccggatcctgcagtacgccctgccgagacaggagtcccagcggccattcttttggattttcatggacaacttgctgctgaccgaggatgaccaggaaactaccactcggttcctgcagaccgaagccgtgaccctgcaggacgtgagaggccgggactaccagaacgccatgcgggtgtggtccaacatccctggactgaaaagcaagcacgcacctctgacccctaaagaagaggagtacctgcaggcccaggtgcggagcagaagcaagctggacgcccctaaggtggatctgctggtgaagaattgcctcctgcccctgagagagtacttcaagtatttcagccagaatagtctgcccctgggcggcccaagcagcggcgcccctcctcccagcggcggcagcccagccggctccccaacctctaccgaggagggcacctctgagtccgccacccccgagagcggccctggcacctccaccgagcccagcgagggcagcgcacccggcagccctgccggcagccccacctccacagaggagggaaccagcaccgagcccagcgaaggcagcgccccaggcaccagcaccgagcctagtgagggcggctctggcggcggcagcgcccaggagattaaacggatcaacaagatcagaagaagacttgtgaaagacagcaacaccaagaaggccggcaagacaggccccatgaaaaccctgctggttagagtgatgacacccgatctgagagagcggctggaaaacctgagaaagaagcctgaaaatatcccccagcccatcagcaatacatctagagccaacctgaataagctgctgaccgattacaccgaaatgaagaaggcgatcctgcatgtgtactgggaagagttccagaaggaccctgtgggcctgatgagccgggtggcccagcctgccagcaagaagatcgatcagaacaagctgaaacctgagatggacgagaagggcaacctgaccaccgccggctttgcctgctctcagtgtggccagcccctgttcgtgtacaagctggagcaggtgtctgagaagggcaaggcttacaccaactacttcggacggtgcaatgtggccgagcacgaaaagctgatcctgctggcccagctgaagcccgagaaggatagcgacgaagccgtgacatatagcctgggaaagtttgggcagagggccctggatttctacagcattcatgtgaccaaggagtccacccaccccgtgaagcccctggcccagatcgccggaaacagatacgcctccggacctgtgggaaaggccctgagcgacgcatgtatgggcacaatcgcctccttcctgtctaagtaccaggacatcatcatcgaacaccagaaggtggtgaagggcaaccagaagagactggagagcctgcgggagctggccggcaaggaaaacctggaataccctagcgtgaccctgccacctcagcctcacaccaaggagggcgttgatgcctacaacgaagtgatcgcccgggtgcgaatgtgggtgaacctgaacctgtggcagaagctgaagctaagcagagatgatgccaagcctctgctgagactgaagggattcccttcctttcctctggtcgagagacaggccaacgaagtggactggtgggacatggtgtgtaacgtgaagaagctgatcaacgagaaaaaggaggatggcaaggtgttttggcagaatctggctggctacaagagacaggaagccctgagaccatacctgagcagcgaggaagatcggaagaagggaaagaaattcgctcggtaccagctgggcgacctgctgctgcacctggaaaagaagcacggcgaggactggggaaaggtgtacgacgaggcctgggagcggattgacaagaaagtggaaggcctgagcaagcacatcaagctggaagaggaacggagaagcgaggacgcccagagcaaggccgccctgaccgactggctgcgggctaaggccagcttcgtgatcgagggcctgaaggaggccgacaaggacgagttctgcagatgcgagctgaagctgcagaagtggtacggggacctgcggggaaagcccttcgccatcgaagccgagaacagcatcctggacatcagcggcttcagcaagcagtacaactgtgccttcatctggcagaaggacggcgtgaagaagctgaacctgtacctgatcatcaactacttcaagggcggcaagctgcggttcaagaagatcaaacctgaagccttcgaagccaacagattctacaccgtgatcaacaaaaagagcggcgagatcgtgcccatggaggtgaacttcaacttcgacgaccccaacctgatcatcctgcctctggcctttggcaagagacagggcagagaattcatctggaacgacctgctgtccctggaaaccggcagcctgaagctggccaacggaagagtgatcgagaagacactgtacaacagaagaacccggcaggatgagcctgccctgttcgtggccctgaccttcgagcggcgggaggtcctggactcctccaatatcaaaccaatgaacctgatcggcgtggcaagaggcgaaaacatccccgccgtgatcgccctgaccgaccccgagggctgcccactgagccggtttaaggatagcctgggaaacccaacccacatcctgagaatcggcgagagctataaggagaagcagcggaccatccaggccaagaaggaggtggagcagcggagagccggcggctacagccggaagtacgccagcaaagccaagaatctggcagacgatatggtgagaaacaccgctagagatctgctgtactacgccgtgacccaggatgccatgctgatcttcgccaacctgagccggggcttcggccggcagggcaagcggaccttcatggccgagagacagtacacacggatggaggactggctgaccgccaagctggcctacgagggcctgagcaagacctacctgtccaagacactggcccagtacacctccaagacatgcagcaactgtgggtttaccatcaccagcgccgactacgacagggtgctggagaagctgaagaagacagcaacaggctggatgaccacaattaacggcaaggagctgaaggtggagggccagattacctactacaacagatacaagagacagaacgtagtcaaggacctgtccgtcgagctggatagactgagcgaagaatctgtgaacaacgacatctcctcctggacaaagggcagaagcggagaagctctgagcctcctgaagaaaagattctcccatagacccgtgcaggagaagttcgtgtgcctgaactgcggcttcgagacacacgcagccgagcaagccgccctgaacatcgccagatcctggctgttcctgcggagccaggagtacaagaaataccagacaaacaagacaaccggcaacaccgataagagagccttcgtcgagacctggcagtccttttaccggaagaagcttaaggaggtgtggaaacctgccgtgcggtctggcggatctggcggaggctccacaagcagcctggagagcgagctgttcagggacgtggccatcgtgttcagccaggaggagtggcagtgcctggcccccgcccagagggacctgtacagggacgtgatgctggagacctacagcaacctggtgagcctgggcctggccatcagcaagcccgacgtgatcagcttcctggagcagggcaaggagccctggatggtggagagggtggtgagcggcggcctgtgccccgtgctgaagtacaggaccagccccaagaaaaagagaaaagtctaagctgccttctgcggggcttgccttctggccatgcccttcttctctcccttgcacctgtacctcttggtctttgaataaagcctgagtaggaaggctagcaaaaaaaaaaaaaaaaaaaaaaaaaaaaaaaaaaaaaaaaaaaaaaaaaaaaaaaaaaaaaaaaaaaaaaaaaaaaaaaa

SEQ ID NO: 6670 - RNA, 5797 nt, synthetic construct
  source 1..5797: mol_type = other RNA
aggaaataagagagaaaagaagagtaagaagaaatataagagccaccatggcccctaagaagaagcgtaaagtgagccggatggaacgcctcgtctacgaggtgcggcagaagtgcagaaacatcgaggacatctgcatctcctgcggatctctgaacgtgaccctggagcacccactgttcatcggcggcatgtgccagaactgtaaaaactgttttctggagtgtgcctatcaatacgacgatgacggctaccagagctactgcaccatctgttgcggcggaagagaggtgctgatgtgtggaaataacaactgctgccggtgcttctgcgtggaatgcgtggacctgctggtgggccccggcgccgcccaggccgctattaaggaagatccttggaactgctacatgtgcggccacaagggcacatacggcctgctgagacggagagaggactggcctagcagactgcagatgttcttcgccaataaccacgaccaggagttcgacccccctaaggtgtaccctcccgtccccgccgagaagagaaagcccatccgggtcctgagcctgttcgatggcatcgccaccggtctgctggtgctgaaggacctgggcatccaggtggataggtacattgcctccgaggtgtgcgaggactccatcaccgtgggaatggtgcgtcatcagggcaagatcatgtacgtgggcgacgtgcggagcgtgacacagaagcatatccaggagtggggccctttcgacctggtgatcggcggcagcccttgcaatgacctgagcatcgtgaacccagcccggaagggcctgtacgagggaaccggcagactgttcttcgagttttacagactgctgcacgacgcccggcctaaggaaggcgacgaccggcccttcttttggctgttcgagaatgtggtggccatgggagtcagcgacaagcgggatattagccggttcctggagagcaaccccgtgatgatcgatgccaaggaagtgagcgccgcccaccgggccagatacttctggggcaatctgcctggcatgaacagacccctggccagcaccgtgaacgacaagctggagctgcaggagtgcctggagcacggccggatcgccaagttcagcaaggtgagaaccatcaccacccgaagcaacagcatcaaacaaggcaaggaccagcactttcctgtgttcatgaacgagaaggaggacatcctgtggtgtaccgagatggagagagtgttcgggttcccagtccactacacagatgtcagcaacatgtctagactggccagacagagactgctgggaagaagctggtccgtccctgtgatcagacacctgttcgcccctctgaaggagtacttcgcctgcgtgagcagcggcaacagcaacgccaacagccggggccccagcttctctagcggcctggtgccactgtccctgagagggagccacatgggccccatggagatctacaaaaccgtgagcgcctggaagcggcagcctgtgcgcgtgctgagcctgtttcggaatatcgataaagtcctgaaaagcctgggattcctggagagcggctctggctccggcggtggcaccctgaagtacgtggaggatgtgacaaacgtggtcagacgggatgtggagaagtggggccccttcgatctggtgtacggcagcacccaacccctgggcagctcttgtgaccggtgccctggctggtacatgtttcagttccaccggatcctgcagtacgccctgccgagacaggagtcccagcggccattcttttggattttcatggacaacttgctgctgaccgaggatgaccaggaaactaccactcggttcctgcagaccgaagccgtgaccctgcaggacgtgagaggccgggactaccagaacgccatgcgggtgtggtccaacatccctggactgaaaagcaagcacgcacctctgacccctaaagaagaggagtacctgcaggcccaggtgcggagcagaagcaagctggacgcccctaaggtggatctgctggtgaagaattgcctcctgcccctgagagagtacttcaagtatttcagccagaatagtctgcccctgggcggcccaagcagcggcgcccctcctcccagcggcggcagcccagccggctccccaacctctaccgaggagggcacctctgagtccgccacccccgagagcggccctggcacctccaccgagcccagcgagggcagcgcacccggcagccctgccggcagccccacctccacagaggagggaaccagcaccgagcccagcgaaggcagcgccccaggcaccagcaccgagcctagtgagggcggctctggcggcggcagcgcccaggagattaaacggatcaacaagatcagaagaagacttgtgaaagacagcaacaccaagaaggccggcaagacaggccccatgaaaaccctgctggttagagtgatgacacccgatctgagagagcggctggaaaacctgagaaagaagcctgaaaatatcccccagcccatcagcaatacatctagagccaacctgaataagctgctgaccgattacaccgaaatgaagaaggcgatcctgcatgtgtactgggaagagttccagaaggaccctgtgggcctgatgagccgggtggcccagcctgccagcaagaagatcgatcagaacaagctgaaacctgagatggacgagaagggcaacctgaccaccgccggctttgcctgctctcagtgtggccagcccctgttcgtgtacaagctggagcaggtgtctgagaagggcaaggcttacaccaactacttcggacggtgcaatgtggccgagcacgaaaagctgatcctgctggcccagctgaagcccgagaaggatagcgacgaagccgtgacatatagcctgggaaagtttgggcagagggccctggatttctacagcattcatgtgaccaaggagtccacccaccccgtgaagcccctggcccagatcgccggaaacagatacgcctccggacctgtgggaaaggccctgagcgacgcatgtatgggcacaatcgcctccttcctgtctaagtaccaggacatcatcatcgaacaccagaaggtggtgaagggcaaccagaagagactggagagcctgcgggagctggccggcaaggaaaacctggaataccctagcgtgaccctgccacctcagcctcacaccaaggagggcgttgatgcctacaacgaagtgatcgcccgggtgcgaatgtgggtgaacctgaacctgtggcagaagctgaagctaagcagagatgatgccaagcctctgctgagactgaagggattcccttcctttcctctggtcgagagacaggccaacgaagtggactggtgggacatggtgtgtaacgtgaagaagctgatcaacgagaaaaaggaggatggcaaggtgttttggcagaatctggctggctacaagagacaggaagccctgagaccatacctgagcagcgaggaagatcggaagaagggaaagaaattcgctcggtaccagctgggcgacctgctgctgcacctggaaaagaagcacggcgaggactggggaaaggtgtacgacgaggcctgggagcggattgacaagaaagtggaaggcctgagcaagcacatcaagctggaagaggaacggagaagcgaggacgcccagagcaaggccgccctgaccgactggctgcgggctaaggccagcttcgtgatcgagggcctgaaggaggccgacaaggacgagttctgcagatgcgagctgaagctgcagaagtggtacggggacctgcggggaaagcccttcgccatcgaagccgagaacagcatcctggacatcagcggcttcagcaagcagtacaactgtgccttcatctggcagaaggacggcgtgaagaagctgaacctgtacctgatcatcaactacttcaagggcggcaagctgcggttcaagaagatcaaacctgaagccttcgaagccaacagattctacaccgtgatcaacaaaaagagcggcgagatcgtgcccatggaggtgaacttcaacttcgacgaccccaacctgatcatcctgcctctggcctttggcaagagacagggcagagaattcatctggaacgacctgctgtccctggaaaccggcagcctgaagctggccaacggaagagtgatcgagaagacactgtacaacagaagaacccggcaggatgagcctgccctgttcgtggccctgaccttcgagcggcgggaggtcctggactcctccaatatcaaaccaatgaacctgatcggcgtggcaagaggcgaaaacatccccgccgtgatcgccctgaccgaccccgagggctgcccactgagccggtttaaggatagcctgggaaacccaacccacatcctgagaatcggcgagagctataaggagaagcagcggaccatccaggccaagaaggaggtggagcagcggagagccggcggctacagccggaagtacgccagcaaagccaagaatctggcagacgatatggtgagaaacaccgctagagatctgctgtactacgccgtgacccaggatgccatgctgatcttcgccaacctgagccggggcttcggccggcagggcaagcggaccttcatggccgagagacagtacacacggatggaggactggctgaccgccaagctggcctacgagggcctgagcaagacctacctgtccaagacactggcccagtacacctccaagacatgcagcaactgtgggtttaccatcaccagcgccgactacgacagggtgctggagaagctgaagaagacagcaacaggctggatgaccacaattaacggcaaggagctgaaggtggagggccagattacctactacaacagatacaagagacagaacgtagtcaaggacctgtccgtcgagctggatagactgagcgaagaatctgtgaacaacgacatctcctcctggacaaagggcagaagcggagaagctctgagcctcctgaagaaaagattctcccatagacccgtgcaggagaagttcgtgtgcctgaactgcggcttcgagacacacgcagccgagcaagccgccctgaacatcgccagatcctggctgttcctgcggagccaggagtacaagaaataccagacaaacaagacaaccggcaacaccgataagagagccttcgtcgagacctggcagtccttttaccggaagaagcttaaggaggtgtggaaacctgccgtgcggtctggcggatctggcggaggctccacaagcatgagccagggcagcgtgaccttcagggacgtggccatcgacttcagccaggaggagtggaagtggctgcagcccgcccagagggacctgtacaggtgcgtgatgctggagaactacggccacctggtgagcctgggcctgagcatcagcaagcccgacgtggtgagcctgctggagcagggcaaggagccctggctgggcaagagggacgtgaagagggacctgttccccgtgctgaaggagaccagccccaagaaaaagagaaaagtctaagctgccttctgcggggcttgccttctggccatgcccttcttctctcccttgcacctgtacctcttggtctttgaataaagcctgagtaggaaggctagcaaaaaaaaaaaaaaaaaaaaaaaaaaaaaaaaaaaaaaaaaaaaaaaaaaaaaaaaaaaaaaaaaaaaaaaaaaaaaaaa

SEQ ID NO: 6671 - RNA, 5797 nt, synthetic construct
  source 1..5797: mol_type = other RNA
aggaaataagagagaaaagaagagtaagaagaaatataagagccaccatggcccctaagaagaagcgtaaagtgagccggatggaacgcctcgtctacgaggtgcggcagaagtgcagaaacatcgaggacatctgcatctcctgcggatctctgaacgtgaccctggagcacccactgttcatcggcggcatgtgccagaactgtaaaaactgttttctggagtgtgcctatcaatacgacgatgacggctaccagagctactgcaccatctgttgcggcggaagagaggtgctgatgtgtggaaataacaactgctgccggtgcttctgcgtggaatgcgtggacctgctggtgggccccggcgccgcccaggccgctattaaggaagatccttggaactgctacatgtgcggccacaagggcacatacggcctgctgagacggagagaggactggcctagcagactgcagatgttcttcgccaataaccacgaccaggagttcgacccccctaaggtgtaccctcccgtccccgccgagaagagaaagcccatccgggtcctgagcctgttcgatggcatcgccaccggtctgctggtgctgaaggacctgggcatccaggtggataggtacattgcctccgaggtgtgcgaggactccatcaccgtgggaatggtgcgtcatcagggcaagatcatgtacgtgggcgacgtgcggagcgtgacacagaagcatatccaggagtggggccctttcgacctggtgatcggcggcagcccttgcaatgacctgagcatcgtgaacccagcccggaagggcctgtacgagggaaccggcagactgttcttcgagttttacagactgctgcacgacgcccggcctaaggaaggcgacgaccggcccttcttttggctgttcgagaatgtggtggccatgggagtcagcgacaagcgggatattagccggttcctggagagcaaccccgtgatgatcgatgccaaggaagtgagcgccgcccaccgggccagatacttctggggcaatctgcctggcatgaacagacccctggccagcaccgtgaacgacaagctggagctgcaggagtgcctggagcacggccggatcgccaagttcagcaaggtgagaaccatcaccacccgaagcaacagcatcaaacaaggcaaggaccagcactttcctgtgttcatgaacgagaaggaggacatcctgtggtgtaccgagatggagagagtgttcgggttcccagtccactacacagatgtcagcaacatgtctagactggccagacagagactgctgggaagaagctggtccgtccctgtgatcagacacctgttcgcccctctgaaggagtacttcgcctgcgtgagcagcggcaacagcaacgccaacagccggggccccagcttctctagcggcctggtgccactgtccctgagagggagccacatgggccccatggagatctacaaaaccgtgagcgcctggaagcggcagcctgtgcgcgtgctgagcctgtttcggaatatcgataaagtcctgaaaagcctgggattcctggagagcggctctggctccggcggtggcaccctgaagtacgtggaggatgtgacaaacgtggtcagacgggatgtggagaagtggggccccttcgatctggtgtacggcagcacccaacccctgggcagctcttgtgaccggtgccctggctggtacatgtttcagttccaccggatcctgcagtacgccctgccgagacaggagtcccagcggccattcttttggattttcatggacaacttgctgctgaccgaggatgaccaggaaactaccactcggttcctgcagaccgaagccgtgaccctgcaggacgtgagaggccgggactaccagaacgccatgcgggtgtggtccaacatccctggactgaaaagcaagcacgcacctctgacccctaaagaagaggagtacctgcaggcccaggtgcggagcagaagcaagctggacgcccctaaggtggatctgctggtgaagaattgcctcctgcccctgagagagtacttcaagtatttcagccagaatagtctgcccctgggcggcccaagcagcggcgcccctcctcccagcggcggcagcccagccggctccccaacctctaccgaggagggcacctctgagtccgccacccccgagagcggccctggcacctccaccgagcccagcgagggcagcgcacccggcagccctgccggcagccccacctccacagaggagggaaccagcaccgagcccagcgaaggcagcgccccaggcaccagcaccgagcctagtgagggcggctctggcggcggcagcgcccaggagattaaacggatcaacaagatcagaagaagacttgtgaaagacagcaacaccaagaaggccggcaagacaggccccatgaaaaccctgctggttagagtgatgacacccgatctgagagagcggctggaaaacctgagaaagaagcctgaaaatatcccccagcccatcagcaatacatctagagccaacctgaataagctgctgaccgattacaccgaaatgaagaaggcgatcctgcatgtgtactgggaagagttccagaaggaccctgtgggcctgatgagccgggtggcccagcctgccagcaagaagatcgatcagaacaagctgaaacctgagatggacgagaagggcaacctgaccaccgccggctttgcctgctctcagtgtggccagcccctgttcgtgtacaagctggagcaggtgtctgagaagggcaaggcttacaccaactacttcggacggtgcaatgtggccgagcacgaaaagctgatcctgctggcccagctgaagcccgagaaggatagcgacgaagccgtgacatatagcctgggaaagtttgggcagagggccctggatttctacagcattcatgtgaccaaggagtccacccaccccgtgaagcccctggcccagatcgccggaaacagatacgcctccggacctgtgggaaaggccctgagcgacgcatgtatgggcacaatcgcctccttcctgtctaagtaccaggacatcatcatcgaacaccagaaggtggtgaagggcaaccagaagagactggagagcctgcgggagctggccggcaaggaaaacctggaataccctagcgtgaccctgccacctcagcctcacaccaaggagggcgttgatgcctacaacgaagtgatcgcccgggtgcgaatgtgggtgaacctgaacctgtggcagaagctgaagctaagcagagatgatgccaagcctctgctgagactgaagggattcccttcctttcctctggtcgagagacaggccaacgaagtggactggtgggacatggtgtgtaacgtgaagaagctgatcaacgagaaaaaggaggatggcaaggtgttttggcagaatctggctggctacaagagacaggaagccctgagaccatacctgagcagcgaggaagatcggaagaagggaaagaaattcgctcggtaccagctgggcgacctgctgctgcacctggaaaagaagcacggcgaggactggggaaaggtgtacgacgaggcctgggagcggattgacaagaaagtggaaggcctgagcaagcacatcaagctggaagaggaacggagaagcgaggacgcccagagcaaggccgccctgaccgactggctgcgggctaaggccagcttcgtgatcgagggcctgaaggaggccgacaaggacgagttctgcagatgcgagctgaagctgcagaagtggtacggggacctgcggggaaagcccttcgccatcgaagccgagaacagcatcctggacatcagcggcttcagcaagcagtacaactgtgccttcatctggcagaaggacggcgtgaagaagctgaacctgtacctgatcatcaactacttcaagggcggcaagctgcggttcaagaagatcaaacctgaagccttcgaagccaacagattctacaccgtgatcaacaaaaagagcggcgagatcgtgcccatggaggtgaacttcaacttcgacgaccccaacctgatcatcctgcctctggcctttggcaagagacagggcagagaattcatctggaacgacctgctgtccctggaaaccggcagcctgaagctggccaacggaagagtgatcgagaagacactgtacaacagaagaacccggcaggatgagcctgccctgttcgtggccctgaccttcgagcggcgggaggtcctggactcctccaatatcaaaccaatgaacctgatcggcgtggcaagaggcgaaaacatccccgccgtgatcgccctgaccgaccccgagggctgcccactgagccggtttaaggatagcctgggaaacccaacccacatcctgagaatcggcgagagctataaggagaagcagcggaccatccaggccaagaaggaggtggagcagcggagagccggcggctacagccggaagtacgccagcaaagccaagaatctggcagacgatatggtgagaaacaccgctagagatctgctgtactacgccgtgacccaggatgccatgctgatcttcgccaacctgagccggggcttcggccggcagggcaagcggaccttcatggccgagagacagtacacacggatggaggactggctgaccgccaagctggcctacgagggcctgagcaagacctacctgtccaagacactggcccagtacacctccaagacatgcagcaactgtgggtttaccatcaccagcgccgactacgacagggtgctggagaagctgaagaagacagcaacaggctggatgaccacaattaacggcaaggagctgaaggtggagggccagattacctactacaacagatacaagagacagaacgtagtcaaggacctgtccgtcgagctggatagactgagcgaagaatctgtgaacaacgacatctcctcctggacaaagggcagaagcggagaagctctgagcctcctgaagaaaagattctcccatagacccgtgcaggagaagttcgtgtgcctgaactgcggcttcgagacacacgcagccgagcaagccgccctgaacatcgccagatcctggctgttcctgcggagccaggagtacaagaaataccagacaaacaagacaaccggcaacaccgataagagagccttcgtcgagacctggcagtccttttaccggaagaagcttaaggaggtgtggaaacctgccgtgcggtctggcggatctggcggaggctccacaagccagaaccccgtgaccttcagggacgtggccgtggacttcagcctggaggagtggaagtgcctgagccccgcccagagggccctgtacagggacgtgatgctggagaactacgagaacctggccagcgtgggccccaggctgcccttcagcaagccctacgtgatcagccagctggagaggggcgaggccccctggatgcccgaggaggaggtgcccagggaccactggcccgacctgttcaacaccagccccaagaaaaagagaaaagtctaagctgccttctgcggggcttgccttctggccatgcccttcttctctcccttgcacctgtacctcttggtctttgaataaagcctgagtaggaaggctagcaaaaaaaaaaaaaaaaaaaaaaaaaaaaaaaaaaaaaaaaaaaaaaaaaaaaaaaaaaaaaaaaaaaaaaaaaaaaaaaa

SEQ ID NO: 6672 - RNA, 5797 nt, synthetic construct
  source 1..5797: mol_type = other RNA
aggaaataagagagaaaagaagagtaagaagaaatataagagccaccatggcccctaagaagaagcgtaaagtgagccggatggaacgcctcgtctacgaggtgcggcagaagtgcagaaacatcgaggacatctgcatctcctgcggatctctgaacgtgaccctggagcacccactgttcatcggcggcatgtgccagaactgtaaaaactgttttctggagtgtgcctatcaatacgacgatgacggctaccagagctactgcaccatctgttgcggcggaagagaggtgctgatgtgtggaaataacaactgctgccggtgcttctgcgtggaatgcgtggacctgctggtgggccccggcgccgcccaggccgctattaaggaagatccttggaactgctacatgtgcggccacaagggcacatacggcctgctgagacggagagaggactggcctagcagactgcagatgttcttcgccaataaccacgaccaggagttcgacccccctaaggtgtaccctcccgtccccgccgagaagagaaagcccatccgggtcctgagcctgttcgatggcatcgccaccggtctgctggtgctgaaggacctgggcatccaggtggataggtacattgcctccgaggtgtgcgaggactccatcaccgtgggaatggtgcgtcatcagggcaagatcatgtacgtgggcgacgtgcggagcgtgacacagaagcatatccaggagtggggccctttcgacctggtgatcggcggcagcccttgcaatgacctgagcatcgtgaacccagcccggaagggcctgtacgagggaaccggcagactgttcttcgagttttacagactgctgcacgacgcccggcctaaggaaggcgacgaccggcccttcttttggctgttcgagaatgtggtggccatgggagtcagcgacaagcgggatattagccggttcctggagagcaaccccgtgatgatcgatgccaaggaagtgagcgccgcccaccgggccagatacttctggggcaatctgcctggcatgaacagacccctggccagcaccgtgaacgacaagctggagctgcaggagtgcctggagcacggccggatcgccaagttcagcaaggtgagaaccatcaccacccgaagcaacagcatcaaacaaggcaaggaccagcactttcctgtgttcatgaacgagaaggaggacatcctgtggtgtaccgagatggagagagtgttcgggttcccagtccactacacagatgtcagcaacatgtctagactggccagacagagactgctgggaagaagctggtccgtccctgtgatcagacacctgttcgcccctctgaaggagtacttcgcctgcgtgagcagcggcaacagcaacgccaacagccggggccccagcttctctagcggcctggtgccactgtccctgagagggagccacatgggccccatggagatctacaaaaccgtgagcgcctggaagcggcagcctgtgcgcgtgctgagcctgtttcggaatatcgataaagtcctgaaaagcctgggattcctggagagcggctctggctccggcggtggcaccctgaagtacgtggaggatgtgacaaacgtggtcagacgggatgtggagaagtggggccccttcgatctggtgtacggcagcacccaacccctgggcagctcttgtgaccggtgccctggctggtacatgtttcagttccaccggatcctgcagtacgccctgccgagacaggagtcccagcggccattcttttggattttcatggacaacttgctgctgaccgaggatgaccaggaaactaccactcggttcctgcagaccgaagccgtgaccctgcaggacgtgagaggccgggactaccagaacgccatgcgggtgtggtccaacatccctggactgaaaagcaagcacgcacctctgacccctaaagaagaggagtacctgcaggcccaggtgcggagcagaagcaagctggacgcccctaaggtggatctgctggtgaagaattgcctcctgcccctgagagagtacttcaagtatttcagccagaatagtctgcccctgggcggcccaagcagcggcgcccctcctcccagcggcggcagcccagccggctccccaacctctaccgaggagggcacctctgagtccgccacccccgagagcggccctggcacctccaccgagcccagcgagggcagcgcacccggcagccctgccggcagccccacctccacagaggagggaaccagcaccgagcccagcgaaggcagcgccccaggcaccagcaccgagcctagtgagggcggctctggcggcggcagcgcccaggagattaaacggatcaacaagatcagaagaagacttgtgaaagacagcaacaccaagaaggccggcaagacaggccccatgaaaaccctgctggttagagtgatgacacccgatctgagagagcggctggaaaacctgagaaagaagcctgaaaatatcccccagcccatcagcaatacatctagagccaacctgaataagctgctgaccgattacaccgaaatgaagaaggcgatcctgcatgtgtactgggaagagttccagaaggaccctgtgggcctgatgagccgggtggcccagcctgccagcaagaagatcgatcagaacaagctgaaacctgagatggacgagaagggcaacctgaccaccgccggctttgcctgctctcagtgtggccagcccctgttcgtgtacaagctggagcaggtgtctgagaagggcaaggcttacaccaactacttcggacggtgcaatgtggccgagcacgaaaagctgatcctgctggcccagctgaagcccgagaaggatagcgacgaagccgtgacatatagcctgggaaagtttgggcagagggccctggatttctacagcattcatgtgaccaaggagtccacccaccccgtgaagcccctggcccagatcgccggaaacagatacgcctccggacctgtgggaaaggccctgagcgacgcatgtatgggcacaatcgcctccttcctgtctaagtaccaggacatcatcatcgaacaccagaaggtggtgaagggcaaccagaagagactggagagcctgcgggagctggccggcaaggaaaacctggaataccctagcgtgaccctgccacctcagcctcacaccaaggagggcgttgatgcctacaacgaagtgatcgcccgggtgcgaatgtgggtgaacctgaacctgtggcagaagctgaagctaagcagagatgatgccaagcctctgctgagactgaagggattcccttcctttcctctggtcgagagacaggccaacgaagtggactggtgggacatggtgtgtaacgtgaagaagctgatcaacgagaaaaaggaggatggcaaggtgttttggcagaatctggctggctacaagagacaggaagccctgagaccatacctgagcagcgaggaagatcggaagaagggaaagaaattcgctcggtaccagctgggcgacctgctgctgcacctggaaaagaagcacggcgaggactggggaaaggtgtacgacgaggcctgggagcggattgacaagaaagtggaaggcctgagcaagcacatcaagctggaagaggaacggagaagcgaggacgcccagagcaaggccgccctgaccgactggctgcgggctaaggccagcttcgtgatcgagggcctgaaggaggccgacaaggacgagttctgcagatgcgagctgaagctgcagaagtggtacggggacctgcggggaaagcccttcgccatcgaagccgagaacagcatcctggacatcagcggcttcagcaagcagtacaactgtgccttcatctggcagaaggacggcgtgaagaagctgaacctgtacctgatcatcaactacttcaagggcggcaagctgcggttcaagaagatcaaacctgaagccttcgaagccaacagattctacaccgtgatcaacaaaaagagcggcgagatcgtgcccatggaggtgaacttcaacttcgacgaccccaacctgatcatcctgcctctggcctttggcaagagacagggcagagaattcatctggaacgacctgctgtccctggaaaccggcagcctgaagctggccaacggaagagtgatcgagaagacactgtacaacagaagaacccggcaggatgagcctgccctgttcgtggccctgaccttcgagcggcgggaggtcctggactcctccaatatcaaaccaatgaacctgatcggcgtggcaagaggcgaaaacatccccgccgtgatcgccctgaccgaccccgagggctgcccactgagccggtttaaggatagcctgggaaacccaacccacatcctgagaatcggcgagagctataaggagaagcagcggaccatccaggccaagaaggaggtggagcagcggagagccggcggctacagccggaagtacgccagcaaagccaagaatctggcagacgatatggtgagaaacaccgctagagatctgctgtactacgccgtgacccaggatgccatgctgatcttcgccaacctgagccggggcttcggccggcagggcaagcggaccttcatggccgagagacagtacacacggatggaggactggctgaccgccaagctggcctacgagggcctgagcaagacctacctgtccaagacactggcccagtacacctccaagacatgcagcaactgtgggtttaccatcaccagcgccgactacgacagggtgctggagaagctgaagaagacagcaacaggctggatgaccacaattaacggcaaggagctgaaggtggagggccagattacctactacaacagatacaagagacagaacgtagtcaaggacctgtccgtcgagctggatagactgagcgaagaatctgtgaacaacgacatctcctcctggacaaagggcagaagcggagaagctctgagcctcctgaagaaaagattctcccatagacccgtgcaggagaagttcgtgtgcctgaactgcggcttcgagacacacgcagccgagcaagccgccctgaacatcgccagatcctggctgttcctgcggagccaggagtacaagaaataccagacaaacaagacaaccggcaacaccgataagagagccttcgtcgagacctggcagtccttttaccggaagaagcttaaggaggtgtggaaacctgccgtgcggtctggcggatctggcggaggctccacaagcaaggaggccttcatggccttcggcgacgtggccgtggacttcacccaggaggagtggaggctgctgagccccgcccagaggaccctgcacagggaggtgatgctggagacctacaaccacctggtgagcctggagatccccttcagcaagcccaagctgatcagccagctggagaggggcgaggagccctggatcaaggagaggcagaggcccctgagcctgtgccccgccggcagcaagctgaccagccccaagaaaaagagaaaagtctaagctgccttctgcggggcttgccttctggccatgcccttcttctctcccttgcacctgtacctcttggtctttgaataaagcctgagtaggaaggctagcaaaaaaaaaaaaaaaaaaaaaaaaaaaaaaaaaaaaaaaaaaaaaaaaaaaaaaaaaaaaaaaaaaaaaaaaaaaaaaaa

SEQ ID NO: 6673 - RNA, 5797 nt, synthetic construct
  source 1..5797: mol_type = other RNA
aggaaataagagagaaaagaagagtaagaagaaatataagagccaccatggcccctaagaagaagcgtaaagtgagccggatggaacgcctcgtctacgaggtgcggcagaagtgcagaaacatcgaggacatctgcatctcctgcggatctctgaacgtgaccctggagcacccactgttcatcggcggcatgtgccagaactgtaaaaactgttttctggagtgtgcctatcaatacgacgatgacggctaccagagctactgcaccatctgttgcggcggaagagaggtgctgatgtgtggaaataacaactgctgccggtgcttctgcgtggaatgcgtggacctgctggtgggccccggcgccgcccaggccgctattaaggaagatccttggaactgctacatgtgcggccacaagggcacatacggcctgctgagacggagagaggactggcctagcagactgcagatgttcttcgccaataaccacgaccaggagttcgacccccctaaggtgtaccctcccgtccccgccgagaagagaaagcccatccgggtcctgagcctgttcgatggcatcgccaccggtctgctggtgctgaaggacctgggcatccaggtggataggtacattgcctccgaggtgtgcgaggactccatcaccgtgggaatggtgcgtcatcagggcaagatcatgtacgtgggcgacgtgcggagcgtgacacagaagcatatccaggagtggggccctttcgacctggtgatcggcggcagcccttgcaatgacctgagcatcgtgaacccagcccggaagggcctgtacgagggaaccggcagactgttcttcgagttttacagactgctgcacgacgcccggcctaaggaaggcgacgaccggcccttcttttggctgttcgagaatgtggtggccatgggagtcagcgacaagcgggatattagccggttcctggagagcaaccccgtgatgatcgatgccaaggaagtgagcgccgcccaccgggccagatacttctggggcaatctgcctggcatgaacagacccctggccagcaccgtgaacgacaagctggagctgcaggagtgcctggagcacggccggatcgccaagttcagcaaggtgagaaccatcaccacccgaagcaacagcatcaaacaaggcaaggaccagcactttcctgtgttcatgaacgagaaggaggacatcctgtggtgtaccgagatggagagagtgttcgggttcccagtccactacacagatgtcagcaacatgtctagactggccagacagagactgctgggaagaagctggtccgtccctgtgatcagacacctgttcgcccctctgaaggagtacttcgcctgcgtgagcagcggcaacagcaacgccaacagccggggccccagcttctctagcggcctggtgccactgtccctgagagggagccacatgggccccatggagatctacaaaaccgtgagcgcctggaagcggcagcctgtgcgcgtgctgagcctgtttcggaatatcgataaagtcctgaaaagcctgggattcctggagagcggctctggctccggcggtggcaccctgaagtacgtggaggatgtgacaaacgtggtcagacgggatgtggagaagtggggccccttcgatctggtgtacggcagcacccaacccctgggcagctcttgtgaccggtgccctggctggtacatgtttcagttccaccggatcctgcagtacgccctgccgagacaggagtcccagcggccattcttttggattttcatggacaacttgctgctgaccgaggatgaccaggaaactaccactcggttcctgcagaccgaagccgtgaccctgcaggacgtgagaggccgggactaccagaacgccatgcgggtgtggtccaacatccctggactgaaaagcaagcacgcacctctgacccctaaagaagaggagtacctgcaggcccaggtgcggagcagaagcaagctggacgcccctaaggtggatctgctggtgaagaattgcctcctgcccctgagagagtacttcaagtatttcagccagaatagtctgcccctgggcggcccaagcagcggcgcccctcctcccagcggcggcagcccagccggctccccaacctctaccgaggagggcacctctgagtccgccacccccgagagcggccctggcacctccaccgagcccagcgagggcagcgcacccggcagccctgccggcagccccacctccacagaggagggaaccagcaccgagcccagcgaaggcagcgccccaggcaccagcaccgagcctagtgagggcggctctggcggcggcagcgcccaggagattaaacggatcaacaagatcagaagaagacttgtgaaagacagcaacaccaagaaggccggcaagacaggccccatgaaaaccctgctggttagagtgatgacacccgatctgagagagcggctggaaaacctgagaaagaagcctgaaaatatcccccagcccatcagcaatacatctagagccaacctgaataagctgctgaccgattacaccgaaatgaagaaggcgatcctgcatgtgtactgggaagagttccagaaggaccctgtgggcctgatgagccgggtggcccagcctgccagcaagaagatcgatcagaacaagctgaaacctgagatggacgagaagggcaacctgaccaccgccggctttgcctgctctcagtgtggccagcccctgttcgtgtacaagctggagcaggtgtctgagaagggcaaggcttacaccaactacttcggacggtgcaatgtggccgagcacgaaaagctgatcctgctggcccagctgaagcccgagaaggatagcgacgaagccgtgacatatagcctgggaaagtttgggcagagggccctggatttctacagcattcatgtgaccaaggagtccacccaccccgtgaagcccctggcccagatcgccggaaacagatacgcctccggacctgtgggaaaggccctgagcgacgcatgtatgggcacaatcgcctccttcctgtctaagtaccaggacatcatcatcgaacaccagaaggtggtgaagggcaaccagaagagactggagagcctgcgggagctggccggcaaggaaaacctggaataccctagcgtgaccctgccacctcagcctcacaccaaggagggcgttgatgcctacaacgaagtgatcgcccgggtgcgaatgtgggtgaacctgaacctgtggcagaagctgaagctaagcagagatgatgccaagcctctgctgagactgaagggattcccttcctttcctctggtcgagagacaggccaacgaagtggactggtgggacatggtgtgtaacgtgaagaagctgatcaacgagaaaaaggaggatggcaaggtgttttggcagaatctggctggctacaagagacaggaagccctgagaccatacctgagcagcgaggaagatcggaagaagggaaagaaattcgctcggtaccagctgggcgacctgctgctgcacctggaaaagaagcacggcgaggactggggaaaggtgtacgacgaggcctgggagcggattgacaagaaagtggaaggcctgagcaagcacatcaagctggaagaggaacggagaagcgaggacgcccagagcaaggccgccctgaccgactggctgcgggctaaggccagcttcgtgatcgagggcctgaaggaggccgacaaggacgagttctgcagatgcgagctgaagctgcagaagtggtacggggacctgcggggaaagcccttcgccatcgaagccgagaacagcatcctggacatcagcggcttcagcaagcagtacaactgtgccttcatctggcagaaggacggcgtgaagaagctgaacctgtacctgatcatcaactacttcaagggcggcaagctgcggttcaagaagatcaaacctgaagccttcgaagccaacagattctacaccgtgatcaacaaaaagagcggcgagatcgtgcccatggaggtgaacttcaacttcgacgaccccaacctgatcatcctgcctctggcctttggcaagagacagggcagagaattcatctggaacgacctgctgtccctggaaaccggcagcctgaagctggccaacggaagagtgatcgagaagacactgtacaacagaagaacccggcaggatgagcctgccctgttcgtggccctgaccttcgagcggcgggaggtcctggactcctccaatatcaaaccaatgaacctgatcggcgtggcaagaggcgaaaacatccccgccgtgatcgccctgaccgaccccgagggctgcccactgagccggtttaaggatagcctgggaaacccaacccacatcctgagaatcggcgagagctataaggagaagcagcggaccatccaggccaagaaggaggtggagcagcggagagccggcggctacagccggaagtacgccagcaaagccaagaatctggcagacgatatggtgagaaacaccgctagagatctgctgtactacgccgtgacccaggatgccatgctgatcttcgccaacctgagccggggcttcggccggcagggcaagcggaccttcatggccgagagacagtacacacggatggaggactggctgaccgccaagctggcctacgagggcctgagcaagacctacctgtccaagacactggcccagtacacctccaagacatgcagcaactgtgggtttaccatcaccagcgccgactacgacagggtgctggagaagctgaagaagacagcaacaggctggatgaccacaattaacggcaaggagctgaaggtggagggccagattacctactacaacagatacaagagacagaacgtagtcaaggacctgtccgtcgagctggatagactgagcgaagaatctgtgaacaacgacatctcctcctggacaaagggcagaagcggagaagctctgagcctcctgaagaaaagattctcccatagacccgtgcaggagaagttcgtgtgcctgaactgcggcttcgagacacacgcagccgagcaagccgccctgaacatcgccagatcctggctgttcctgcggagccaggagtacaagaaataccagacaaacaagacaaccggcaacaccgataagagagccttcgtcgagacctggcagtccttttaccggaagaagcttaaggaggtgtggaaacctgccgtgcggtctggcggatctggcggaggctccacaagcaagagcatggtgaccttcgaggacgtggccgtgtacttcagccaggaggagtgggagctgctggacgccgcccagaggcacctgtaccacagcgtgatgctggagaacctggagctggtgaccagcctgggctgctggcacggcgtggagggcgaggaggcccaccccgagcagaacgtgagcgtggaggtgctgcaggtgaggatccccaacgccgaccccagcaccaagaaggccaacagcaccagccccaagaaaaagagaaaagtctaagctgccttctgcggggcttgccttctggccatgcccttcttctctcccttgcacctgtacctcttggtctttgaataaagcctgagtaggaaggctagcaaaaaaaaaaaaaaaaaaaaaaaaaaaaaaaaaaaaaaaaaaaaaaaaaaaaaaaaaaaaaaaaaaaaaaaaaaaaaaaa

SEQ ID NO: 6674 - RNA, 5797 nt, synthetic construct
  source 1..5797: mol_type = other RNA
aggaaataagagagaaaagaagagtaagaagaaatataagagccaccatggcccctaagaagaagcgtaaagtgagccggatggaacgcctcgtctacgaggtgcggcagaagtgcagaaacatcgaggacatctgcatctcctgcggatctctgaacgtgaccctggagcacccactgttcatcggcggcatgtgccagaactgtaaaaactgttttctggagtgtgcctatcaatacgacgatgacggctaccagagctactgcaccatctgttgcggcggaagagaggtgctgatgtgtggaaataacaactgctgccggtgcttctgcgtggaatgcgtggacctgctggtgggccccggcgccgcccaggccgctattaaggaagatccttggaactgctacatgtgcggccacaagggcacatacggcctgctgagacggagagaggactggcctagcagactgcagatgttcttcgccaataaccacgaccaggagttcgacccccctaaggtgtaccctcccgtccccgccgagaagagaaagcccatccgggtcctgagcctgttcgatggcatcgccaccggtctgctggtgctgaaggacctgggcatccaggtggataggtacattgcctccgaggtgtgcgaggactccatcaccgtgggaatggtgcgtcatcagggcaagatcatgtacgtgggcgacgtgcggagcgtgacacagaagcatatccaggagtggggccctttcgacctggtgatcggcggcagcccttgcaatgacctgagcatcgtgaacccagcccggaagggcctgtacgagggaaccggcagactgttcttcgagttttacagactgctgcacgacgcccggcctaaggaaggcgacgaccggcccttcttttggctgttcgagaatgtggtggccatgggagtcagcgacaagcgggatattagccggttcctggagagcaaccccgtgatgatcgatgccaaggaagtgagcgccgcccaccgggccagatacttctggggcaatctgcctggcatgaacagacccctggccagcaccgtgaacgacaagctggagctgcaggagtgcctggagcacggccggatcgccaagttcagcaaggtgagaaccatcaccacccgaagcaacagcatcaaacaaggcaaggaccagcactttcctgtgttcatgaacgagaaggaggacatcctgtggtgtaccgagatggagagagtgttcgggttcccagtccactacacagatgtcagcaacatgtctagactggccagacagagactgctgggaagaagctggtccgtccctgtgatcagacacctgttcgcccctctgaaggagtacttcgcctgcgtgagcagcggcaacagcaacgccaacagccggggccccagcttctctagcggcctggtgccactgtccctgagagggagccacatgggccccatggagatctacaaaaccgtgagcgcctggaagcggcagcctgtgcgcgtgctgagcctgtttcggaatatcgataaagtcctgaaaagcctgggattcctggagagcggctctggctccggcggtggcaccctgaagtacgtggaggatgtgacaaacgtggtcagacgggatgtggagaagtggggccccttcgatctggtgtacggcagcacccaacccctgggcagctcttgtgaccggtgccctggctggtacatgtttcagttccaccggatcctgcagtacgccctgccgagacaggagtcccagcggccattcttttggattttcatggacaacttgctgctgaccgaggatgaccaggaaactaccactcggttcctgcagaccgaagccgtgaccctgcaggacgtgagaggccgggactaccagaacgccatgcgggtgtggtccaacatccctggactgaaaagcaagcacgcacctctgacccctaaagaagaggagtacctgcaggcccaggtgcggagcagaagcaagctggacgcccctaaggtggatctgctggtgaagaattgcctcctgcccctgagagagtacttcaagtatttcagccagaatagtctgcccctgggcggcccaagcagcggcgcccctcctcccagcggcggcagcccagccggctccccaacctctaccgaggagggcacctctgagtccgccacccccgagagcggccctggcacctccaccgagcccagcgagggcagcgcacccggcagccctgccggcagccccacctccacagaggagggaaccagcaccgagcccagcgaaggcagcgccccaggcaccagcaccgagcctagtgagggcggctctggcggcggcagcgcccaggagattaaacggatcaacaagatcagaagaagacttgtgaaagacagcaacaccaagaaggccggcaagacaggccccatgaaaaccctgctggttagagtgatgacacccgatctgagagagcggctggaaaacctgagaaagaagcctgaaaatatcccccagcccatcagcaatacatctagagccaacctgaataagctgctgaccgattacaccgaaatgaagaaggcgatcctgcatgtgtactgggaagagttccagaaggaccctgtgggcctgatgagccgggtggcccagcctgccagcaagaagatcgatcagaacaagctgaaacctgagatggacgagaagggcaacctgaccaccgccggctttgcctgctctcagtgtggccagcccctgttcgtgtacaagctggagcaggtgtctgagaagggcaaggcttacaccaactacttcggacggtgcaatgtggccgagcacgaaaagctgatcctgctggcccagctgaagcccgagaaggatagcgacgaagccgtgacatatagcctgggaaagtttgggcagagggccctggatttctacagcattcatgtgaccaaggagtccacccaccccgtgaagcccctggcccagatcgccggaaacagatacgcctccggacctgtgggaaaggccctgagcgacgcatgtatgggcacaatcgcctccttcctgtctaagtaccaggacatcatcatcgaacaccagaaggtggtgaagggcaaccagaagagactggagagcctgcgggagctggccggcaaggaaaacctggaataccctagcgtgaccctgccacctcagcctcacaccaaggagggcgttgatgcctacaacgaagtgatcgcccgggtgcgaatgtgggtgaacctgaacctgtggcagaagctgaagctaagcagagatgatgccaagcctctgctgagactgaagggattcccttcctttcctctggtcgagagacaggccaacgaagtggactggtgggacatggtgtgtaacgtgaagaagctgatcaacgagaaaaaggaggatggcaaggtgttttggcagaatctggctggctacaagagacaggaagccctgagaccatacctgagcagcgaggaagatcggaagaagggaaagaaattcgctcggtaccagctgggcgacctgctgctgcacctggaaaagaagcacggcgaggactggggaaaggtgtacgacgaggcctgggagcggattgacaagaaagtggaaggcctgagcaagcacatcaagctggaagaggaacggagaagcgaggacgcccagagcaaggccgccctgaccgactggctgcgggctaaggccagcttcgtgatcgagggcctgaaggaggccgacaaggacgagttctgcagatgcgagctgaagctgcagaagtggtacggggacctgcggggaaagcccttcgccatcgaagccgagaacagcatcctggacatcagcggcttcagcaagcagtacaactgtgccttcatctggcagaaggacggcgtgaagaagctgaacctgtacctgatcatcaactacttcaagggcggcaagctgcggttcaagaagatcaaacctgaagccttcgaagccaacagattctacaccgtgatcaacaaaaagagcggcgagatcgtgcccatggaggtgaacttcaacttcgacgaccccaacctgatcatcctgcctctggcctttggcaagagacagggcagagaattcatctggaacgacctgctgtccctggaaaccggcagcctgaagctggccaacggaagagtgatcgagaagacactgtacaacagaagaacccggcaggatgagcctgccctgttcgtggccctgaccttcgagcggcgggaggtcctggactcctccaatatcaaaccaatgaacctgatcggcgtggcaagaggcgaaaacatccccgccgtgatcgccctgaccgaccccgagggctgcccactgagccggtttaaggatagcctgggaaacccaacccacatcctgagaatcggcgagagctataaggagaagcagcggaccatccaggccaagaaggaggtggagcagcggagagccggcggctacagccggaagtacgccagcaaagccaagaatctggcagacgatatggtgagaaacaccgctagagatctgctgtactacgccgtgacccaggatgccatgctgatcttcgccaacctgagccggggcttcggccggcagggcaagcggaccttcatggccgagagacagtacacacggatggaggactggctgaccgccaagctggcctacgagggcctgagcaagacctacctgtccaagacactggcccagtacacctccaagacatgcagcaactgtgggtttaccatcaccagcgccgactacgacagggtgctggagaagctgaagaagacagcaacaggctggatgaccacaattaacggcaaggagctgaaggtggagggccagattacctactacaacagatacaagagacagaacgtagtcaaggacctgtccgtcgagctggatagactgagcgaagaatctgtgaacaacgacatctcctcctggacaaagggcagaagcggagaagctctgagcctcctgaagaaaagattctcccatagacccgtgcaggagaagttcgtgtgcctgaactgcggcttcgagacacacgcagccgagcaagccgccctgaacatcgccagatcctggctgttcctgcggagccaggagtacaagaaataccagacaaacaagacaaccggcaacaccgataagagagccttcgtcgagacctggcagtccttttaccggaagaagcttaaggaggtgtggaaacctgccgtgcggtctggcggatctggcggaggctccacaagccccctgaagctggtgaccttcgaggacgtggccgtggacttcacccaggaggagtggagcctgctggacaagagccagaagaacctgttcaggaacgtgatgatggagaccatccaccacctggtgagcgtgggctaccagatcagcaagagcgacgtgatcagccagctggagcagggcaaggagctgtggagcaaggccgccggcggcttccagggccagaggcccggcgagcaccagggcaccagccccaagaaaaagagaaaagtctaagctgccttctgcggggcttgccttctggccatgcccttcttctctcccttgcacctgtacctcttggtctttgaataaagcctgagtaggaaggctagcaaaaaaaaaaaaaaaaaaaaaaaaaaaaaaaaaaaaaaaaaaaaaaaaaaaaaaaaaaaaaaaaaaaaaaaaaaaaaaaa

SEQ ID NO: 6675 - RNA, 5797 nt, synthetic construct
  source 1..5797: mol_type = other RNA
aggaaataagagagaaaagaagagtaagaagaaatataagagccaccatggcccctaagaagaagcgtaaagtgagccggatggaacgcctcgtctacgaggtgcggcagaagtgcagaaacatcgaggacatctgcatctcctgcggatctctgaacgtgaccctggagcacccactgttcatcggcggcatgtgccagaactgtaaaaactgttttctggagtgtgcctatcaatacgacgatgacggctaccagagctactgcaccatctgttgcggcggaagagaggtgctgatgtgtggaaataacaactgctgccggtgcttctgcgtggaatgcgtggacctgctggtgggccccggcgccgcccaggccgctattaaggaagatccttggaactgctacatgtgcggccacaagggcacatacggcctgctgagacggagagaggactggcctagcagactgcagatgttcttcgccaataaccacgaccaggagttcgacccccctaaggtgtaccctcccgtccccgccgagaagagaaagcccatccgggtcctgagcctgttcgatggcatcgccaccggtctgctggtgctgaaggacctgggcatccaggtggataggtacattgcctccgaggtgtgcgaggactccatcaccgtgggaatggtgcgtcatcagggcaagatcatgtacgtgggcgacgtgcggagcgtgacacagaagcatatccaggagtggggccctttcgacctggtgatcggcggcagcccttgcaatgacctgagcatcgtgaacccagcccggaagggcctgtacgagggaaccggcagactgttcttcgagttttacagactgctgcacgacgcccggcctaaggaaggcgacgaccggcccttcttttggctgttcgagaatgtggtggccatgggagtcagcgacaagcgggatattagccggttcctggagagcaaccccgtgatgatcgatgccaaggaagtgagcgccgcccaccgggccagatacttctggggcaatctgcctggcatgaacagacccctggccagcaccgtgaacgacaagctggagctgcaggagtgcctggagcacggccggatcgccaagttcagcaaggtgagaaccatcaccacccgaagcaacagcatcaaacaaggcaaggaccagcactttcctgtgttcatgaacgagaaggaggacatcctgtggtgtaccgagatggagagagtgttcgggttcccagtccactacacagatgtcagcaacatgtctagactggccagacagagactgctgggaagaagctggtccgtccctgtgatcagacacctgttcgcccctctgaaggagtacttcgcctgcgtgagcagcggcaacagcaacgccaacagccggggccccagcttctctagcggcctggtgccactgtccctgagagggagccacatgggccccatggagatctacaaaaccgtgagcgcctggaagcggcagcctgtgcgcgtgctgagcctgtttcggaatatcgataaagtcctgaaaagcctgggattcctggagagcggctctggctccggcggtggcaccctgaagtacgtggaggatgtgacaaacgtggtcagacgggatgtggagaagtggggccccttcgatctggtgtacggcagcacccaacccctgggcagctcttgtgaccggtgccctggctggtacatgtttcagttccaccggatcctgcagtacgccctgccgagacaggagtcccagcggccattcttttggattttcatggacaacttgctgctgaccgaggatgaccaggaaactaccactcggttcctgcagaccgaagccgtgaccctgcaggacgtgagaggccgggactaccagaacgccatgcgggtgtggtccaacatccctggactgaaaagcaagcacgcacctctgacccctaaagaagaggagtacctgcaggcccaggtgcggagcagaagcaagctggacgcccctaaggtggatctgctggtgaagaattgcctcctgcccctgagagagtacttcaagtatttcagccagaatagtctgcccctgggcggcccaagcagcggcgcccctcctcccagcggcggcagcccagccggctccccaacctctaccgaggagggcacctctgagtccgccacccccgagagcggccctggcacctccaccgagcccagcgagggcagcgcacccggcagccctgccggcagccccacctccacagaggagggaaccagcaccgagcccagcgaaggcagcgccccaggcaccagcaccgagcctagtgagggcggctctggcggcggcagcgcccaggagattaaacggatcaacaagatcagaagaagacttgtgaaagacagcaacaccaagaaggccggcaagacaggccccatgaaaaccctgctggttagagtgatgacacccgatctgagagagcggctggaaaacctgagaaagaagcctgaaaatatcccccagcccatcagcaatacatctagagccaacctgaataagctgctgaccgattacaccgaaatgaagaaggcgatcctgcatgtgtactgggaagagttccagaaggaccctgtgggcctgatgagccgggtggcccagcctgccagcaagaagatcgatcagaacaagctgaaacctgagatggacgagaagggcaacctgaccaccgccggctttgcctgctctcagtgtggccagcccctgttcgtgtacaagctggagcaggtgtctgagaagggcaaggcttacaccaactacttcggacggtgcaatgtggccgagcacgaaaagctgatcctgctggcccagctgaagcccgagaaggatagcgacgaagccgtgacatatagcctgggaaagtttgggcagagggccctggatttctacagcattcatgtgaccaaggagtccacccaccccgtgaagcccctggcccagatcgccggaaacagatacgcctccggacctgtgggaaaggccctgagcgacgcatgtatgggcacaatcgcctccttcctgtctaagtaccaggacatcatcatcgaacaccagaaggtggtgaagggcaaccagaagagactggagagcctgcgggagctggccggcaaggaaaacctggaataccctagcgtgaccctgccacctcagcctcacaccaaggagggcgttgatgcctacaacgaagtgatcgcccgggtgcgaatgtgggtgaacctgaacctgtggcagaagctgaagctaagcagagatgatgccaagcctctgctgagactgaagggattcccttcctttcctctggtcgagagacaggccaacgaagtggactggtgggacatggtgtgtaacgtgaagaagctgatcaacgagaaaaaggaggatggcaaggtgttttggcagaatctggctggctacaagagacaggaagccctgagaccatacctgagcagcgaggaagatcggaagaagggaaagaaattcgctcggtaccagctgggcgacctgctgctgcacctggaaaagaagcacggcgaggactggggaaaggtgtacgacgaggcctgggagcggattgacaagaaagtggaaggcctgagcaagcacatcaagctggaagaggaacggagaagcgaggacgcccagagcaaggccgccctgaccgactggctgcgggctaaggccagcttcgtgatcgagggcctgaaggaggccgacaaggacgagttctgcagatgcgagctgaagctgcagaagtggtacggggacctgcggggaaagcccttcgccatcgaagccgagaacagcatcctggacatcagcggcttcagcaagcagtacaactgtgccttcatctggcagaaggacggcgtgaagaagctgaacctgtacctgatcatcaactacttcaagggcggcaagctgcggttcaagaagatcaaacctgaagccttcgaagccaacagattctacaccgtgatcaacaaaaagagcggcgagatcgtgcccatggaggtgaacttcaacttcgacgaccccaacctgatcatcctgcctctggcctttggcaagagacagggcagagaattcatctggaacgacctgctgtccctggaaaccggcagcctgaagctggccaacggaagagtgatcgagaagacactgtacaacagaagaacccggcaggatgagcctgccctgttcgtggccctgaccttcgagcggcgggaggtcctggactcctccaatatcaaaccaatgaacctgatcggcgtggcaagaggcgaaaacatccccgccgtgatcgccctgaccgaccccgagggctgcccactgagccggtttaaggatagcctgggaaacccaacccacatcctgagaatcggcgagagctataaggagaagcagcggaccatccaggccaagaaggaggtggagcagcggagagccggcggctacagccggaagtacgccagcaaagccaagaatctggcagacgatatggtgagaaacaccgctagagatctgctgtactacgccgtgacccaggatgccatgctgatcttcgccaacctgagccggggcttcggccggcagggcaagcggaccttcatggccgagagacagtacacacggatggaggactggctgaccgccaagctggcctacgagggcctgagcaagacctacctgtccaagacactggcccagtacacctccaagacatgcagcaactgtgggtttaccatcaccagcgccgactacgacagggtgctggagaagctgaagaagacagcaacaggctggatgaccacaattaacggcaaggagctgaaggtggagggccagattacctactacaacagatacaagagacagaacgtagtcaaggacctgtccgtcgagctggatagactgagcgaagaatctgtgaacaacgacatctcctcctggacaaagggcagaagcggagaagctctgagcctcctgaagaaaagattctcccatagacccgtgcaggagaagttcgtgtgcctgaactgcggcttcgagacacacgcagccgagcaagccgccctgaacatcgccagatcctggctgttcctgcggagccaggagtacaagaaataccagacaaacaagacaaccggcaacaccgataagagagccttcgtcgagacctggcagtccttttaccggaagaagcttaaggaggtgtggaaacctgccgtgcggtctggcggatctggcggaggctccacaagcttcaaggaggccgtgaccttcaaggacgtggccgtgaccttcaccgaggaggagctgggcctgctggaccccgcccagagggagctgtacagggacgtgatgctggagaacttcaggaacctggtgagcgtgggccaccagtgcttcatccccgacgtgatcagccagctggagagggaggagaagctgtggatgctgaggaccgccgcccagagcaggtgcagcagcggcgacaagaacctgaccagccccaagaaaaagagaaaagtctaagctgccttctgcggggcttgccttctggccatgcccttcttctctcccttgcacctgtacctcttggtctttgaataaagcctgagtaggaaggctagcaaaaaaaaaaaaaaaaaaaaaaaaaaaaaaaaaaaaaaaaaaaaaaaaaaaaaaaaaaaaaaaaaaaaaaaaaaaaaaaa

SEQ ID NO: 6676 - RNA, 5797 nt, synthetic construct
  source 1..5797: mol_type = other RNA
aggaaataagagagaaaagaagagtaagaagaaatataagagccaccatggcccctaagaagaagcgtaaagtgagccggatggaacgcctcgtctacgaggtgcggcagaagtgcagaaacatcgaggacatctgcatctcctgcggatctctgaacgtgaccctggagcacccactgttcatcggcggcatgtgccagaactgtaaaaactgttttctggagtgtgcctatcaatacgacgatgacggctaccagagctactgcaccatctgttgcggcggaagagaggtgctgatgtgtggaaataacaactgctgccggtgcttctgcgtggaatgcgtggacctgctggtgggccccggcgccgcccaggccgctattaaggaagatccttggaactgctacatgtgcggccacaagggcacatacggcctgctgagacggagagaggactggcctagcagactgcagatgttcttcgccaataaccacgaccaggagttcgacccccctaaggtgtaccctcccgtccccgccgagaagagaaagcccatccgggtcctgagcctgttcgatggcatcgccaccggtctgctggtgctgaaggacctgggcatccaggtggataggtacattgcctccgaggtgtgcgaggactccatcaccgtgggaatggtgcgtcatcagggcaagatcatgtacgtgggcgacgtgcggagcgtgacacagaagcatatccaggagtggggccctttcgacctggtgatcggcggcagcccttgcaatgacctgagcatcgtgaacccagcccggaagggcctgtacgagggaaccggcagactgttcttcgagttttacagactgctgcacgacgcccggcctaaggaaggcgacgaccggcccttcttttggctgttcgagaatgtggtggccatgggagtcagcgacaagcgggatattagccggttcctggagagcaaccccgtgatgatcgatgccaaggaagtgagcgccgcccaccgggccagatacttctggggcaatctgcctggcatgaacagacccctggccagcaccgtgaacgacaagctggagctgcaggagtgcctggagcacggccggatcgccaagttcagcaaggtgagaaccatcaccacccgaagcaacagcatcaaacaaggcaaggaccagcactttcctgtgttcatgaacgagaaggaggacatcctgtggtgtaccgagatggagagagtgttcgggttcccagtccactacacagatgtcagcaacatgtctagactggccagacagagactgctgggaagaagctggtccgtccctgtgatcagacacctgttcgcccctctgaaggagtacttcgcctgcgtgagcagcggcaacagcaacgccaacagccggggccccagcttctctagcggcctggtgccactgtccctgagagggagccacatgggccccatggagatctacaaaaccgtgagcgcctggaagcggcagcctgtgcgcgtgctgagcctgtttcggaatatcgataaagtcctgaaaagcctgggattcctggagagcggctctggctccggcggtggcaccctgaagtacgtggaggatgtgacaaacgtggtcagacgggatgtggagaagtggggccccttcgatctggtgtacggcagcacccaacccctgggcagctcttgtgaccggtgccctggctggtacatgtttcagttccaccggatcctgcagtacgccctgccgagacaggagtcccagcggccattcttttggattttcatggacaacttgctgctgaccgaggatgaccaggaaactaccactcggttcctgcagaccgaagccgtgaccctgcaggacgtgagaggccgggactaccagaacgccatgcgggtgtggtccaacatccctggactgaaaagcaagcacgcacctctgacccctaaagaagaggagtacctgcaggcccaggtgcggagcagaagcaagctggacgcccctaaggtggatctgctggtgaagaattgcctcctgcccctgagagagtacttcaagtatttcagccagaatagtctgcccctgggcggcccaagcagcggcgcccctcctcccagcggcggcagcccagccggctccccaacctctaccgaggagggcacctctgagtccgccacccccgagagcggccctggcacctccaccgagcccagcgagggcagcgcacccggcagccctgccggcagccccacctccacagaggagggaaccagcaccgagcccagcgaaggcagcgccccaggcaccagcaccgagcctagtgagggcggctctggcggcggcagcgcccaggagattaaacggatcaacaagatcagaagaagacttgtgaaagacagcaacaccaagaaggccggcaagacaggccccatgaaaaccctgctggttagagtgatgacacccgatctgagagagcggctggaaaacctgagaaagaagcctgaaaatatcccccagcccatcagcaatacatctagagccaacctgaataagctgctgaccgattacaccgaaatgaagaaggcgatcctgcatgtgtactgggaagagttccagaaggaccctgtgggcctgatgagccgggtggcccagcctgccagcaagaagatcgatcagaacaagctgaaacctgagatggacgagaagggcaacctgaccaccgccggctttgcctgctctcagtgtggccagcccctgttcgtgtacaagctggagcaggtgtctgagaagggcaaggcttacaccaactacttcggacggtgcaatgtggccgagcacgaaaagctgatcctgctggcccagctgaagcccgagaaggatagcgacgaagccgtgacatatagcctgggaaagtttgggcagagggccctggatttctacagcattcatgtgaccaaggagtccacccaccccgtgaagcccctggcccagatcgccggaaacagatacgcctccggacctgtgggaaaggccctgagcgacgcatgtatgggcacaatcgcctccttcctgtctaagtaccaggacatcatcatcgaacaccagaaggtggtgaagggcaaccagaagagactggagagcctgcgggagctggccggcaaggaaaacctggaataccctagcgtgaccctgccacctcagcctcacaccaaggagggcgttgatgcctacaacgaagtgatcgcccgggtgcgaatgtgggtgaacctgaacctgtggcagaagctgaagctaagcagagatgatgccaagcctctgctgagactgaagggattcccttcctttcctctggtcgagagacaggccaacgaagtggactggtgggacatggtgtgtaacgtgaagaagctgatcaacgagaaaaaggaggatggcaaggtgttttggcagaatctggctggctacaagagacaggaagccctgagaccatacctgagcagcgaggaagatcggaagaagggaaagaaattcgctcggtaccagctgggcgacctgctgctgcacctggaaaagaagcacggcgaggactggggaaaggtgtacgacgaggcctgggagcggattgacaagaaagtggaaggcctgagcaagcacatcaagctggaagaggaacggagaagcgaggacgcccagagcaaggccgccctgaccgactggctgcgggctaaggccagcttcgtgatcgagggcctgaaggaggccgacaaggacgagttctgcagatgcgagctgaagctgcagaagtggtacggggacctgcggggaaagcccttcgccatcgaagccgagaacagcatcctggacatcagcggcttcagcaagcagtacaactgtgccttcatctggcagaaggacggcgtgaagaagctgaacctgtacctgatcatcaactacttcaagggcggcaagctgcggttcaagaagatcaaacctgaagccttcgaagccaacagattctacaccgtgatcaacaaaaagagcggcgagatcgtgcccatggaggtgaacttcaacttcgacgaccccaacctgatcatcctgcctctggcctttggcaagagacagggcagagaattcatctggaacgacctgctgtccctggaaaccggcagcctgaagctggccaacggaagagtgatcgagaagacactgtacaacagaagaacccggcaggatgagcctgccctgttcgtggccctgaccttcgagcggcgggaggtcctggactcctccaatatcaaaccaatgaacctgatcggcgtggcaagaggcgaaaacatccccgccgtgatcgccctgaccgaccccgagggctgcccactgagccggtttaaggatagcctgggaaacccaacccacatcctgagaatcggcgagagctataaggagaagcagcggaccatccaggccaagaaggaggtggagcagcggagagccggcggctacagccggaagtacgccagcaaagccaagaatctggcagacgatatggtgagaaacaccgctagagatctgctgtactacgccgtgacccaggatgccatgctgatcttcgccaacctgagccggggcttcggccggcagggcaagcggaccttcatggccgagagacagtacacacggatggaggactggctgaccgccaagctggcctacgagggcctgagcaagacctacctgtccaagacactggcccagtacacctccaagacatgcagcaactgtgggtttaccatcaccagcgccgactacgacagggtgctggagaagctgaagaagacagcaacaggctggatgaccacaattaacggcaaggagctgaaggtggagggccagattacctactacaacagatacaagagacagaacgtagtcaaggacctgtccgtcgagctggatagactgagcgaagaatctgtgaacaacgacatctcctcctggacaaagggcagaagcggagaagctctgagcctcctgaagaaaagattctcccatagacccgtgcaggagaagttcgtgtgcctgaactgcggcttcgagacacacgcagccgagcaagccgccctgaacatcgccagatcctggctgttcctgcggagccaggagtacaagaaataccagacaaacaagacaaccggcaacaccgataagagagccttcgtcgagacctggcagtccttttaccggaagaagcttaaggaggtgtggaaacctgccgtgcggtctggcggatctggcggaggctccacaagcgccagggccagcctgagcttcgaggacgtggccgtgggcttcagctgggaggagtggcagctgctggcccccagccagaaggacctgtacagggacgtgatgctggagaactacaggaacctggtgagcgtgggctacgaggccagcaagcccgacagcgtgttccagctggagcagggcgagcccccctggatggtggagggcgccgcccagagccagacctgccaggaggagatctgggagaccagccccaagaaaaagagaaaagtctaagctgccttctgcggggcttgccttctggccatgcccttcttctctcccttgcacctgtacctcttggtctttgaataaagcctgagtaggaaggctagcaaaaaaaaaaaaaaaaaaaaaaaaaaaaaaaaaaaaaaaaaaaaaaaaaaaaaaaaaaaaaaaaaaaaaaaaaaaaaaaa

SEQ ID NO: 6677 - RNA, 5797 nt, synthetic construct
  source 1..5797: mol_type = other RNA
aggaaataagagagaaaagaagagtaagaagaaatataagagccaccatggcccctaagaagaagcgtaaagtgagccggatggaacgcctcgtctacgaggtgcggcagaagtgcagaaacatcgaggacatctgcatctcctgcggatctctgaacgtgaccctggagcacccactgttcatcggcggcatgtgccagaactgtaaaaactgttttctggagtgtgcctatcaatacgacgatgacggctaccagagctactgcaccatctgttgcggcggaagagaggtgctgatgtgtggaaataacaactgctgccggtgcttctgcgtggaatgcgtggacctgctggtgggccccggcgccgcccaggccgctattaaggaagatccttggaactgctacatgtgcggccacaagggcacatacggcctgctgagacggagagaggactggcctagcagactgcagatgttcttcgccaataaccacgaccaggagttcgacccccctaaggtgtaccctcccgtccccgccgagaagagaaagcccatccgggtcctgagcctgttcgatggcatcgccaccggtctgctggtgctgaaggacctgggcatccaggtggataggtacattgcctccgaggtgtgcgaggactccatcaccgtgggaatggtgcgtcatcagggcaagatcatgtacgtgggcgacgtgcggagcgtgacacagaagcatatccaggagtggggccctttcgacctggtgatcggcggcagcccttgcaatgacctgagcatcgtgaacccagcccggaagggcctgtacgagggaaccggcagactgttcttcgagttttacagactgctgcacgacgcccggcctaaggaaggcgacgaccggcccttcttttggctgttcgagaatgtggtggccatgggagtcagcgacaagcgggatattagccggttcctggagagcaaccccgtgatgatcgatgccaaggaagtgagcgccgcccaccgggccagatacttctggggcaatctgcctggcatgaacagacccctggccagcaccgtgaacgacaagctggagctgcaggagtgcctggagcacggccggatcgccaagttcagcaaggtgagaaccatcaccacccgaagcaacagcatcaaacaaggcaaggaccagcactttcctgtgttcatgaacgagaaggaggacatcctgtggtgtaccgagatggagagagtgttcgggttcccagtccactacacagatgtcagcaacatgtctagactggccagacagagactgctgggaagaagctggtccgtccctgtgatcagacacctgttcgcccctctgaaggagtacttcgcctgcgtgagcagcggcaacagcaacgccaacagccggggccccagcttctctagcggcctggtgccactgtccctgagagggagccacatgggccccatggagatctacaaaaccgtgagcgcctggaagcggcagcctgtgcgcgtgctgagcctgtttcggaatatcgataaagtcctgaaaagcctgggattcctggagagcggctctggctccggcggtggcaccctgaagtacgtggaggatgtgacaaacgtggtcagacgggatgtggagaagtggggccccttcgatctggtgtacggcagcacccaacccctgggcagctcttgtgaccggtgccctggctggtacatgtttcagttccaccggatcctgcagtacgccctgccgagacaggagtcccagcggccattcttttggattttcatggacaacttgctgctgaccgaggatgaccaggaaactaccactcggttcctgcagaccgaagccgtgaccctgcaggacgtgagaggccgggactaccagaacgccatgcgggtgtggtccaacatccctggactgaaaagcaagcacgcacctctgacccctaaagaagaggagtacctgcaggcccaggtgcggagcagaagcaagctggacgcccctaaggtggatctgctggtgaagaattgcctcctgcccctgagagagtacttcaagtatttcagccagaatagtctgcccctgggcggcccaagcagcggcgcccctcctcccagcggcggcagcccagccggctccccaacctctaccgaggagggcacctctgagtccgccacccccgagagcggccctggcacctccaccgagcccagcgagggcagcgcacccggcagccctgccggcagccccacctccacagaggagggaaccagcaccgagcccagcgaaggcagcgccccaggcaccagcaccgagcctagtgagggcggctctggcggcggcagcgcccaggagattaaacggatcaacaagatcagaagaagacttgtgaaagacagcaacaccaagaaggccggcaagacaggccccatgaaaaccctgctggttagagtgatgacacccgatctgagagagcggctggaaaacctgagaaagaagcctgaaaatatcccccagcccatcagcaatacatctagagccaacctgaataagctgctgaccgattacaccgaaatgaagaaggcgatcctgcatgtgtactgggaagagttccagaaggaccctgtgggcctgatgagccgggtggcccagcctgccagcaagaagatcgatcagaacaagctgaaacctgagatggacgagaagggcaacctgaccaccgccggctttgcctgctctcagtgtggccagcccctgttcgtgtacaagctggagcaggtgtctgagaagggcaaggcttacaccaactacttcggacggtgcaatgtggccgagcacgaaaagctgatcctgctggcccagctgaagcccgagaaggatagcgacgaagccgtgacatatagcctgggaaagtttgggcagagggccctggatttctacagcattcatgtgaccaaggagtccacccaccccgtgaagcccctggcccagatcgccggaaacagatacgcctccggacctgtgggaaaggccctgagcgacgcatgtatgggcacaatcgcctccttcctgtctaagtaccaggacatcatcatcgaacaccagaaggtggtgaagggcaaccagaagagactggagagcctgcgggagctggccggcaaggaaaacctggaataccctagcgtgaccctgccacctcagcctcacaccaaggagggcgttgatgcctacaacgaagtgatcgcccgggtgcgaatgtgggtgaacctgaacctgtggcagaagctgaagctaagcagagatgatgccaagcctctgctgagactgaagggattcccttcctttcctctggtcgagagacaggccaacgaagtggactggtgggacatggtgtgtaacgtgaagaagctgatcaacgagaaaaaggaggatggcaaggtgttttggcagaatctggctggctacaagagacaggaagccctgagaccatacctgagcagcgaggaagatcggaagaagggaaagaaattcgctcggtaccagctgggcgacctgctgctgcacctggaaaagaagcacggcgaggactggggaaaggtgtacgacgaggcctgggagcggattgacaagaaagtggaaggcctgagcaagcacatcaagctggaagaggaacggagaagcgaggacgcccagagcaaggccgccctgaccgactggctgcgggctaaggccagcttcgtgatcgagggcctgaaggaggccgacaaggacgagttctgcagatgcgagctgaagctgcagaagtggtacggggacctgcggggaaagcccttcgccatcgaagccgagaacagcatcctggacatcagcggcttcagcaagcagtacaactgtgccttcatctggcagaaggacggcgtgaagaagctgaacctgtacctgatcatcaactacttcaagggcggcaagctgcggttcaagaagatcaaacctgaagccttcgaagccaacagattctacaccgtgatcaacaaaaagagcggcgagatcgtgcccatggaggtgaacttcaacttcgacgaccccaacctgatcatcctgcctctggcctttggcaagagacagggcagagaattcatctggaacgacctgctgtccctggaaaccggcagcctgaagctggccaacggaagagtgatcgagaagacactgtacaacagaagaacccggcaggatgagcctgccctgttcgtggccctgaccttcgagcggcgggaggtcctggactcctccaatatcaaaccaatgaacctgatcggcgtggcaagaggcgaaaacatccccgccgtgatcgccctgaccgaccccgagggctgcccactgagccggtttaaggatagcctgggaaacccaacccacatcctgagaatcggcgagagctataaggagaagcagcggaccatccaggccaagaaggaggtggagcagcggagagccggcggctacagccggaagtacgccagcaaagccaagaatctggcagacgatatggtgagaaacaccgctagagatctgctgtactacgccgtgacccaggatgccatgctgatcttcgccaacctgagccggggcttcggccggcagggcaagcggaccttcatggccgagagacagtacacacggatggaggactggctgaccgccaagctggcctacgagggcctgagcaagacctacctgtccaagacactggcccagtacacctccaagacatgcagcaactgtgggtttaccatcaccagcgccgactacgacagggtgctggagaagctgaagaagacagcaacaggctggatgaccacaattaacggcaaggagctgaaggtggagggccagattacctactacaacagatacaagagacagaacgtagtcaaggacctgtccgtcgagctggatagactgagcgaagaatctgtgaacaacgacatctcctcctggacaaagggcagaagcggagaagctctgagcctcctgaagaaaagattctcccatagacccgtgcaggagaagttcgtgtgcctgaactgcggcttcgagacacacgcagccgagcaagccgccctgaacatcgccagatcctggctgttcctgcggagccaggagtacaagaaataccagacaaacaagacaaccggcaacaccgataagagagccttcgtcgagacctggcagtccttttaccggaagaagcttaaggaggtgtggaaacctgccgtgcggtctggcggatctggcggaggctccacaagcatggcccacatggccttcagggacgtggccgtggacttcacccaggacgagtggaggctgctgagccccgcccagaggaccctgtacagggaggtgatgctggagaactacagcaacctggtgagcctgggcatcagcttcagcaagcccgagctgatcacccagctggagcagggcaaggagacctggagggaggagaagaactgcagccccgccacctgccccgccgaccccgagcccgagaccagccccaagaaaaagagaaaagtctaagctgccttctgcggggcttgccttctggccatgcccttcttctctcccttgcacctgtacctcttggtctttgaataaagcctgagtaggaaggctagcaaaaaaaaaaaaaaaaaaaaaaaaaaaaaaaaaaaaaaaaaaaaaaaaaaaaaaaaaaaaaaaaaaaaaaaaaaaaaaaa

SEQ ID NO: 6678 - RNA, 5797 nt, synthetic construct
  source 1..5797: mol_type = other RNA
aggaaataagagagaaaagaagagtaagaagaaatataagagccaccatggcccctaagaagaagcgtaaagtgagccggatggaacgcctcgtctacgaggtgcggcagaagtgcagaaacatcgaggacatctgcatctcctgcggatctctgaacgtgaccctggagcacccactgttcatcggcggcatgtgccagaactgtaaaaactgttttctggagtgtgcctatcaatacgacgatgacggctaccagagctactgcaccatctgttgcggcggaagagaggtgctgatgtgtggaaataacaactgctgccggtgcttctgcgtggaatgcgtggacctgctggtgggccccggcgccgcccaggccgctattaaggaagatccttggaactgctacatgtgcggccacaagggcacatacggcctgctgagacggagagaggactggcctagcagactgcagatgttcttcgccaataaccacgaccaggagttcgacccccctaaggtgtaccctcccgtccccgccgagaagagaaagcccatccgggtcctgagcctgttcgatggcatcgccaccggtctgctggtgctgaaggacctgggcatccaggtggataggtacattgcctccgaggtgtgcgaggactccatcaccgtgggaatggtgcgtcatcagggcaagatcatgtacgtgggcgacgtgcggagcgtgacacagaagcatatccaggagtggggccctttcgacctggtgatcggcggcagcccttgcaatgacctgagcatcgtgaacccagcccggaagggcctgtacgagggaaccggcagactgttcttcgagttttacagactgctgcacgacgcccggcctaaggaaggcgacgaccggcccttcttttggctgttcgagaatgtggtggccatgggagtcagcgacaagcgggatattagccggttcctggagagcaaccccgtgatgatcgatgccaaggaagtgagcgccgcccaccgggccagatacttctggggcaatctgcctggcatgaacagacccctggccagcaccgtgaacgacaagctggagctgcaggagtgcctggagcacggccggatcgccaagttcagcaaggtgagaaccatcaccacccgaagcaacagcatcaaacaaggcaaggaccagcactttcctgtgttcatgaacgagaaggaggacatcctgtggtgtaccgagatggagagagtgttcgggttcccagtccactacacagatgtcagcaacatgtctagactggccagacagagactgctgggaagaagctggtccgtccctgtgatcagacacctgttcgcccctctgaaggagtacttcgcctgcgtgagcagcggcaacagcaacgccaacagccggggccccagcttctctagcggcctggtgccactgtccctgagagggagccacatgggccccatggagatctacaaaaccgtgagcgcctggaagcggcagcctgtgcgcgtgctgagcctgtttcggaatatcgataaagtcctgaaaagcctgggattcctggagagcggctctggctccggcggtggcaccctgaagtacgtggaggatgtgacaaacgtggtcagacgggatgtggagaagtggggccccttcgatctggtgtacggcagcacccaacccctgggcagctcttgtgaccggtgccctggctggtacatgtttcagttccaccggatcctgcagtacgccctgccgagacaggagtcccagcggccattcttttggattttcatggacaacttgctgctgaccgaggatgaccaggaaactaccactcggttcctgcagaccgaagccgtgaccctgcaggacgtgagaggccgggactaccagaacgccatgcgggtgtggtccaacatccctggactgaaaagcaagcacgcacctctgacccctaaagaagaggagtacctgcaggcccaggtgcggagcagaagcaagctggacgcccctaaggtggatctgctggtgaagaattgcctcctgcccctgagagagtacttcaagtatttcagccagaatagtctgcccctgggcggcccaagcagcggcgcccctcctcccagcggcggcagcccagccggctccccaacctctaccgaggagggcacctctgagtccgccacccccgagagcggccctggcacctccaccgagcccagcgagggcagcgcacccggcagccctgccggcagccccacctccacagaggagggaaccagcaccgagcccagcgaaggcagcgccccaggcaccagcaccgagcctagtgagggcggctctggcggcggcagcgcccaggagattaaacggatcaacaagatcagaagaagacttgtgaaagacagcaacaccaagaaggccggcaagacaggccccatgaaaaccctgctggttagagtgatgacacccgatctgagagagcggctggaaaacctgagaaagaagcctgaaaatatcccccagcccatcagcaatacatctagagccaacctgaataagctgctgaccgattacaccgaaatgaagaaggcgatcctgcatgtgtactgggaagagttccagaaggaccctgtgggcctgatgagccgggtggcccagcctgccagcaagaagatcgatcagaacaagctgaaacctgagatggacgagaagggcaacctgaccaccgccggctttgcctgctctcagtgtggccagcccctgttcgtgtacaagctggagcaggtgtctgagaagggcaaggcttacaccaactacttcggacggtgcaatgtggccgagcacgaaaagctgatcctgctggcccagctgaagcccgagaaggatagcgacgaagccgtgacatatagcctgggaaagtttgggcagagggccctggatttctacagcattcatgtgaccaaggagtccacccaccccgtgaagcccctggcccagatcgccggaaacagatacgcctccggacctgtgggaaaggccctgagcgacgcatgtatgggcacaatcgcctccttcctgtctaagtaccaggacatcatcatcgaacaccagaaggtggtgaagggcaaccagaagagactggagagcctgcgggagctggccggcaaggaaaacctggaataccctagcgtgaccctgccacctcagcctcacaccaaggagggcgttgatgcctacaacgaagtgatcgcccgggtgcgaatgtgggtgaacctgaacctgtggcagaagctgaagctaagcagagatgatgccaagcctctgctgagactgaagggattcccttcctttcctctggtcgagagacaggccaacgaagtggactggtgggacatggtgtgtaacgtgaagaagctgatcaacgagaaaaaggaggatggcaaggtgttttggcagaatctggctggctacaagagacaggaagccctgagaccatacctgagcagcgaggaagatcggaagaagggaaagaaattcgctcggtaccagctgggcgacctgctgctgcacctggaaaagaagcacggcgaggactggggaaaggtgtacgacgaggcctgggagcggattgacaagaaagtggaaggcctgagcaagcacatcaagctggaagaggaacggagaagcgaggacgcccagagcaaggccgccctgaccgactggctgcgggctaaggccagcttcgtgatcgagggcctgaaggaggccgacaaggacgagttctgcagatgcgagctgaagctgcagaagtggtacggggacctgcggggaaagcccttcgccatcgaagccgagaacagcatcctggacatcagcggcttcagcaagcagtacaactgtgccttcatctggcagaaggacggcgtgaagaagctgaacctgtacctgatcatcaactacttcaagggcggcaagctgcggttcaagaagatcaaacctgaagccttcgaagccaacagattctacaccgtgatcaacaaaaagagcggcgagatcgtgcccatggaggtgaacttcaacttcgacgaccccaacctgatcatcctgcctctggcctttggcaagagacagggcagagaattcatctggaacgacctgctgtccctggaaaccggcagcctgaagctggccaacggaagagtgatcgagaagacactgtacaacagaagaacccggcaggatgagcctgccctgttcgtggccctgaccttcgagcggcgggaggtcctggactcctccaatatcaaaccaatgaacctgatcggcgtggcaagaggcgaaaacatccccgccgtgatcgccctgaccgaccccgagggctgcccactgagccggtttaaggatagcctgggaaacccaacccacatcctgagaatcggcgagagctataaggagaagcagcggaccatccaggccaagaaggaggtggagcagcggagagccggcggctacagccggaagtacgccagcaaagccaagaatctggcagacgatatggtgagaaacaccgctagagatctgctgtactacgccgtgacccaggatgccatgctgatcttcgccaacctgagccggggcttcggccggcagggcaagcggaccttcatggccgagagacagtacacacggatggaggactggctgaccgccaagctggcctacgagggcctgagcaagacctacctgtccaagacactggcccagtacacctccaagacatgcagcaactgtgggtttaccatcaccagcgccgactacgacagggtgctggagaagctgaagaagacagcaacaggctggatgaccacaattaacggcaaggagctgaaggtggagggccagattacctactacaacagatacaagagacagaacgtagtcaaggacctgtccgtcgagctggatagactgagcgaagaatctgtgaacaacgacatctcctcctggacaaagggcagaagcggagaagctctgagcctcctgaagaaaagattctcccatagacccgtgcaggagaagttcgtgtgcctgaactgcggcttcgagacacacgcagccgagcaagccgccctgaacatcgccagatcctggctgttcctgcggagccaggagtacaagaaataccagacaaacaagacaaccggcaacaccgataagagagccttcgtcgagacctggcagtccttttaccggaagaagcttaaggaggtgtggaaacctgccgtgcggtctggcggatctggcggaggctccacaagcatggcccacttccagggcagcgtgaccttcgaggacgtggccatcgccttcagccagcaggagtgggagagcctggacagcagccagaggggcctgtacagggacgtgatgctggagaactacaggaacctggtgagcatgggccacagcctgagcaagccccacgtgatcgccctgctggagaggtggaaggagcccaaggtgaccgagaggaaggacggcaggaggtggtgcaccgacctgaccagccccaagaaaaagagaaaagtctaagctgccttctgcggggcttgccttctggccatgcccttcttctctcccttgcacctgtacctcttggtctttgaataaagcctgagtaggaaggctagcaaaaaaaaaaaaaaaaaaaaaaaaaaaaaaaaaaaaaaaaaaaaaaaaaaaaaaaaaaaaaaaaaaaaaaaaaaaaaaaa

SEQ ID NO: 6679 - RNA, 5797 nt, synthetic construct
  source 1..5797: mol_type = other RNA
aggaaataagagagaaaagaagagtaagaagaaatataagagccaccatggcccctaagaagaagcgtaaagtgagccggatggaacgcctcgtctacgaggtgcggcagaagtgcagaaacatcgaggacatctgcatctcctgcggatctctgaacgtgaccctggagcacccactgttcatcggcggcatgtgccagaactgtaaaaactgttttctggagtgtgcctatcaatacgacgatgacggctaccagagctactgcaccatctgttgcggcggaagagaggtgctgatgtgtggaaataacaactgctgccggtgcttctgcgtggaatgcgtggacctgctggtgggccccggcgccgcccaggccgctattaaggaagatccttggaactgctacatgtgcggccacaagggcacatacggcctgctgagacggagagaggactggcctagcagactgcagatgttcttcgccaataaccacgaccaggagttcgacccccctaaggtgtaccctcccgtccccgccgagaagagaaagcccatccgggtcctgagcctgttcgatggcatcgccaccggtctgctggtgctgaaggacctgggcatccaggtggataggtacattgcctccgaggtgtgcgaggactccatcaccgtgggaatggtgcgtcatcagggcaagatcatgtacgtgggcgacgtgcggagcgtgacacagaagcatatccaggagtggggccctttcgacctggtgatcggcggcagcccttgcaatgacctgagcatcgtgaacccagcccggaagggcctgtacgagggaaccggcagactgttcttcgagttttacagactgctgcacgacgcccggcctaaggaaggcgacgaccggcccttcttttggctgttcgagaatgtggtggccatgggagtcagcgacaagcgggatattagccggttcctggagagcaaccccgtgatgatcgatgccaaggaagtgagcgccgcccaccgggccagatacttctggggcaatctgcctggcatgaacagacccctggccagcaccgtgaacgacaagctggagctgcaggagtgcctggagcacggccggatcgccaagttcagcaaggtgagaaccatcaccacccgaagcaacagcatcaaacaaggcaaggaccagcactttcctgtgttcatgaacgagaaggaggacatcctgtggtgtaccgagatggagagagtgttcgggttcccagtccactacacagatgtcagcaacatgtctagactggccagacagagactgctgggaagaagctggtccgtccctgtgatcagacacctgttcgcccctctgaaggagtacttcgcctgcgtgagcagcggcaacagcaacgccaacagccggggccccagcttctctagcggcctggtgccactgtccctgagagggagccacatgggccccatggagatctacaaaaccgtgagcgcctggaagcggcagcctgtgcgcgtgctgagcctgtttcggaatatcgataaagtcctgaaaagcctgggattcctggagagcggctctggctccggcggtggcaccctgaagtacgtggaggatgtgacaaacgtggtcagacgggatgtggagaagtggggccccttcgatctggtgtacggcagcacccaacccctgggcagctcttgtgaccggtgccctggctggtacatgtttcagttccaccggatcctgcagtacgccctgccgagacaggagtcccagcggccattcttttggattttcatggacaacttgctgctgaccgaggatgaccaggaaactaccactcggttcctgcagaccgaagccgtgaccctgcaggacgtgagaggccgggactaccagaacgccatgcgggtgtggtccaacatccctggactgaaaagcaagcacgcacctctgacccctaaagaagaggagtacctgcaggcccaggtgcggagcagaagcaagctggacgcccctaaggtggatctgctggtgaagaattgcctcctgcccctgagagagtacttcaagtatttcagccagaatagtctgcccctgggcggcccaagcagcggcgcccctcctcccagcggcggcagcccagccggctccccaacctctaccgaggagggcacctctgagtccgccacccccgagagcggccctggcacctccaccgagcccagcgagggcagcgcacccggcagccctgccggcagccccacctccacagaggagggaaccagcaccgagcccagcgaaggcagcgccccaggcaccagcaccgagcctagtgagggcggctctggcggcggcagcgcccaggagattaaacggatcaacaagatcagaagaagacttgtgaaagacagcaacaccaagaaggccggcaagacaggccccatgaaaaccctgctggttagagtgatgacacccgatctgagagagcggctggaaaacctgagaaagaagcctgaaaatatcccccagcccatcagcaatacatctagagccaacctgaataagctgctgaccgattacaccgaaatgaagaaggcgatcctgcatgtgtactgggaagagttccagaaggaccctgtgggcctgatgagccgggtggcccagcctgccagcaagaagatcgatcagaacaagctgaaacctgagatggacgagaagggcaacctgaccaccgccggctttgcctgctctcagtgtggccagcccctgttcgtgtacaagctggagcaggtgtctgagaagggcaaggcttacaccaactacttcggacggtgcaatgtggccgagcacgaaaagctgatcctgctggcccagctgaagcccgagaaggatagcgacgaagccgtgacatatagcctgggaaagtttgggcagagggccctggatttctacagcattcatgtgaccaaggagtccacccaccccgtgaagcccctggcccagatcgccggaaacagatacgcctccggacctgtgggaaaggccctgagcgacgcatgtatgggcacaatcgcctccttcctgtctaagtaccaggacatcatcatcgaacaccagaaggtggtgaagggcaaccagaagagactggagagcctgcgggagctggccggcaaggaaaacctggaataccctagcgtgaccctgccacctcagcctcacaccaaggagggcgttgatgcctacaacgaagtgatcgcccgggtgcgaatgtgggtgaacctgaacctgtggcagaagctgaagctaagcagagatgatgccaagcctctgctgagactgaagggattcccttcctttcctctggtcgagagacaggccaacgaagtggactggtgggacatggtgtgtaacgtgaagaagctgatcaacgagaaaaaggaggatggcaaggtgttttggcagaatctggctggctacaagagacaggaagccctgagaccatacctgagcagcgaggaagatcggaagaagggaaagaaattcgctcggtaccagctgggcgacctgctgctgcacctggaaaagaagcacggcgaggactggggaaaggtgtacgacgaggcctgggagcggattgacaagaaagtggaaggcctgagcaagcacatcaagctggaagaggaacggagaagcgaggacgcccagagcaaggccgccctgaccgactggctgcgggctaaggccagcttcgtgatcgagggcctgaaggaggccgacaaggacgagttctgcagatgcgagctgaagctgcagaagtggtacggggacctgcggggaaagcccttcgccatcgaagccgagaacagcatcctggacatcagcggcttcagcaagcagtacaactgtgccttcatctggcagaaggacggcgtgaagaagctgaacctgtacctgatcatcaactacttcaagggcggcaagctgcggttcaagaagatcaaacctgaagccttcgaagccaacagattctacaccgtgatcaacaaaaagagcggcgagatcgtgcccatggaggtgaacttcaacttcgacgaccccaacctgatcatcctgcctctggcctttggcaagagacagggcagagaattcatctggaacgacctgctgtccctggaaaccggcagcctgaagctggccaacggaagagtgatcgagaagacactgtacaacagaagaacccggcaggatgagcctgccctgttcgtggccctgaccttcgagcggcgggaggtcctggactcctccaatatcaaaccaatgaacctgatcggcgtggcaagaggcgaaaacatccccgccgtgatcgccctgaccgaccccgagggctgcccactgagccggtttaaggatagcctgggaaacccaacccacatcctgagaatcggcgagagctataaggagaagcagcggaccatccaggccaagaaggaggtggagcagcggagagccggcggctacagccggaagtacgccagcaaagccaagaatctggcagacgatatggtgagaaacaccgctagagatctgctgtactacgccgtgacccaggatgccatgctgatcttcgccaacctgagccggggcttcggccggcagggcaagcggaccttcatggccgagagacagtacacacggatggaggactggctgaccgccaagctggcctacgagggcctgagcaagacctacctgtccaagacactggcccagtacacctccaagacatgcagcaactgtgggtttaccatcaccagcgccgactacgacagggtgctggagaagctgaagaagacagcaacaggctggatgaccacaattaacggcaaggagctgaaggtggagggccagattacctactacaacagatacaagagacagaacgtagtcaaggacctgtccgtcgagctggatagactgagcgaagaatctgtgaacaacgacatctcctcctggacaaagggcagaagcggagaagctctgagcctcctgaagaaaagattctcccatagacccgtgcaggagaagttcgtgtgcctgaactgcggcttcgagacacacgcagccgagcaagccgccctgaacatcgccagatcctggctgttcctgcggagccaggagtacaagaaataccagacaaacaagacaaccggcaacaccgataagagagccttcgtcgagacctggcagtccttttaccggaagaagcttaaggaggtgtggaaacctgccgtgcggtctggcggatctggcggaggctccacaagcttccaggagcccgtgaccttcgaggacgtggccgtgtacttcacccagaaccagtgggccagcctggacagcgcccagagggccctgtacagggaggtgatgctggagaactacgccaacgtggccagcctggtgagccccttccccaggcccgacctgatcagccagctggagaggggcgaggccccctgggaccccaacccctgggaggccgaggacctgaggggcatctgccccggcgagaccagccccaagaaaaagagaaaagtctaagctgccttctgcggggcttgccttctggccatgcccttcttctctcccttgcacctgtacctcttggtctttgaataaagcctgagtaggaaggctagcaaaaaaaaaaaaaaaaaaaaaaaaaaaaaaaaaaaaaaaaaaaaaaaaaaaaaaaaaaaaaaaaaaaaaaaaaaaaaaaa

SEQ ID NO: 6680 - RNA, 5797 nt, synthetic construct
  source 1..5797: mol_type = other RNA
aggaaataagagagaaaagaagagtaagaagaaatataagagccaccatggcccctaagaagaagcgtaaagtgagccggatggaacgcctcgtctacgaggtgcggcagaagtgcagaaacatcgaggacatctgcatctcctgcggatctctgaacgtgaccctggagcacccactgttcatcggcggcatgtgccagaactgtaaaaactgttttctggagtgtgcctatcaatacgacgatgacggctaccagagctactgcaccatctgttgcggcggaagagaggtgctgatgtgtggaaataacaactgctgccggtgcttctgcgtggaatgcgtggacctgctggtgggccccggcgccgcccaggccgctattaaggaagatccttggaactgctacatgtgcggccacaagggcacatacggcctgctgagacggagagaggactggcctagcagactgcagatgttcttcgccaataaccacgaccaggagttcgacccccctaaggtgtaccctcccgtccccgccgagaagagaaagcccatccgggtcctgagcctgttcgatggcatcgccaccggtctgctggtgctgaaggacctgggcatccaggtggataggtacattgcctccgaggtgtgcgaggactccatcaccgtgggaatggtgcgtcatcagggcaagatcatgtacgtgggcgacgtgcggagcgtgacacagaagcatatccaggagtggggccctttcgacctggtgatcggcggcagcccttgcaatgacctgagcatcgtgaacccagcccggaagggcctgtacgagggaaccggcagactgttcttcgagttttacagactgctgcacgacgcccggcctaaggaaggcgacgaccggcccttcttttggctgttcgagaatgtggtggccatgggagtcagcgacaagcgggatattagccggttcctggagagcaaccccgtgatgatcgatgccaaggaagtgagcgccgcccaccgggccagatacttctggggcaatctgcctggcatgaacagacccctggccagcaccgtgaacgacaagctggagctgcaggagtgcctggagcacggccggatcgccaagttcagcaaggtgagaaccatcaccacccgaagcaacagcatcaaacaaggcaaggaccagcactttcctgtgttcatgaacgagaaggaggacatcctgtggtgtaccgagatggagagagtgttcgggttcccagtccactacacagatgtcagcaacatgtctagactggccagacagagactgctgggaagaagctggtccgtccctgtgatcagacacctgttcgcccctctgaaggagtacttcgcctgcgtgagcagcggcaacagcaacgccaacagccggggccccagcttctctagcggcctggtgccactgtccctgagagggagccacatgggccccatggagatctacaaaaccgtgagcgcctggaagcggcagcctgtgcgcgtgctgagcctgtttcggaatatcgataaagtcctgaaaagcctgggattcctggagagcggctctggctccggcggtggcaccctgaagtacgtggaggatgtgacaaacgtggtcagacgggatgtggagaagtggggccccttcgatctggtgtacggcagcacccaacccctgggcagctcttgtgaccggtgccctggctggtacatgtttcagttccaccggatcctgcagtacgccctgccgagacaggagtcccagcggccattcttttggattttcatggacaacttgctgctgaccgaggatgaccaggaaactaccactcggttcctgcagaccgaagccgtgaccctgcaggacgtgagaggccgggactaccagaacgccatgcgggtgtggtccaacatccctggactgaaaagcaagcacgcacctctgacccctaaagaagaggagtacctgcaggcccaggtgcggagcagaagcaagctggacgcccctaaggtggatctgctggtgaagaattgcctcctgcccctgagagagtacttcaagtatttcagccagaatagtctgcccctgggcggcccaagcagcggcgcccctcctcccagcggcggcagcccagccggctccccaacctctaccgaggagggcacctctgagtccgccacccccgagagcggccctggcacctccaccgagcccagcgagggcagcgcacccggcagccctgccggcagccccacctccacagaggagggaaccagcaccgagcccagcgaaggcagcgccccaggcaccagcaccgagcctagtgagggcggctctggcggcggcagcgcccaggagattaaacggatcaacaagatcagaagaagacttgtgaaagacagcaacaccaagaaggccggcaagacaggccccatgaaaaccctgctggttagagtgatgacacccgatctgagagagcggctggaaaacctgagaaagaagcctgaaaatatcccccagcccatcagcaatacatctagagccaacctgaataagctgctgaccgattacaccgaaatgaagaaggcgatcctgcatgtgtactgggaagagttccagaaggaccctgtgggcctgatgagccgggtggcccagcctgccagcaagaagatcgatcagaacaagctgaaacctgagatggacgagaagggcaacctgaccaccgccggctttgcctgctctcagtgtggccagcccctgttcgtgtacaagctggagcaggtgtctgagaagggcaaggcttacaccaactacttcggacggtgcaatgtggccgagcacgaaaagctgatcctgctggcccagctgaagcccgagaaggatagcgacgaagccgtgacatatagcctgggaaagtttgggcagagggccctggatttctacagcattcatgtgaccaaggagtccacccaccccgtgaagcccctggcccagatcgccggaaacagatacgcctccggacctgtgggaaaggccctgagcgacgcatgtatgggcacaatcgcctccttcctgtctaagtaccaggacatcatcatcgaacaccagaaggtggtgaagggcaaccagaagagactggagagcctgcgggagctggccggcaaggaaaacctggaataccctagcgtgaccctgccacctcagcctcacaccaaggagggcgttgatgcctacaacgaagtgatcgcccgggtgcgaatgtgggtgaacctgaacctgtggcagaagctgaagctaagcagagatgatgccaagcctctgctgagactgaagggattcccttcctttcctctggtcgagagacaggccaacgaagtggactggtgggacatggtgtgtaacgtgaagaagctgatcaacgagaaaaaggaggatggcaaggtgttttggcagaatctggctggctacaagagacaggaagccctgagaccatacctgagcagcgaggaagatcggaagaagggaaagaaattcgctcggtaccagctgggcgacctgctgctgcacctggaaaagaagcacggcgaggactggggaaaggtgtacgacgaggcctgggagcggattgacaagaaagtggaaggcctgagcaagcacatcaagctggaagaggaacggagaagcgaggacgcccagagcaaggccgccctgaccgactggctgcgggctaaggccagcttcgtgatcgagggcctgaaggaggccgacaaggacgagttctgcagatgcgagctgaagctgcagaagtggtacggggacctgcggggaaagcccttcgccatcgaagccgagaacagcatcctggacatcagcggcttcagcaagcagtacaactgtgccttcatctggcagaaggacggcgtgaagaagctgaacctgtacctgatcatcaactacttcaagggcggcaagctgcggttcaagaagatcaaacctgaagccttcgaagccaacagattctacaccgtgatcaacaaaaagagcggcgagatcgtgcccatggaggtgaacttcaacttcgacgaccccaacctgatcatcctgcctctggcctttggcaagagacagggcagagaattcatctggaacgacctgctgtccctggaaaccggcagcctgaagctggccaacggaagagtgatcgagaagacactgtacaacagaagaacccggcaggatgagcctgccctgttcgtggccctgaccttcgagcggcgggaggtcctggactcctccaatatcaaaccaatgaacctgatcggcgtggcaagaggcgaaaacatccccgccgtgatcgccctgaccgaccccgagggctgcccactgagccggtttaaggatagcctgggaaacccaacccacatcctgagaatcggcgagagctataaggagaagcagcggaccatccaggccaagaaggaggtggagcagcggagagccggcggctacagccggaagtacgccagcaaagccaagaatctggcagacgatatggtgagaaacaccgctagagatctgctgtactacgccgtgacccaggatgccatgctgatcttcgccaacctgagccggggcttcggccggcagggcaagcggaccttcatggccgagagacagtacacacggatggaggactggctgaccgccaagctggcctacgagggcctgagcaagacctacctgtccaagacactggcccagtacacctccaagacatgcagcaactgtgggtttaccatcaccagcgccgactacgacagggtgctggagaagctgaagaagacagcaacaggctggatgaccacaattaacggcaaggagctgaaggtggagggccagattacctactacaacagatacaagagacagaacgtagtcaaggacctgtccgtcgagctggatagactgagcgaagaatctgtgaacaacgacatctcctcctggacaaagggcagaagcggagaagctctgagcctcctgaagaaaagattctcccatagacccgtgcaggagaagttcgtgtgcctgaactgcggcttcgagacacacgcagccgagcaagccgccctgaacatcgccagatcctggctgttcctgcggagccaggagtacaagaaataccagacaaacaagacaaccggcaacaccgataagagagccttcgtcgagacctggcagtccttttaccggaagaagcttaaggaggtgtggaaacctgccgtgcggtctggcggatctggcggaggctccacaagcccccagaagagcgtgaccttcgaggacgtggccgtgtacttcacccaggccgagtgggacggcctgagccccgcccagaggaccctgtacagggacgtgatgctggagaactacggcaacgtggccagcctgggcttccccctgctgaagcccgccgtgatcagccagctggagggcggcggcgacctgggcggccccagccccctggccgccggcaccggcctgcagggcctgaggaccgtgaccagccccaagaaaaagagaaaagtctaagctgccttctgcggggcttgccttctggccatgcccttcttctctcccttgcacctgtacctcttggtctttgaataaagcctgagtaggaaggctagcaaaaaaaaaaaaaaaaaaaaaaaaaaaaaaaaaaaaaaaaaaaaaaaaaaaaaaaaaaaaaaaaaaaaaaaaaaaaaaaa

SEQ ID NO: 6681 - RNA, 5797 nt, synthetic construct
  source 1..5797: mol_type = other RNA
aggaaataagagagaaaagaagagtaagaagaaatataagagccaccatggcccctaagaagaagcgtaaagtgagccggatggaacgcctcgtctacgaggtgcggcagaagtgcagaaacatcgaggacatctgcatctcctgcggatctctgaacgtgaccctggagcacccactgttcatcggcggcatgtgccagaactgtaaaaactgttttctggagtgtgcctatcaatacgacgatgacggctaccagagctactgcaccatctgttgcggcggaagagaggtgctgatgtgtggaaataacaactgctgccggtgcttctgcgtggaatgcgtggacctgctggtgggccccggcgccgcccaggccgctattaaggaagatccttggaactgctacatgtgcggccacaagggcacatacggcctgctgagacggagagaggactggcctagcagactgcagatgttcttcgccaataaccacgaccaggagttcgacccccctaaggtgtaccctcccgtccccgccgagaagagaaagcccatccgggtcctgagcctgttcgatggcatcgccaccggtctgctggtgctgaaggacctgggcatccaggtggataggtacattgcctccgaggtgtgcgaggactccatcaccgtgggaatggtgcgtcatcagggcaagatcatgtacgtgggcgacgtgcggagcgtgacacagaagcatatccaggagtggggccctttcgacctggtgatcggcggcagcccttgcaatgacctgagcatcgtgaacccagcccggaagggcctgtacgagggaaccggcagactgttcttcgagttttacagactgctgcacgacgcccggcctaaggaaggcgacgaccggcccttcttttggctgttcgagaatgtggtggccatgggagtcagcgacaagcgggatattagccggttcctggagagcaaccccgtgatgatcgatgccaaggaagtgagcgccgcccaccgggccagatacttctggggcaatctgcctggcatgaacagacccctggccagcaccgtgaacgacaagctggagctgcaggagtgcctggagcacggccggatcgccaagttcagcaaggtgagaaccatcaccacccgaagcaacagcatcaaacaaggcaaggaccagcactttcctgtgttcatgaacgagaaggaggacatcctgtggtgtaccgagatggagagagtgttcgggttcccagtccactacacagatgtcagcaacatgtctagactggccagacagagactgctgggaagaagctggtccgtccctgtgatcagacacctgttcgcccctctgaaggagtacttcgcctgcgtgagcagcggcaacagcaacgccaacagccggggccccagcttctctagcggcctggtgccactgtccctgagagggagccacatgggccccatggagatctacaaaaccgtgagcgcctggaagcggcagcctgtgcgcgtgctgagcctgtttcggaatatcgataaagtcctgaaaagcctgggattcctggagagcggctctggctccggcggtggcaccctgaagtacgtggaggatgtgacaaacgtggtcagacgggatgtggagaagtggggccccttcgatctggtgtacggcagcacccaacccctgggcagctcttgtgaccggtgccctggctggtacatgtttcagttccaccggatcctgcagtacgccctgccgagacaggagtcccagcggccattcttttggattttcatggacaacttgctgctgaccgaggatgaccaggaaactaccactcggttcctgcagaccgaagccgtgaccctgcaggacgtgagaggccgggactaccagaacgccatgcgggtgtggtccaacatccctggactgaaaagcaagcacgcacctctgacccctaaagaagaggagtacctgcaggcccaggtgcggagcagaagcaagctggacgcccctaaggtggatctgctggtgaagaattgcctcctgcccctgagagagtacttcaagtatttcagccagaatagtctgcccctgggcggcccaagcagcggcgcccctcctcccagcggcggcagcccagccggctccccaacctctaccgaggagggcacctctgagtccgccacccccgagagcggccctggcacctccaccgagcccagcgagggcagcgcacccggcagccctgccggcagccccacctccacagaggagggaaccagcaccgagcccagcgaaggcagcgccccaggcaccagcaccgagcctagtgagggcggctctggcggcggcagcgcccaggagattaaacggatcaacaagatcagaagaagacttgtgaaagacagcaacaccaagaaggccggcaagacaggccccatgaaaaccctgctggttagagtgatgacacccgatctgagagagcggctggaaaacctgagaaagaagcctgaaaatatcccccagcccatcagcaatacatctagagccaacctgaataagctgctgaccgattacaccgaaatgaagaaggcgatcctgcatgtgtactgggaagagttccagaaggaccctgtgggcctgatgagccgggtggcccagcctgccagcaagaagatcgatcagaacaagctgaaacctgagatggacgagaagggcaacctgaccaccgccggctttgcctgctctcagtgtggccagcccctgttcgtgtacaagctggagcaggtgtctgagaagggcaaggcttacaccaactacttcggacggtgcaatgtggccgagcacgaaaagctgatcctgctggcccagctgaagcccgagaaggatagcgacgaagccgtgacatatagcctgggaaagtttgggcagagggccctggatttctacagcattcatgtgaccaaggagtccacccaccccgtgaagcccctggcccagatcgccggaaacagatacgcctccggacctgtgggaaaggccctgagcgacgcatgtatgggcacaatcgcctccttcctgtctaagtaccaggacatcatcatcgaacaccagaaggtggtgaagggcaaccagaagagactggagagcctgcgggagctggccggcaaggaaaacctggaataccctagcgtgaccctgccacctcagcctcacaccaaggagggcgttgatgcctacaacgaagtgatcgcccgggtgcgaatgtgggtgaacctgaacctgtggcagaagctgaagctaagcagagatgatgccaagcctctgctgagactgaagggattcccttcctttcctctggtcgagagacaggccaacgaagtggactggtgggacatggtgtgtaacgtgaagaagctgatcaacgagaaaaaggaggatggcaaggtgttttggcagaatctggctggctacaagagacaggaagccctgagaccatacctgagcagcgaggaagatcggaagaagggaaagaaattcgctcggtaccagctgggcgacctgctgctgcacctggaaaagaagcacggcgaggactggggaaaggtgtacgacgaggcctgggagcggattgacaagaaagtggaaggcctgagcaagcacatcaagctggaagaggaacggagaagcgaggacgcccagagcaaggccgccctgaccgactggctgcgggctaaggccagcttcgtgatcgagggcctgaaggaggccgacaaggacgagttctgcagatgcgagctgaagctgcagaagtggtacggggacctgcggggaaagcccttcgccatcgaagccgagaacagcatcctggacatcagcggcttcagcaagcagtacaactgtgccttcatctggcagaaggacggcgtgaagaagctgaacctgtacctgatcatcaactacttcaagggcggcaagctgcggttcaagaagatcaaacctgaagccttcgaagccaacagattctacaccgtgatcaacaaaaagagcggcgagatcgtgcccatggaggtgaacttcaacttcgacgaccccaacctgatcatcctgcctctggcctttggcaagagacagggcagagaattcatctggaacgacctgctgtccctggaaaccggcagcctgaagctggccaacggaagagtgatcgagaagacactgtacaacagaagaacccggcaggatgagcctgccctgttcgtggccctgaccttcgagcggcgggaggtcctggactcctccaatatcaaaccaatgaacctgatcggcgtggcaagaggcgaaaacatccccgccgtgatcgccctgaccgaccccgagggctgcccactgagccggtttaaggatagcctgggaaacccaacccacatcctgagaatcggcgagagctataaggagaagcagcggaccatccaggccaagaaggaggtggagcagcggagagccggcggctacagccggaagtacgccagcaaagccaagaatctggcagacgatatggtgagaaacaccgctagagatctgctgtactacgccgtgacccaggatgccatgctgatcttcgccaacctgagccggggcttcggccggcagggcaagcggaccttcatggccgagagacagtacacacggatggaggactggctgaccgccaagctggcctacgagggcctgagcaagacctacctgtccaagacactggcccagtacacctccaagacatgcagcaactgtgggtttaccatcaccagcgccgactacgacagggtgctggagaagctgaagaagacagcaacaggctggatgaccacaattaacggcaaggagctgaaggtggagggccagattacctactacaacagatacaagagacagaacgtagtcaaggacctgtccgtcgagctggatagactgagcgaagaatctgtgaacaacgacatctcctcctggacaaagggcagaagcggagaagctctgagcctcctgaagaaaagattctcccatagacccgtgcaggagaagttcgtgtgcctgaactgcggcttcgagacacacgcagccgagcaagccgccctgaacatcgccagatcctggctgttcctgcggagccaggagtacaagaaataccagacaaacaagacaaccggcaacaccgataagagagccttcgtcgagacctggcagtccttttaccggaagaagcttaaggaggtgtggaaacctgccgtgcggtctggcggatctggcggaggctccacaagcgagaagcagttcagcttccagagcctgctgaccttcgaggacgtggccatcaacttcagcaagaaggagtgggagtgcctggacaccagccagagggacctgtacaggttcgtgatgctggagaactacagcaacctggtgagcgtgggcctgagcgtgagcaagcccgagctggtgacctgcctggagcagaacaaggagccctggatggtgaacatcgaggagagcgaggtgctggagcccaccagccccaagaaaaagagaaaagtctaagctgccttctgcggggcttgccttctggccatgcccttcttctctcccttgcacctgtacctcttggtctttgaataaagcctgagtaggaaggctagcaaaaaaaaaaaaaaaaaaaaaaaaaaaaaaaaaaaaaaaaaaaaaaaaaaaaaaaaaaaaaaaaaaaaaaaaaaaaaaaa

SEQ ID NO: 6682 - RNA, 5797 nt, synthetic construct
  source 1..5797: mol_type = other RNA
aggaaataagagagaaaagaagagtaagaagaaatataagagccaccatggcccctaagaagaagcgtaaagtgagccggatggaacgcctcgtctacgaggtgcggcagaagtgcagaaacatcgaggacatctgcatctcctgcggatctctgaacgtgaccctggagcacccactgttcatcggcggcatgtgccagaactgtaaaaactgttttctggagtgtgcctatcaatacgacgatgacggctaccagagctactgcaccatctgttgcggcggaagagaggtgctgatgtgtggaaataacaactgctgccggtgcttctgcgtggaatgcgtggacctgctggtgggccccggcgccgcccaggccgctattaaggaagatccttggaactgctacatgtgcggccacaagggcacatacggcctgctgagacggagagaggactggcctagcagactgcagatgttcttcgccaataaccacgaccaggagttcgacccccctaaggtgtaccctcccgtccccgccgagaagagaaagcccatccgggtcctgagcctgttcgatggcatcgccaccggtctgctggtgctgaaggacctgggcatccaggtggataggtacattgcctccgaggtgtgcgaggactccatcaccgtgggaatggtgcgtcatcagggcaagatcatgtacgtgggcgacgtgcggagcgtgacacagaagcatatccaggagtggggccctttcgacctggtgatcggcggcagcccttgcaatgacctgagcatcgtgaacccagcccggaagggcctgtacgagggaaccggcagactgttcttcgagttttacagactgctgcacgacgcccggcctaaggaaggcgacgaccggcccttcttttggctgttcgagaatgtggtggccatgggagtcagcgacaagcgggatattagccggttcctggagagcaaccccgtgatgatcgatgccaaggaagtgagcgccgcccaccgggccagatacttctggggcaatctgcctggcatgaacagacccctggccagcaccgtgaacgacaagctggagctgcaggagtgcctggagcacggccggatcgccaagttcagcaaggtgagaaccatcaccacccgaagcaacagcatcaaacaaggcaaggaccagcactttcctgtgttcatgaacgagaaggaggacatcctgtggtgtaccgagatggagagagtgttcgggttcccagtccactacacagatgtcagcaacatgtctagactggccagacagagactgctgggaagaagctggtccgtccctgtgatcagacacctgttcgcccctctgaaggagtacttcgcctgcgtgagcagcggcaacagcaacgccaacagccggggccccagcttctctagcggcctggtgccactgtccctgagagggagccacatgggccccatggagatctacaaaaccgtgagcgcctggaagcggcagcctgtgcgcgtgctgagcctgtttcggaatatcgataaagtcctgaaaagcctgggattcctggagagcggctctggctccggcggtggcaccctgaagtacgtggaggatgtgacaaacgtggtcagacgggatgtggagaagtggggccccttcgatctggtgtacggcagcacccaacccctgggcagctcttgtgaccggtgccctggctggtacatgtttcagttccaccggatcctgcagtacgccctgccgagacaggagtcccagcggccattcttttggattttcatggacaacttgctgctgaccgaggatgaccaggaaactaccactcggttcctgcagaccgaagccgtgaccctgcaggacgtgagaggccgggactaccagaacgccatgcgggtgtggtccaacatccctggactgaaaagcaagcacgcacctctgacccctaaagaagaggagtacctgcaggcccaggtgcggagcagaagcaagctggacgcccctaaggtggatctgctggtgaagaattgcctcctgcccctgagagagtacttcaagtatttcagccagaatagtctgcccctgggcggcccaagcagcggcgcccctcctcccagcggcggcagcccagccggctccccaacctctaccgaggagggcacctctgagtccgccacccccgagagcggccctggcacctccaccgagcccagcgagggcagcgcacccggcagccctgccggcagccccacctccacagaggagggaaccagcaccgagcccagcgaaggcagcgccccaggcaccagcaccgagcctagtgagggcggctctggcggcggcagcgcccaggagattaaacggatcaacaagatcagaagaagacttgtgaaagacagcaacaccaagaaggccggcaagacaggccccatgaaaaccctgctggttagagtgatgacacccgatctgagagagcggctggaaaacctgagaaagaagcctgaaaatatcccccagcccatcagcaatacatctagagccaacctgaataagctgctgaccgattacaccgaaatgaagaaggcgatcctgcatgtgtactgggaagagttccagaaggaccctgtgggcctgatgagccgggtggcccagcctgccagcaagaagatcgatcagaacaagctgaaacctgagatggacgagaagggcaacctgaccaccgccggctttgcctgctctcagtgtggccagcccctgttcgtgtacaagctggagcaggtgtctgagaagggcaaggcttacaccaactacttcggacggtgcaatgtggccgagcacgaaaagctgatcctgctggcccagctgaagcccgagaaggatagcgacgaagccgtgacatatagcctgggaaagtttgggcagagggccctggatttctacagcattcatgtgaccaaggagtccacccaccccgtgaagcccctggcccagatcgccggaaacagatacgcctccggacctgtgggaaaggccctgagcgacgcatgtatgggcacaatcgcctccttcctgtctaagtaccaggacatcatcatcgaacaccagaaggtggtgaagggcaaccagaagagactggagagcctgcgggagctggccggcaaggaaaacctggaataccctagcgtgaccctgccacctcagcctcacaccaaggagggcgttgatgcctacaacgaagtgatcgcccgggtgcgaatgtgggtgaacctgaacctgtggcagaagctgaagctaagcagagatgatgccaagcctctgctgagactgaagggattcccttcctttcctctggtcgagagacaggccaacgaagtggactggtgggacatggtgtgtaacgtgaagaagctgatcaacgagaaaaaggaggatggcaaggtgttttggcagaatctggctggctacaagagacaggaagccctgagaccatacctgagcagcgaggaagatcggaagaagggaaagaaattcgctcggtaccagctgggcgacctgctgctgcacctggaaaagaagcacggcgaggactggggaaaggtgtacgacgaggcctgggagcggattgacaagaaagtggaaggcctgagcaagcacatcaagctggaagaggaacggagaagcgaggacgcccagagcaaggccgccctgaccgactggctgcgggctaaggccagcttcgtgatcgagggcctgaaggaggccgacaaggacgagttctgcagatgcgagctgaagctgcagaagtggtacggggacctgcggggaaagcccttcgccatcgaagccgagaacagcatcctggacatcagcggcttcagcaagcagtacaactgtgccttcatctggcagaaggacggcgtgaagaagctgaacctgtacctgatcatcaactacttcaagggcggcaagctgcggttcaagaagatcaaacctgaagccttcgaagccaacagattctacaccgtgatcaacaaaaagagcggcgagatcgtgcccatggaggtgaacttcaacttcgacgaccccaacctgatcatcctgcctctggcctttggcaagagacagggcagagaattcatctggaacgacctgctgtccctggaaaccggcagcctgaagctggccaacggaagagtgatcgagaagacactgtacaacagaagaacccggcaggatgagcctgccctgttcgtggccctgaccttcgagcggcgggaggtcctggactcctccaatatcaaaccaatgaacctgatcggcgtggcaagaggcgaaaacatccccgccgtgatcgccctgaccgaccccgagggctgcccactgagccggtttaaggatagcctgggaaacccaacccacatcctgagaatcggcgagagctataaggagaagcagcggaccatccaggccaagaaggaggtggagcagcggagagccggcggctacagccggaagtacgccagcaaagccaagaatctggcagacgatatggtgagaaacaccgctagagatctgctgtactacgccgtgacccaggatgccatgctgatcttcgccaacctgagccggggcttcggccggcagggcaagcggaccttcatggccgagagacagtacacacggatggaggactggctgaccgccaagctggcctacgagggcctgagcaagacctacctgtccaagacactggcccagtacacctccaagacatgcagcaactgtgggtttaccatcaccagcgccgactacgacagggtgctggagaagctgaagaagacagcaacaggctggatgaccacaattaacggcaaggagctgaaggtggagggccagattacctactacaacagatacaagagacagaacgtagtcaaggacctgtccgtcgagctggatagactgagcgaagaatctgtgaacaacgacatctcctcctggacaaagggcagaagcggagaagctctgagcctcctgaagaaaagattctcccatagacccgtgcaggagaagttcgtgtgcctgaactgcggcttcgagacacacgcagccgagcaagccgccctgaacatcgccagatcctggctgttcctgcggagccaggagtacaagaaataccagacaaacaagacaaccggcaacaccgataagagagccttcgtcgagacctggcagtccttttaccggaagaagcttaaggaggtgtggaaacctgccgtgcggtctggcggatctggcggaggctccacaagccagcccagggaggccgtgaccttcaaggacgtggaggtgaccttcagccaggacgagtggggctggctggaccccgcccagaggaacctgtacagggacgtgatgctggagaactacggcaacgtggtgagcctggtgggccccttcaccaagcccgtgctgatcagctggctggaggccagggagccctggggcctgaacgtgcagggcgcccagcccaagggcaagcccggcgtggcccccaccagccccaagaaaaagagaaaagtctaagctgccttctgcggggcttgccttctggccatgcccttcttctctcccttgcacctgtacctcttggtctttgaataaagcctgagtaggaaggctagcaaaaaaaaaaaaaaaaaaaaaaaaaaaaaaaaaaaaaaaaaaaaaaaaaaaaaaaaaaaaaaaaaaaaaaaaaaaaaaaa

SEQ ID NO: 6683 - RNA, 5797 nt, synthetic construct
  source 1..5797: mol_type = other RNA
aggaaataagagagaaaagaagagtaagaagaaatataagagccaccatggcccctaagaagaagcgtaaagtgagccggatggaacgcctcgtctacgaggtgcggcagaagtgcagaaacatcgaggacatctgcatctcctgcggatctctgaacgtgaccctggagcacccactgttcatcggcggcatgtgccagaactgtaaaaactgttttctggagtgtgcctatcaatacgacgatgacggctaccagagctactgcaccatctgttgcggcggaagagaggtgctgatgtgtggaaataacaactgctgccggtgcttctgcgtggaatgcgtggacctgctggtgggccccggcgccgcccaggccgctattaaggaagatccttggaactgctacatgtgcggccacaagggcacatacggcctgctgagacggagagaggactggcctagcagactgcagatgttcttcgccaataaccacgaccaggagttcgacccccctaaggtgtaccctcccgtccccgccgagaagagaaagcccatccgggtcctgagcctgttcgatggcatcgccaccggtctgctggtgctgaaggacctgggcatccaggtggataggtacattgcctccgaggtgtgcgaggactccatcaccgtgggaatggtgcgtcatcagggcaagatcatgtacgtgggcgacgtgcggagcgtgacacagaagcatatccaggagtggggccctttcgacctggtgatcggcggcagcccttgcaatgacctgagcatcgtgaacccagcccggaagggcctgtacgagggaaccggcagactgttcttcgagttttacagactgctgcacgacgcccggcctaaggaaggcgacgaccggcccttcttttggctgttcgagaatgtggtggccatgggagtcagcgacaagcgggatattagccggttcctggagagcaaccccgtgatgatcgatgccaaggaagtgagcgccgcccaccgggccagatacttctggggcaatctgcctggcatgaacagacccctggccagcaccgtgaacgacaagctggagctgcaggagtgcctggagcacggccggatcgccaagttcagcaaggtgagaaccatcaccacccgaagcaacagcatcaaacaaggcaaggaccagcactttcctgtgttcatgaacgagaaggaggacatcctgtggtgtaccgagatggagagagtgttcgggttcccagtccactacacagatgtcagcaacatgtctagactggccagacagagactgctgggaagaagctggtccgtccctgtgatcagacacctgttcgcccctctgaaggagtacttcgcctgcgtgagcagcggcaacagcaacgccaacagccggggccccagcttctctagcggcctggtgccactgtccctgagagggagccacatgggccccatggagatctacaaaaccgtgagcgcctggaagcggcagcctgtgcgcgtgctgagcctgtttcggaatatcgataaagtcctgaaaagcctgggattcctggagagcggctctggctccggcggtggcaccctgaagtacgtggaggatgtgacaaacgtggtcagacgggatgtggagaagtggggccccttcgatctggtgtacggcagcacccaacccctgggcagctcttgtgaccggtgccctggctggtacatgtttcagttccaccggatcctgcagtacgccctgccgagacaggagtcccagcggccattcttttggattttcatggacaacttgctgctgaccgaggatgaccaggaaactaccactcggttcctgcagaccgaagccgtgaccctgcaggacgtgagaggccgggactaccagaacgccatgcgggtgtggtccaacatccctggactgaaaagcaagcacgcacctctgacccctaaagaagaggagtacctgcaggcccaggtgcggagcagaagcaagctggacgcccctaaggtggatctgctggtgaagaattgcctcctgcccctgagagagtacttcaagtatttcagccagaatagtctgcccctgggcggcccaagcagcggcgcccctcctcccagcggcggcagcccagccggctccccaacctctaccgaggagggcacctctgagtccgccacccccgagagcggccctggcacctccaccgagcccagcgagggcagcgcacccggcagccctgccggcagccccacctccacagaggagggaaccagcaccgagcccagcgaaggcagcgccccaggcaccagcaccgagcctagtgagggcggctctggcggcggcagcgcccaggagattaaacggatcaacaagatcagaagaagacttgtgaaagacagcaacaccaagaaggccggcaagacaggccccatgaaaaccctgctggttagagtgatgacacccgatctgagagagcggctggaaaacctgagaaagaagcctgaaaatatcccccagcccatcagcaatacatctagagccaacctgaataagctgctgaccgattacaccgaaatgaagaaggcgatcctgcatgtgtactgggaagagttccagaaggaccctgtgggcctgatgagccgggtggcccagcctgccagcaagaagatcgatcagaacaagctgaaacctgagatggacgagaagggcaacctgaccaccgccggctttgcctgctctcagtgtggccagcccctgttcgtgtacaagctggagcaggtgtctgagaagggcaaggcttacaccaactacttcggacggtgcaatgtggccgagcacgaaaagctgatcctgctggcccagctgaagcccgagaaggatagcgacgaagccgtgacatatagcctgggaaagtttgggcagagggccctggatttctacagcattcatgtgaccaaggagtccacccaccccgtgaagcccctggcccagatcgccggaaacagatacgcctccggacctgtgggaaaggccctgagcgacgcatgtatgggcacaatcgcctccttcctgtctaagtaccaggacatcatcatcgaacaccagaaggtggtgaagggcaaccagaagagactggagagcctgcgggagctggccggcaaggaaaacctggaataccctagcgtgaccctgccacctcagcctcacaccaaggagggcgttgatgcctacaacgaagtgatcgcccgggtgcgaatgtgggtgaacctgaacctgtggcagaagctgaagctaagcagagatgatgccaagcctctgctgagactgaagggattcccttcctttcctctggtcgagagacaggccaacgaagtggactggtgggacatggtgtgtaacgtgaagaagctgatcaacgagaaaaaggaggatggcaaggtgttttggcagaatctggctggctacaagagacaggaagccctgagaccatacctgagcagcgaggaagatcggaagaagggaaagaaattcgctcggtaccagctgggcgacctgctgctgcacctggaaaagaagcacggcgaggactggggaaaggtgtacgacgaggcctgggagcggattgacaagaaagtggaaggcctgagcaagcacatcaagctggaagaggaacggagaagcgaggacgcccagagcaaggccgccctgaccgactggctgcgggctaaggccagcttcgtgatcgagggcctgaaggaggccgacaaggacgagttctgcagatgcgagctgaagctgcagaagtggtacggggacctgcggggaaagcccttcgccatcgaagccgagaacagcatcctggacatcagcggcttcagcaagcagtacaactgtgccttcatctggcagaaggacggcgtgaagaagctgaacctgtacctgatcatcaactacttcaagggcggcaagctgcggttcaagaagatcaaacctgaagccttcgaagccaacagattctacaccgtgatcaacaaaaagagcggcgagatcgtgcccatggaggtgaacttcaacttcgacgaccccaacctgatcatcctgcctctggcctttggcaagagacagggcagagaattcatctggaacgacctgctgtccctggaaaccggcagcctgaagctggccaacggaagagtgatcgagaagacactgtacaacagaagaacccggcaggatgagcctgccctgttcgtggccctgaccttcgagcggcgggaggtcctggactcctccaatatcaaaccaatgaacctgatcggcgtggcaagaggcgaaaacatccccgccgtgatcgccctgaccgaccccgagggctgcccactgagccggtttaaggatagcctgggaaacccaacccacatcctgagaatcggcgagagctataaggagaagcagcggaccatccaggccaagaaggaggtggagcagcggagagccggcggctacagccggaagtacgccagcaaagccaagaatctggcagacgatatggtgagaaacaccgctagagatctgctgtactacgccgtgacccaggatgccatgctgatcttcgccaacctgagccggggcttcggccggcagggcaagcggaccttcatggccgagagacagtacacacggatggaggactggctgaccgccaagctggcctacgagggcctgagcaagacctacctgtccaagacactggcccagtacacctccaagacatgcagcaactgtgggtttaccatcaccagcgccgactacgacagggtgctggagaagctgaagaagacagcaacaggctggatgaccacaattaacggcaaggagctgaaggtggagggccagattacctactacaacagatacaagagacagaacgtagtcaaggacctgtccgtcgagctggatagactgagcgaagaatctgtgaacaacgacatctcctcctggacaaagggcagaagcggagaagctctgagcctcctgaagaaaagattctcccatagacccgtgcaggagaagttcgtgtgcctgaactgcggcttcgagacacacgcagccgagcaagccgccctgaacatcgccagatcctggctgttcctgcggagccaggagtacaagaaataccagacaaacaagacaaccggcaacaccgataagagagccttcgtcgagacctggcagtccttttaccggaagaagcttaaggaggtgtggaaacctgccgtgcggtctggcggatctggcggaggctccacaagcgccgagctgcccgtggtgttcgaggacgtggccgtgtacttcaccagggaggagtggggcatgctggacaagaggcagaaggagctgtacagggacgtgatgaggatgaactacgagctgatggccagcctgggccccgccgccgccaagcccgacctgatcagcaagctggagaggagggccgccccctggatcaaggaccccaacggccccaagtggggcaagggcaggccccccggcaacaccagccccaagaaaaagagaaaagtctaagctgccttctgcggggcttgccttctggccatgcccttcttctctcccttgcacctgtacctcttggtctttgaataaagcctgagtaggaaggctagcaaaaaaaaaaaaaaaaaaaaaaaaaaaaaaaaaaaaaaaaaaaaaaaaaaaaaaaaaaaaaaaaaaaaaaaaaaaaaaaa

SEQ ID NO: 6684 - RNA, 5797 nt, synthetic construct
  source 1..5797: mol_type = other RNA
aggaaataagagagaaaagaagagtaagaagaaatataagagccaccatggcccctaagaagaagcgtaaagtgagccggatggaacgcctcgtctacgaggtgcggcagaagtgcagaaacatcgaggacatctgcatctcctgcggatctctgaacgtgaccctggagcacccactgttcatcggcggcatgtgccagaactgtaaaaactgttttctggagtgtgcctatcaatacgacgatgacggctaccagagctactgcaccatctgttgcggcggaagagaggtgctgatgtgtggaaataacaactgctgccggtgcttctgcgtggaatgcgtggacctgctggtgggccccggcgccgcccaggccgctattaaggaagatccttggaactgctacatgtgcggccacaagggcacatacggcctgctgagacggagagaggactggcctagcagactgcagatgttcttcgccaataaccacgaccaggagttcgacccccctaaggtgtaccctcccgtccccgccgagaagagaaagcccatccgggtcctgagcctgttcgatggcatcgccaccggtctgctggtgctgaaggacctgggcatccaggtggataggtacattgcctccgaggtgtgcgaggactccatcaccgtgggaatggtgcgtcatcagggcaagatcatgtacgtgggcgacgtgcggagcgtgacacagaagcatatccaggagtggggccctttcgacctggtgatcggcggcagcccttgcaatgacctgagcatcgtgaacccagcccggaagggcctgtacgagggaaccggcagactgttcttcgagttttacagactgctgcacgacgcccggcctaaggaaggcgacgaccggcccttcttttggctgttcgagaatgtggtggccatgggagtcagcgacaagcgggatattagccggttcctggagagcaaccccgtgatgatcgatgccaaggaagtgagcgccgcccaccgggccagatacttctggggcaatctgcctggcatgaacagacccctggccagcaccgtgaacgacaagctggagctgcaggagtgcctggagcacggccggatcgccaagttcagcaaggtgagaaccatcaccacccgaagcaacagcatcaaacaaggcaaggaccagcactttcctgtgttcatgaacgagaaggaggacatcctgtggtgtaccgagatggagagagtgttcgggttcccagtccactacacagatgtcagcaacatgtctagactggccagacagagactgctgggaagaagctggtccgtccctgtgatcagacacctgttcgcccctctgaaggagtacttcgcctgcgtgagcagcggcaacagcaacgccaacagccggggccccagcttctctagcggcctggtgccactgtccctgagagggagccacatgggccccatggagatctacaaaaccgtgagcgcctggaagcggcagcctgtgcgcgtgctgagcctgtttcggaatatcgataaagtcctgaaaagcctgggattcctggagagcggctctggctccggcggtggcaccctgaagtacgtggaggatgtgacaaacgtggtcagacgggatgtggagaagtggggccccttcgatctggtgtacggcagcacccaacccctgggcagctcttgtgaccggtgccctggctggtacatgtttcagttccaccggatcctgcagtacgccctgccgagacaggagtcccagcggccattcttttggattttcatggacaacttgctgctgaccgaggatgaccaggaaactaccactcggttcctgcagaccgaagccgtgaccctgcaggacgtgagaggccgggactaccagaacgccatgcgggtgtggtccaacatccctggactgaaaagcaagcacgcacctctgacccctaaagaagaggagtacctgcaggcccaggtgcggagcagaagcaagctggacgcccctaaggtggatctgctggtgaagaattgcctcctgcccctgagagagtacttcaagtatttcagccagaatagtctgcccctgggcggcccaagcagcggcgcccctcctcccagcggcggcagcccagccggctccccaacctctaccgaggagggcacctctgagtccgccacccccgagagcggccctggcacctccaccgagcccagcgagggcagcgcacccggcagccctgccggcagccccacctccacagaggagggaaccagcaccgagcccagcgaaggcagcgccccaggcaccagcaccgagcctagtgagggcggctctggcggcggcagcgcccaggagattaaacggatcaacaagatcagaagaagacttgtgaaagacagcaacaccaagaaggccggcaagacaggccccatgaaaaccctgctggttagagtgatgacacccgatctgagagagcggctggaaaacctgagaaagaagcctgaaaatatcccccagcccatcagcaatacatctagagccaacctgaataagctgctgaccgattacaccgaaatgaagaaggcgatcctgcatgtgtactgggaagagttccagaaggaccctgtgggcctgatgagccgggtggcccagcctgccagcaagaagatcgatcagaacaagctgaaacctgagatggacgagaagggcaacctgaccaccgccggctttgcctgctctcagtgtggccagcccctgttcgtgtacaagctggagcaggtgtctgagaagggcaaggcttacaccaactacttcggacggtgcaatgtggccgagcacgaaaagctgatcctgctggcccagctgaagcccgagaaggatagcgacgaagccgtgacatatagcctgggaaagtttgggcagagggccctggatttctacagcattcatgtgaccaaggagtccacccaccccgtgaagcccctggcccagatcgccggaaacagatacgcctccggacctgtgggaaaggccctgagcgacgcatgtatgggcacaatcgcctccttcctgtctaagtaccaggacatcatcatcgaacaccagaaggtggtgaagggcaaccagaagagactggagagcctgcgggagctggccggcaaggaaaacctggaataccctagcgtgaccctgccacctcagcctcacaccaaggagggcgttgatgcctacaacgaagtgatcgcccgggtgcgaatgtgggtgaacctgaacctgtggcagaagctgaagctaagcagagatgatgccaagcctctgctgagactgaagggattcccttcctttcctctggtcgagagacaggccaacgaagtggactggtgggacatggtgtgtaacgtgaagaagctgatcaacgagaaaaaggaggatggcaaggtgttttggcagaatctggctggctacaagagacaggaagccctgagaccatacctgagcagcgaggaagatcggaagaagggaaagaaattcgctcggtaccagctgggcgacctgctgctgcacctggaaaagaagcacggcgaggactggggaaaggtgtacgacgaggcctgggagcggattgacaagaaagtggaaggcctgagcaagcacatcaagctggaagaggaacggagaagcgaggacgcccagagcaaggccgccctgaccgactggctgcgggctaaggccagcttcgtgatcgagggcctgaaggaggccgacaaggacgagttctgcagatgcgagctgaagctgcagaagtggtacggggacctgcggggaaagcccttcgccatcgaagccgagaacagcatcctggacatcagcggcttcagcaagcagtacaactgtgccttcatctggcagaaggacggcgtgaagaagctgaacctgtacctgatcatcaactacttcaagggcggcaagctgcggttcaagaagatcaaacctgaagccttcgaagccaacagattctacaccgtgatcaacaaaaagagcggcgagatcgtgcccatggaggtgaacttcaacttcgacgaccccaacctgatcatcctgcctctggcctttggcaagagacagggcagagaattcatctggaacgacctgctgtccctggaaaccggcagcctgaagctggccaacggaagagtgatcgagaagacactgtacaacagaagaacccggcaggatgagcctgccctgttcgtggccctgaccttcgagcggcgggaggtcctggactcctccaatatcaaaccaatgaacctgatcggcgtggcaagaggcgaaaacatccccgccgtgatcgccctgaccgaccccgagggctgcccactgagccggtttaaggatagcctgggaaacccaacccacatcctgagaatcggcgagagctataaggagaagcagcggaccatccaggccaagaaggaggtggagcagcggagagccggcggctacagccggaagtacgccagcaaagccaagaatctggcagacgatatggtgagaaacaccgctagagatctgctgtactacgccgtgacccaggatgccatgctgatcttcgccaacctgagccggggcttcggccggcagggcaagcggaccttcatggccgagagacagtacacacggatggaggactggctgaccgccaagctggcctacgagggcctgagcaagacctacctgtccaagacactggcccagtacacctccaagacatgcagcaactgtgggtttaccatcaccagcgccgactacgacagggtgctggagaagctgaagaagacagcaacaggctggatgaccacaattaacggcaaggagctgaaggtggagggccagattacctactacaacagatacaagagacagaacgtagtcaaggacctgtccgtcgagctggatagactgagcgaagaatctgtgaacaacgacatctcctcctggacaaagggcagaagcggagaagctctgagcctcctgaagaaaagattctcccatagacccgtgcaggagaagttcgtgtgcctgaactgcggcttcgagacacacgcagccgagcaagccgccctgaacatcgccagatcctggctgttcctgcggagccaggagtacaagaaataccagacaaacaagacaaccggcaacaccgataagagagccttcgtcgagacctggcagtccttttaccggaagaagcttaaggaggtgtggaaacctgccgtgcggtctggcggatctggcggaggctccacaagctgccaggagcccgtgagcttcgccgaggtggccgtgtacttcagcagggaggagtgggccctgctggaccccgcccagagggccctgtacagggacgtgatgctggagacctaccagtgcgtggcctggctggccagcctgcccgcccccaagcccggcctgatcagcctgctggagggcggcgaggacccctggatccccggcgtgaggagccccgaggccatgcccggcgacctgagccccaccagccccaagaaaaagagaaaagtctaagctgccttctgcggggcttgccttctggccatgcccttcttctctcccttgcacctgtacctcttggtctttgaataaagcctgagtaggaaggctagcaaaaaaaaaaaaaaaaaaaaaaaaaaaaaaaaaaaaaaaaaaaaaaaaaaaaaaaaaaaaaaaaaaaaaaaaaaaaaaaa

SEQ ID NO: 6685 - RNA, 5797 nt, synthetic construct
  source 1..5797: mol_type = other RNA
aggaaataagagagaaaagaagagtaagaagaaatataagagccaccatggcccctaagaagaagcgtaaagtgagccggatggaacgcctcgtctacgaggtgcggcagaagtgcagaaacatcgaggacatctgcatctcctgcggatctctgaacgtgaccctggagcacccactgttcatcggcggcatgtgccagaactgtaaaaactgttttctggagtgtgcctatcaatacgacgatgacggctaccagagctactgcaccatctgttgcggcggaagagaggtgctgatgtgtggaaataacaactgctgccggtgcttctgcgtggaatgcgtggacctgctggtgggccccggcgccgcccaggccgctattaaggaagatccttggaactgctacatgtgcggccacaagggcacatacggcctgctgagacggagagaggactggcctagcagactgcagatgttcttcgccaataaccacgaccaggagttcgacccccctaaggtgtaccctcccgtccccgccgagaagagaaagcccatccgggtcctgagcctgttcgatggcatcgccaccggtctgctggtgctgaaggacctgggcatccaggtggataggtacattgcctccgaggtgtgcgaggactccatcaccgtgggaatggtgcgtcatcagggcaagatcatgtacgtgggcgacgtgcggagcgtgacacagaagcatatccaggagtggggccctttcgacctggtgatcggcggcagcccttgcaatgacctgagcatcgtgaacccagcccggaagggcctgtacgagggaaccggcagactgttcttcgagttttacagactgctgcacgacgcccggcctaaggaaggcgacgaccggcccttcttttggctgttcgagaatgtggtggccatgggagtcagcgacaagcgggatattagccggttcctggagagcaaccccgtgatgatcgatgccaaggaagtgagcgccgcccaccgggccagatacttctggggcaatctgcctggcatgaacagacccctggccagcaccgtgaacgacaagctggagctgcaggagtgcctggagcacggccggatcgccaagttcagcaaggtgagaaccatcaccacccgaagcaacagcatcaaacaaggcaaggaccagcactttcctgtgttcatgaacgagaaggaggacatcctgtggtgtaccgagatggagagagtgttcgggttcccagtccactacacagatgtcagcaacatgtctagactggccagacagagactgctgggaagaagctggtccgtccctgtgatcagacacctgttcgcccctctgaaggagtacttcgcctgcgtgagcagcggcaacagcaacgccaacagccggggccccagcttctctagcggcctggtgccactgtccctgagagggagccacatgggccccatggagatctacaaaaccgtgagcgcctggaagcggcagcctgtgcgcgtgctgagcctgtttcggaatatcgataaagtcctgaaaagcctgggattcctggagagcggctctggctccggcggtggcaccctgaagtacgtggaggatgtgacaaacgtggtcagacgggatgtggagaagtggggccccttcgatctggtgtacggcagcacccaacccctgggcagctcttgtgaccggtgccctggctggtacatgtttcagttccaccggatcctgcagtacgccctgccgagacaggagtcccagcggccattcttttggattttcatggacaacttgctgctgaccgaggatgaccaggaaactaccactcggttcctgcagaccgaagccgtgaccctgcaggacgtgagaggccgggactaccagaacgccatgcgggtgtggtccaacatccctggactgaaaagcaagcacgcacctctgacccctaaagaagaggagtacctgcaggcccaggtgcggagcagaagcaagctggacgcccctaaggtggatctgctggtgaagaattgcctcctgcccctgagagagtacttcaagtatttcagccagaatagtctgcccctgggcggcccaagcagcggcgcccctcctcccagcggcggcagcccagccggctccccaacctctaccgaggagggcacctctgagtccgccacccccgagagcggccctggcacctccaccgagcccagcgagggcagcgcacccggcagccctgccggcagccccacctccacagaggagggaaccagcaccgagcccagcgaaggcagcgccccaggcaccagcaccgagcctagtgagggcggctctggcggcggcagcgcccaggagattaaacggatcaacaagatcagaagaagacttgtgaaagacagcaacaccaagaaggccggcaagacaggccccatgaaaaccctgctggttagagtgatgacacccgatctgagagagcggctggaaaacctgagaaagaagcctgaaaatatcccccagcccatcagcaatacatctagagccaacctgaataagctgctgaccgattacaccgaaatgaagaaggcgatcctgcatgtgtactgggaagagttccagaaggaccctgtgggcctgatgagccgggtggcccagcctgccagcaagaagatcgatcagaacaagctgaaacctgagatggacgagaagggcaacctgaccaccgccggctttgcctgctctcagtgtggccagcccctgttcgtgtacaagctggagcaggtgtctgagaagggcaaggcttacaccaactacttcggacggtgcaatgtggccgagcacgaaaagctgatcctgctggcccagctgaagcccgagaaggatagcgacgaagccgtgacatatagcctgggaaagtttgggcagagggccctggatttctacagcattcatgtgaccaaggagtccacccaccccgtgaagcccctggcccagatcgccggaaacagatacgcctccggacctgtgggaaaggccctgagcgacgcatgtatgggcacaatcgcctccttcctgtctaagtaccaggacatcatcatcgaacaccagaaggtggtgaagggcaaccagaagagactggagagcctgcgggagctggccggcaaggaaaacctggaataccctagcgtgaccctgccacctcagcctcacaccaaggagggcgttgatgcctacaacgaagtgatcgcccgggtgcgaatgtgggtgaacctgaacctgtggcagaagctgaagctaagcagagatgatgccaagcctctgctgagactgaagggattcccttcctttcctctggtcgagagacaggccaacgaagtggactggtgggacatggtgtgtaacgtgaagaagctgatcaacgagaaaaaggaggatggcaaggtgttttggcagaatctggctggctacaagagacaggaagccctgagaccatacctgagcagcgaggaagatcggaagaagggaaagaaattcgctcggtaccagctgggcgacctgctgctgcacctggaaaagaagcacggcgaggactggggaaaggtgtacgacgaggcctgggagcggattgacaagaaagtggaaggcctgagcaagcacatcaagctggaagaggaacggagaagcgaggacgcccagagcaaggccgccctgaccgactggctgcgggctaaggccagcttcgtgatcgagggcctgaaggaggccgacaaggacgagttctgcagatgcgagctgaagctgcagaagtggtacggggacctgcggggaaagcccttcgccatcgaagccgagaacagcatcctggacatcagcggcttcagcaagcagtacaactgtgccttcatctggcagaaggacggcgtgaagaagctgaacctgtacctgatcatcaactacttcaagggcggcaagctgcggttcaagaagatcaaacctgaagccttcgaagccaacagattctacaccgtgatcaacaaaaagagcggcgagatcgtgcccatggaggtgaacttcaacttcgacgaccccaacctgatcatcctgcctctggcctttggcaagagacagggcagagaattcatctggaacgacctgctgtccctggaaaccggcagcctgaagctggccaacggaagagtgatcgagaagacactgtacaacagaagaacccggcaggatgagcctgccctgttcgtggccctgaccttcgagcggcgggaggtcctggactcctccaatatcaaaccaatgaacctgatcggcgtggcaagaggcgaaaacatccccgccgtgatcgccctgaccgaccccgagggctgcccactgagccggtttaaggatagcctgggaaacccaacccacatcctgagaatcggcgagagctataaggagaagcagcggaccatccaggccaagaaggaggtggagcagcggagagccggcggctacagccggaagtacgccagcaaagccaagaatctggcagacgatatggtgagaaacaccgctagagatctgctgtactacgccgtgacccaggatgccatgctgatcttcgccaacctgagccggggcttcggccggcagggcaagcggaccttcatggccgagagacagtacacacggatggaggactggctgaccgccaagctggcctacgagggcctgagcaagacctacctgtccaagacactggcccagtacacctccaagacatgcagcaactgtgggtttaccatcaccagcgccgactacgacagggtgctggagaagctgaagaagacagcaacaggctggatgaccacaattaacggcaaggagctgaaggtggagggccagattacctactacaacagatacaagagacagaacgtagtcaaggacctgtccgtcgagctggatagactgagcgaagaatctgtgaacaacgacatctcctcctggacaaagggcagaagcggagaagctctgagcctcctgaagaaaagattctcccatagacccgtgcaggagaagttcgtgtgcctgaactgcggcttcgagacacacgcagccgagcaagccgccctgaacatcgccagatcctggctgttcctgcggagccaggagtacaagaaataccagacaaacaagacaaccggcaacaccgataagagagccttcgtcgagacctggcagtccttttaccggaagaagcttaaggaggtgtggaaacctgccgtgcggtctggcggatctggcggaggctccacaagcatgaacgccgtgacctacgaggacgtgcacgtgaacttcacccaggaggagtgggccctgctggaccccagccagaagaagctgtacaaggacgtgatggtggagacctacaggaacctgaacgccatcggcttcaactgggaggcccacaacatcgaggagtactgccagagcagcaggaggcacaggaggtgcgagaggagccagagcgccgagaagcccagcgagtacacccagtgcggcaccagccccaagaaaaagagaaaagtctaagctgccttctgcggggcttgccttctggccatgcccttcttctctcccttgcacctgtacctcttggtctttgaataaagcctgagtaggaaggctagcaaaaaaaaaaaaaaaaaaaaaaaaaaaaaaaaaaaaaaaaaaaaaaaaaaaaaaaaaaaaaaaaaaaaaaaaaaaaaaaa

SEQ ID NO: 6686 - RNA, 5797 nt, synthetic construct
  source 1..5797: mol_type = other RNA
aggaaataagagagaaaagaagagtaagaagaaatataagagccaccatggcccctaagaagaagcgtaaagtgagccggatggaacgcctcgtctacgaggtgcggcagaagtgcagaaacatcgaggacatctgcatctcctgcggatctctgaacgtgaccctggagcacccactgttcatcggcggcatgtgccagaactgtaaaaactgttttctggagtgtgcctatcaatacgacgatgacggctaccagagctactgcaccatctgttgcggcggaagagaggtgctgatgtgtggaaataacaactgctgccggtgcttctgcgtggaatgcgtggacctgctggtgggccccggcgccgcccaggccgctattaaggaagatccttggaactgctacatgtgcggccacaagggcacatacggcctgctgagacggagagaggactggcctagcagactgcagatgttcttcgccaataaccacgaccaggagttcgacccccctaaggtgtaccctcccgtccccgccgagaagagaaagcccatccgggtcctgagcctgttcgatggcatcgccaccggtctgctggtgctgaaggacctgggcatccaggtggataggtacattgcctccgaggtgtgcgaggactccatcaccgtgggaatggtgcgtcatcagggcaagatcatgtacgtgggcgacgtgcggagcgtgacacagaagcatatccaggagtggggccctttcgacctggtgatcggcggcagcccttgcaatgacctgagcatcgtgaacccagcccggaagggcctgtacgagggaaccggcagactgttcttcgagttttacagactgctgcacgacgcccggcctaaggaaggcgacgaccggcccttcttttggctgttcgagaatgtggtggccatgggagtcagcgacaagcgggatattagccggttcctggagagcaaccccgtgatgatcgatgccaaggaagtgagcgccgcccaccgggccagatacttctggggcaatctgcctggcatgaacagacccctggccagcaccgtgaacgacaagctggagctgcaggagtgcctggagcacggccggatcgccaagttcagcaaggtgagaaccatcaccacccgaagcaacagcatcaaacaaggcaaggaccagcactttcctgtgttcatgaacgagaaggaggacatcctgtggtgtaccgagatggagagagtgttcgggttcccagtccactacacagatgtcagcaacatgtctagactggccagacagagactgctgggaagaagctggtccgtccctgtgatcagacacctgttcgcccctctgaaggagtacttcgcctgcgtgagcagcggcaacagcaacgccaacagccggggccccagcttctctagcggcctggtgccactgtccctgagagggagccacatgggccccatggagatctacaaaaccgtgagcgcctggaagcggcagcctgtgcgcgtgctgagcctgtttcggaatatcgataaagtcctgaaaagcctgggattcctggagagcggctctggctccggcggtggcaccctgaagtacgtggaggatgtgacaaacgtggtcagacgggatgtggagaagtggggccccttcgatctggtgtacggcagcacccaacccctgggcagctcttgtgaccggtgccctggctggtacatgtttcagttccaccggatcctgcagtacgccctgccgagacaggagtcccagcggccattcttttggattttcatggacaacttgctgctgaccgaggatgaccaggaaactaccactcggttcctgcagaccgaagccgtgaccctgcaggacgtgagaggccgggactaccagaacgccatgcgggtgtggtccaacatccctggactgaaaagcaagcacgcacctctgacccctaaagaagaggagtacctgcaggcccaggtgcggagcagaagcaagctggacgcccctaaggtggatctgctggtgaagaattgcctcctgcccctgagagagtacttcaagtatttcagccagaatagtctgcccctgggcggcccaagcagcggcgcccctcctcccagcggcggcagcccagccggctccccaacctctaccgaggagggcacctctgagtccgccacccccgagagcggccctggcacctccaccgagcccagcgagggcagcgcacccggcagccctgccggcagccccacctccacagaggagggaaccagcaccgagcccagcgaaggcagcgccccaggcaccagcaccgagcctagtgagggcggctctggcggcggcagcgcccaggagattaaacggatcaacaagatcagaagaagacttgtgaaagacagcaacaccaagaaggccggcaagacaggccccatgaaaaccctgctggttagagtgatgacacccgatctgagagagcggctggaaaacctgagaaagaagcctgaaaatatcccccagcccatcagcaatacatctagagccaacctgaataagctgctgaccgattacaccgaaatgaagaaggcgatcctgcatgtgtactgggaagagttccagaaggaccctgtgggcctgatgagccgggtggcccagcctgccagcaagaagatcgatcagaacaagctgaaacctgagatggacgagaagggcaacctgaccaccgccggctttgcctgctctcagtgtggccagcccctgttcgtgtacaagctggagcaggtgtctgagaagggcaaggcttacaccaactacttcggacggtgcaatgtggccgagcacgaaaagctgatcctgctggcccagctgaagcccgagaaggatagcgacgaagccgtgacatatagcctgggaaagtttgggcagagggccctggatttctacagcattcatgtgaccaaggagtccacccaccccgtgaagcccctggcccagatcgccggaaacagatacgcctccggacctgtgggaaaggccctgagcgacgcatgtatgggcacaatcgcctccttcctgtctaagtaccaggacatcatcatcgaacaccagaaggtggtgaagggcaaccagaagagactggagagcctgcgggagctggccggcaaggaaaacctggaataccctagcgtgaccctgccacctcagcctcacaccaaggagggcgttgatgcctacaacgaagtgatcgcccgggtgcgaatgtgggtgaacctgaacctgtggcagaagctgaagctaagcagagatgatgccaagcctctgctgagactgaagggattcccttcctttcctctggtcgagagacaggccaacgaagtggactggtgggacatggtgtgtaacgtgaagaagctgatcaacgagaaaaaggaggatggcaaggtgttttggcagaatctggctggctacaagagacaggaagccctgagaccatacctgagcagcgaggaagatcggaagaagggaaagaaattcgctcggtaccagctgggcgacctgctgctgcacctggaaaagaagcacggcgaggactggggaaaggtgtacgacgaggcctgggagcggattgacaagaaagtggaaggcctgagcaagcacatcaagctggaagaggaacggagaagcgaggacgcccagagcaaggccgccctgaccgactggctgcgggctaaggccagcttcgtgatcgagggcctgaaggaggccgacaaggacgagttctgcagatgcgagctgaagctgcagaagtggtacggggacctgcggggaaagcccttcgccatcgaagccgagaacagcatcctggacatcagcggcttcagcaagcagtacaactgtgccttcatctggcagaaggacggcgtgaagaagctgaacctgtacctgatcatcaactacttcaagggcggcaagctgcggttcaagaagatcaaacctgaagccttcgaagccaacagattctacaccgtgatcaacaaaaagagcggcgagatcgtgcccatggaggtgaacttcaacttcgacgaccccaacctgatcatcctgcctctggcctttggcaagagacagggcagagaattcatctggaacgacctgctgtccctggaaaccggcagcctgaagctggccaacggaagagtgatcgagaagacactgtacaacagaagaacccggcaggatgagcctgccctgttcgtggccctgaccttcgagcggcgggaggtcctggactcctccaatatcaaaccaatgaacctgatcggcgtggcaagaggcgaaaacatccccgccgtgatcgccctgaccgaccccgagggctgcccactgagccggtttaaggatagcctgggaaacccaacccacatcctgagaatcggcgagagctataaggagaagcagcggaccatccaggccaagaaggaggtggagcagcggagagccggcggctacagccggaagtacgccagcaaagccaagaatctggcagacgatatggtgagaaacaccgctagagatctgctgtactacgccgtgacccaggatgccatgctgatcttcgccaacctgagccggggcttcggccggcagggcaagcggaccttcatggccgagagacagtacacacggatggaggactggctgaccgccaagctggcctacgagggcctgagcaagacctacctgtccaagacactggcccagtacacctccaagacatgcagcaactgtgggtttaccatcaccagcgccgactacgacagggtgctggagaagctgaagaagacagcaacaggctggatgaccacaattaacggcaaggagctgaaggtggagggccagattacctactacaacagatacaagagacagaacgtagtcaaggacctgtccgtcgagctggatagactgagcgaagaatctgtgaacaacgacatctcctcctggacaaagggcagaagcggagaagctctgagcctcctgaagaaaagattctcccatagacccgtgcaggagaagttcgtgtgcctgaactgcggcttcgagacacacgcagccgagcaagccgccctgaacatcgccagatcctggctgttcctgcggagccaggagtacaagaaataccagacaaacaagacaaccggcaacaccgataagagagccttcgtcgagacctggcagtccttttaccggaagaagcttaaggaggtgtggaaacctgccgtgcggtctggcggatctggcggaggctccacaagcttccaggaggtggtgaccttcgaggacgtggccgtgcacttcacccaggccgagtgggccggcctgagcagcgcccagagggccctgcacaggagcgtgatgctggagaactacggcaacctgaccagcctgggctacaccgtgcccaacagcgccctgatcagcctgctggagggcagggacctgccctggggcctggaggcccagaacgacccccccgccgagaggagcacccacgtgtgcaccagccccaagaaaaagagaaaagtctaagctgccttctgcggggcttgccttctggccatgcccttcttctctcccttgcacctgtacctcttggtctttgaataaagcctgagtaggaaggctagcaaaaaaaaaaaaaaaaaaaaaaaaaaaaaaaaaaaaaaaaaaaaaaaaaaaaaaaaaaaaaaaaaaaaaaaaaaaaaaaa

SEQ ID NO: 6687 - RNA, 5797 nt, synthetic construct
  source 1..5797: mol_type = other RNA
aggaaataagagagaaaagaagagtaagaagaaatataagagccaccatggcccctaagaagaagcgtaaagtgagccggatggaacgcctcgtctacgaggtgcggcagaagtgcagaaacatcgaggacatctgcatctcctgcggatctctgaacgtgaccctggagcacccactgttcatcggcggcatgtgccagaactgtaaaaactgttttctggagtgtgcctatcaatacgacgatgacggctaccagagctactgcaccatctgttgcggcggaagagaggtgctgatgtgtggaaataacaactgctgccggtgcttctgcgtggaatgcgtggacctgctggtgggccccggcgccgcccaggccgctattaaggaagatccttggaactgctacatgtgcggccacaagggcacatacggcctgctgagacggagagaggactggcctagcagactgcagatgttcttcgccaataaccacgaccaggagttcgacccccctaaggtgtaccctcccgtccccgccgagaagagaaagcccatccgggtcctgagcctgttcgatggcatcgccaccggtctgctggtgctgaaggacctgggcatccaggtggataggtacattgcctccgaggtgtgcgaggactccatcaccgtgggaatggtgcgtcatcagggcaagatcatgtacgtgggcgacgtgcggagcgtgacacagaagcatatccaggagtggggccctttcgacctggtgatcggcggcagcccttgcaatgacctgagcatcgtgaacccagcccggaagggcctgtacgagggaaccggcagactgttcttcgagttttacagactgctgcacgacgcccggcctaaggaaggcgacgaccggcccttcttttggctgttcgagaatgtggtggccatgggagtcagcgacaagcgggatattagccggttcctggagagcaaccccgtgatgatcgatgccaaggaagtgagcgccgcccaccgggccagatacttctggggcaatctgcctggcatgaacagacccctggccagcaccgtgaacgacaagctggagctgcaggagtgcctggagcacggccggatcgccaagttcagcaaggtgagaaccatcaccacccgaagcaacagcatcaaacaaggcaaggaccagcactttcctgtgttcatgaacgagaaggaggacatcctgtggtgtaccgagatggagagagtgttcgggttcccagtccactacacagatgtcagcaacatgtctagactggccagacagagactgctgggaagaagctggtccgtccctgtgatcagacacctgttcgcccctctgaaggagtacttcgcctgcgtgagcagcggcaacagcaacgccaacagccggggccccagcttctctagcggcctggtgccactgtccctgagagggagccacatgggccccatggagatctacaaaaccgtgagcgcctggaagcggcagcctgtgcgcgtgctgagcctgtttcggaatatcgataaagtcctgaaaagcctgggattcctggagagcggctctggctccggcggtggcaccctgaagtacgtggaggatgtgacaaacgtggtcagacgggatgtggagaagtggggccccttcgatctggtgtacggcagcacccaacccctgggcagctcttgtgaccggtgccctggctggtacatgtttcagttccaccggatcctgcagtacgccctgccgagacaggagtcccagcggccattcttttggattttcatggacaacttgctgctgaccgaggatgaccaggaaactaccactcggttcctgcagaccgaagccgtgaccctgcaggacgtgagaggccgggactaccagaacgccatgcgggtgtggtccaacatccctggactgaaaagcaagcacgcacctctgacccctaaagaagaggagtacctgcaggcccaggtgcggagcagaagcaagctggacgcccctaaggtggatctgctggtgaagaattgcctcctgcccctgagagagtacttcaagtatttcagccagaatagtctgcccctgggcggcccaagcagcggcgcccctcctcccagcggcggcagcccagccggctccccaacctctaccgaggagggcacctctgagtccgccacccccgagagcggccctggcacctccaccgagcccagcgagggcagcgcacccggcagccctgccggcagccccacctccacagaggagggaaccagcaccgagcccagcgaaggcagcgccccaggcaccagcaccgagcctagtgagggcggctctggcggcggcagcgcccaggagattaaacggatcaacaagatcagaagaagacttgtgaaagacagcaacaccaagaaggccggcaagacaggccccatgaaaaccctgctggttagagtgatgacacccgatctgagagagcggctggaaaacctgagaaagaagcctgaaaatatcccccagcccatcagcaatacatctagagccaacctgaataagctgctgaccgattacaccgaaatgaagaaggcgatcctgcatgtgtactgggaagagttccagaaggaccctgtgggcctgatgagccgggtggcccagcctgccagcaagaagatcgatcagaacaagctgaaacctgagatggacgagaagggcaacctgaccaccgccggctttgcctgctctcagtgtggccagcccctgttcgtgtacaagctggagcaggtgtctgagaagggcaaggcttacaccaactacttcggacggtgcaatgtggccgagcacgaaaagctgatcctgctggcccagctgaagcccgagaaggatagcgacgaagccgtgacatatagcctgggaaagtttgggcagagggccctggatttctacagcattcatgtgaccaaggagtccacccaccccgtgaagcccctggcccagatcgccggaaacagatacgcctccggacctgtgggaaaggccctgagcgacgcatgtatgggcacaatcgcctccttcctgtctaagtaccaggacatcatcatcgaacaccagaaggtggtgaagggcaaccagaagagactggagagcctgcgggagctggccggcaaggaaaacctggaataccctagcgtgaccctgccacctcagcctcacaccaaggagggcgttgatgcctacaacgaagtgatcgcccgggtgcgaatgtgggtgaacctgaacctgtggcagaagctgaagctaagcagagatgatgccaagcctctgctgagactgaagggattcccttcctttcctctggtcgagagacaggccaacgaagtggactggtgggacatggtgtgtaacgtgaagaagctgatcaacgagaaaaaggaggatggcaaggtgttttggcagaatctggctggctacaagagacaggaagccctgagaccatacctgagcagcgaggaagatcggaagaagggaaagaaattcgctcggtaccagctgggcgacctgctgctgcacctggaaaagaagcacggcgaggactggggaaaggtgtacgacgaggcctgggagcggattgacaagaaagtggaaggcctgagcaagcacatcaagctggaagaggaacggagaagcgaggacgcccagagcaaggccgccctgaccgactggctgcgggctaaggccagcttcgtgatcgagggcctgaaggaggccgacaaggacgagttctgcagatgcgagctgaagctgcagaagtggtacggggacctgcggggaaagcccttcgccatcgaagccgagaacagcatcctggacatcagcggcttcagcaagcagtacaactgtgccttcatctggcagaaggacggcgtgaagaagctgaacctgtacctgatcatcaactacttcaagggcggcaagctgcggttcaagaagatcaaacctgaagccttcgaagccaacagattctacaccgtgatcaacaaaaagagcggcgagatcgtgcccatggaggtgaacttcaacttcgacgaccccaacctgatcatcctgcctctggcctttggcaagagacagggcagagaattcatctggaacgacctgctgtccctggaaaccggcagcctgaagctggccaacggaagagtgatcgagaagacactgtacaacagaagaacccggcaggatgagcctgccctgttcgtggccctgaccttcgagcggcgggaggtcctggactcctccaatatcaaaccaatgaacctgatcggcgtggcaagaggcgaaaacatccccgccgtgatcgccctgaccgaccccgagggctgcccactgagccggtttaaggatagcctgggaaacccaacccacatcctgagaatcggcgagagctataaggagaagcagcggaccatccaggccaagaaggaggtggagcagcggagagccggcggctacagccggaagtacgccagcaaagccaagaatctggcagacgatatggtgagaaacaccgctagagatctgctgtactacgccgtgacccaggatgccatgctgatcttcgccaacctgagccggggcttcggccggcagggcaagcggaccttcatggccgagagacagtacacacggatggaggactggctgaccgccaagctggcctacgagggcctgagcaagacctacctgtccaagacactggcccagtacacctccaagacatgcagcaactgtgggtttaccatcaccagcgccgactacgacagggtgctggagaagctgaagaagacagcaacaggctggatgaccacaattaacggcaaggagctgaaggtggagggccagattacctactacaacagatacaagagacagaacgtagtcaaggacctgtccgtcgagctggatagactgagcgaagaatctgtgaacaacgacatctcctcctggacaaagggcagaagcggagaagctctgagcctcctgaagaaaagattctcccatagacccgtgcaggagaagttcgtgtgcctgaactgcggcttcgagacacacgcagccgagcaagccgccctgaacatcgccagatcctggctgttcctgcggagccaggagtacaagaaataccagacaaacaagacaaccggcaacaccgataagagagccttcgtcgagacctggcagtccttttaccggaagaagcttaaggaggtgtggaaacctgccgtgcggtctggcggatctggcggaggctccacaagcgtgcaggtgcccatcaagttcgaggacgtggccgtgtacttcagcgagcccgagtggaagaacctggaccagtggcagaaggagctgtacaagcacgtgatgaccgccaactacgagatcctgttcagcctggacagcgccatccccaagcccgacctgatcagccacatcgagaggggcgaggagcccttcctgagggaccacggcaacctgatgaagagggacaagaccatcggctacggcaccagccccaagaaaaagagaaaagtctaagctgccttctgcggggcttgccttctggccatgcccttcttctctcccttgcacctgtacctcttggtctttgaataaagcctgagtaggaaggctagcaaaaaaaaaaaaaaaaaaaaaaaaaaaaaaaaaaaaaaaaaaaaaaaaaaaaaaaaaaaaaaaaaaaaaaaaaaaaaaaa

SEQ ID NO: 6688 - RNA, 5797 nt, synthetic construct
  source 1..5797: mol_type = other RNA
aggaaataagagagaaaagaagagtaagaagaaatataagagccaccatggcccctaagaagaagcgtaaagtgagccggatggaacgcctcgtctacgaggtgcggcagaagtgcagaaacatcgaggacatctgcatctcctgcggatctctgaacgtgaccctggagcacccactgttcatcggcggcatgtgccagaactgtaaaaactgttttctggagtgtgcctatcaatacgacgatgacggctaccagagctactgcaccatctgttgcggcggaagagaggtgctgatgtgtggaaataacaactgctgccggtgcttctgcgtggaatgcgtggacctgctggtgggccccggcgccgcccaggccgctattaaggaagatccttggaactgctacatgtgcggccacaagggcacatacggcctgctgagacggagagaggactggcctagcagactgcagatgttcttcgccaataaccacgaccaggagttcgacccccctaaggtgtaccctcccgtccccgccgagaagagaaagcccatccgggtcctgagcctgttcgatggcatcgccaccggtctgctggtgctgaaggacctgggcatccaggtggataggtacattgcctccgaggtgtgcgaggactccatcaccgtgggaatggtgcgtcatcagggcaagatcatgtacgtgggcgacgtgcggagcgtgacacagaagcatatccaggagtggggccctttcgacctggtgatcggcggcagcccttgcaatgacctgagcatcgtgaacccagcccggaagggcctgtacgagggaaccggcagactgttcttcgagttttacagactgctgcacgacgcccggcctaaggaaggcgacgaccggcccttcttttggctgttcgagaatgtggtggccatgggagtcagcgacaagcgggatattagccggttcctggagagcaaccccgtgatgatcgatgccaaggaagtgagcgccgcccaccgggccagatacttctggggcaatctgcctggcatgaacagacccctggccagcaccgtgaacgacaagctggagctgcaggagtgcctggagcacggccggatcgccaagttcagcaaggtgagaaccatcaccacccgaagcaacagcatcaaacaaggcaaggaccagcactttcctgtgttcatgaacgagaaggaggacatcctgtggtgtaccgagatggagagagtgttcgggttcccagtccactacacagatgtcagcaacatgtctagactggccagacagagactgctgggaagaagctggtccgtccctgtgatcagacacctgttcgcccctctgaaggagtacttcgcctgcgtgagcagcggcaacagcaacgccaacagccggggccccagcttctctagcggcctggtgccactgtccctgagagggagccacatgggccccatggagatctacaaaaccgtgagcgcctggaagcggcagcctgtgcgcgtgctgagcctgtttcggaatatcgataaagtcctgaaaagcctgggattcctggagagcggctctggctccggcggtggcaccctgaagtacgtggaggatgtgacaaacgtggtcagacgggatgtggagaagtggggccccttcgatctggtgtacggcagcacccaacccctgggcagctcttgtgaccggtgccctggctggtacatgtttcagttccaccggatcctgcagtacgccctgccgagacaggagtcccagcggccattcttttggattttcatggacaacttgctgctgaccgaggatgaccaggaaactaccactcggttcctgcagaccgaagccgtgaccctgcaggacgtgagaggccgggactaccagaacgccatgcgggtgtggtccaacatccctggactgaaaagcaagcacgcacctctgacccctaaagaagaggagtacctgcaggcccaggtgcggagcagaagcaagctggacgcccctaaggtggatctgctggtgaagaattgcctcctgcccctgagagagtacttcaagtatttcagccagaatagtctgcccctgggcggcccaagcagcggcgcccctcctcccagcggcggcagcccagccggctccccaacctctaccgaggagggcacctctgagtccgccacccccgagagcggccctggcacctccaccgagcccagcgagggcagcgcacccggcagccctgccggcagccccacctccacagaggagggaaccagcaccgagcccagcgaaggcagcgccccaggcaccagcaccgagcctagtgagggcggctctggcggcggcagcgcccaggagattaaacggatcaacaagatcagaagaagacttgtgaaagacagcaacaccaagaaggccggcaagacaggccccatgaaaaccctgctggttagagtgatgacacccgatctgagagagcggctggaaaacctgagaaagaagcctgaaaatatcccccagcccatcagcaatacatctagagccaacctgaataagctgctgaccgattacaccgaaatgaagaaggcgatcctgcatgtgtactgggaagagttccagaaggaccctgtgggcctgatgagccgggtggcccagcctgccagcaagaagatcgatcagaacaagctgaaacctgagatggacgagaagggcaacctgaccaccgccggctttgcctgctctcagtgtggccagcccctgttcgtgtacaagctggagcaggtgtctgagaagggcaaggcttacaccaactacttcggacggtgcaatgtggccgagcacgaaaagctgatcctgctggcccagctgaagcccgagaaggatagcgacgaagccgtgacatatagcctgggaaagtttgggcagagggccctggatttctacagcattcatgtgaccaaggagtccacccaccccgtgaagcccctggcccagatcgccggaaacagatacgcctccggacctgtgggaaaggccctgagcgacgcatgtatgggcacaatcgcctccttcctgtctaagtaccaggacatcatcatcgaacaccagaaggtggtgaagggcaaccagaagagactggagagcctgcgggagctggccggcaaggaaaacctggaataccctagcgtgaccctgccacctcagcctcacaccaaggagggcgttgatgcctacaacgaagtgatcgcccgggtgcgaatgtgggtgaacctgaacctgtggcagaagctgaagctaagcagagatgatgccaagcctctgctgagactgaagggattcccttcctttcctctggtcgagagacaggccaacgaagtggactggtgggacatggtgtgtaacgtgaagaagctgatcaacgagaaaaaggaggatggcaaggtgttttggcagaatctggctggctacaagagacaggaagccctgagaccatacctgagcagcgaggaagatcggaagaagggaaagaaattcgctcggtaccagctgggcgacctgctgctgcacctggaaaagaagcacggcgaggactggggaaaggtgtacgacgaggcctgggagcggattgacaagaaagtggaaggcctgagcaagcacatcaagctggaagaggaacggagaagcgaggacgcccagagcaaggccgccctgaccgactggctgcgggctaaggccagcttcgtgatcgagggcctgaaggaggccgacaaggacgagttctgcagatgcgagctgaagctgcagaagtggtacggggacctgcggggaaagcccttcgccatcgaagccgagaacagcatcctggacatcagcggcttcagcaagcagtacaactgtgccttcatctggcagaaggacggcgtgaagaagctgaacctgtacctgatcatcaactacttcaagggcggcaagctgcggttcaagaagatcaaacctgaagccttcgaagccaacagattctacaccgtgatcaacaaaaagagcggcgagatcgtgcccatggaggtgaacttcaacttcgacgaccccaacctgatcatcctgcctctggcctttggcaagagacagggcagagaattcatctggaacgacctgctgtccctggaaaccggcagcctgaagctggccaacggaagagtgatcgagaagacactgtacaacagaagaacccggcaggatgagcctgccctgttcgtggccctgaccttcgagcggcgggaggtcctggactcctccaatatcaaaccaatgaacctgatcggcgtggcaagaggcgaaaacatccccgccgtgatcgccctgaccgaccccgagggctgcccactgagccggtttaaggatagcctgggaaacccaacccacatcctgagaatcggcgagagctataaggagaagcagcggaccatccaggccaagaaggaggtggagcagcggagagccggcggctacagccggaagtacgccagcaaagccaagaatctggcagacgatatggtgagaaacaccgctagagatctgctgtactacgccgtgacccaggatgccatgctgatcttcgccaacctgagccggggcttcggccggcagggcaagcggaccttcatggccgagagacagtacacacggatggaggactggctgaccgccaagctggcctacgagggcctgagcaagacctacctgtccaagacactggcccagtacacctccaagacatgcagcaactgtgggtttaccatcaccagcgccgactacgacagggtgctggagaagctgaagaagacagcaacaggctggatgaccacaattaacggcaaggagctgaaggtggagggccagattacctactacaacagatacaagagacagaacgtagtcaaggacctgtccgtcgagctggatagactgagcgaagaatctgtgaacaacgacatctcctcctggacaaagggcagaagcggagaagctctgagcctcctgaagaaaagattctcccatagacccgtgcaggagaagttcgtgtgcctgaactgcggcttcgagacacacgcagccgagcaagccgccctgaacatcgccagatcctggctgttcctgcggagccaggagtacaagaaataccagacaaacaagacaaccggcaacaccgataagagagccttcgtcgagacctggcagtccttttaccggaagaagcttaaggaggtgtggaaacctgccgtgcggtctggcggatctggcggaggctccacaagcaggcccagggccgtgaagttcggcgacgtggccctgtacttcagcagggaggagtggggctgcctgaggcccgcccagagggccctgtacagggacgtgatgcaggagacctacggccacctgggcgccctgggctgcgccggccccaagcccgccctgatcagctggctggagaggaacaccgacgactgggagcccgccgccctggacccccaggagtgccccaagggcgtggccgtgcagaccagccccaagaaaaagagaaaagtctaagctgccttctgcggggcttgccttctggccatgcccttcttctctcccttgcacctgtacctcttggtctttgaataaagcctgagtaggaaggctagcaaaaaaaaaaaaaaaaaaaaaaaaaaaaaaaaaaaaaaaaaaaaaaaaaaaaaaaaaaaaaaaaaaaaaaaaaaaaaaaa

SEQ ID NO: 6689 - RNA, 5797 nt, synthetic construct
  source 1..5797: mol_type = other RNA
aggaaataagagagaaaagaagagtaagaagaaatataagagccaccatggcccctaagaagaagcgtaaagtgagccggatggaacgcctcgtctacgaggtgcggcagaagtgcagaaacatcgaggacatctgcatctcctgcggatctctgaacgtgaccctggagcacccactgttcatcggcggcatgtgccagaactgtaaaaactgttttctggagtgtgcctatcaatacgacgatgacggctaccagagctactgcaccatctgttgcggcggaagagaggtgctgatgtgtggaaataacaactgctgccggtgcttctgcgtggaatgcgtggacctgctggtgggccccggcgccgcccaggccgctattaaggaagatccttggaactgctacatgtgcggccacaagggcacatacggcctgctgagacggagagaggactggcctagcagactgcagatgttcttcgccaataaccacgaccaggagttcgacccccctaaggtgtaccctcccgtccccgccgagaagagaaagcccatccgggtcctgagcctgttcgatggcatcgccaccggtctgctggtgctgaaggacctgggcatccaggtggataggtacattgcctccgaggtgtgcgaggactccatcaccgtgggaatggtgcgtcatcagggcaagatcatgtacgtgggcgacgtgcggagcgtgacacagaagcatatccaggagtggggccctttcgacctggtgatcggcggcagcccttgcaatgacctgagcatcgtgaacccagcccggaagggcctgtacgagggaaccggcagactgttcttcgagttttacagactgctgcacgacgcccggcctaaggaaggcgacgaccggcccttcttttggctgttcgagaatgtggtggccatgggagtcagcgacaagcgggatattagccggttcctggagagcaaccccgtgatgatcgatgccaaggaagtgagcgccgcccaccgggccagatacttctggggcaatctgcctggcatgaacagacccctggccagcaccgtgaacgacaagctggagctgcaggagtgcctggagcacggccggatcgccaagttcagcaaggtgagaaccatcaccacccgaagcaacagcatcaaacaaggcaaggaccagcactttcctgtgttcatgaacgagaaggaggacatcctgtggtgtaccgagatggagagagtgttcgggttcccagtccactacacagatgtcagcaacatgtctagactggccagacagagactgctgggaagaagctggtccgtccctgtgatcagacacctgttcgcccctctgaaggagtacttcgcctgcgtgagcagcggcaacagcaacgccaacagccggggccccagcttctctagcggcctggtgccactgtccctgagagggagccacatgggccccatggagatctacaaaaccgtgagcgcctggaagcggcagcctgtgcgcgtgctgagcctgtttcggaatatcgataaagtcctgaaaagcctgggattcctggagagcggctctggctccggcggtggcaccctgaagtacgtggaggatgtgacaaacgtggtcagacgggatgtggagaagtggggccccttcgatctggtgtacggcagcacccaacccctgggcagctcttgtgaccggtgccctggctggtacatgtttcagttccaccggatcctgcagtacgccctgccgagacaggagtcccagcggccattcttttggattttcatggacaacttgctgctgaccgaggatgaccaggaaactaccactcggttcctgcagaccgaagccgtgaccctgcaggacgtgagaggccgggactaccagaacgccatgcgggtgtggtccaacatccctggactgaaaagcaagcacgcacctctgacccctaaagaagaggagtacctgcaggcccaggtgcggagcagaagcaagctggacgcccctaaggtggatctgctggtgaagaattgcctcctgcccctgagagagtacttcaagtatttcagccagaatagtctgcccctgggcggcccaagcagcggcgcccctcctcccagcggcggcagcccagccggctccccaacctctaccgaggagggcacctctgagtccgccacccccgagagcggccctggcacctccaccgagcccagcgagggcagcgcacccggcagccctgccggcagccccacctccacagaggagggaaccagcaccgagcccagcgaaggcagcgccccaggcaccagcaccgagcctagtgagggcggctctggcggcggcagcgcccaggagattaaacggatcaacaagatcagaagaagacttgtgaaagacagcaacaccaagaaggccggcaagacaggccccatgaaaaccctgctggttagagtgatgacacccgatctgagagagcggctggaaaacctgagaaagaagcctgaaaatatcccccagcccatcagcaatacatctagagccaacctgaataagctgctgaccgattacaccgaaatgaagaaggcgatcctgcatgtgtactgggaagagttccagaaggaccctgtgggcctgatgagccgggtggcccagcctgccagcaagaagatcgatcagaacaagctgaaacctgagatggacgagaagggcaacctgaccaccgccggctttgcctgctctcagtgtggccagcccctgttcgtgtacaagctggagcaggtgtctgagaagggcaaggcttacaccaactacttcggacggtgcaatgtggccgagcacgaaaagctgatcctgctggcccagctgaagcccgagaaggatagcgacgaagccgtgacatatagcctgggaaagtttgggcagagggccctggatttctacagcattcatgtgaccaaggagtccacccaccccgtgaagcccctggcccagatcgccggaaacagatacgcctccggacctgtgggaaaggccctgagcgacgcatgtatgggcacaatcgcctccttcctgtctaagtaccaggacatcatcatcgaacaccagaaggtggtgaagggcaaccagaagagactggagagcctgcgggagctggccggcaaggaaaacctggaataccctagcgtgaccctgccacctcagcctcacaccaaggagggcgttgatgcctacaacgaagtgatcgcccgggtgcgaatgtgggtgaacctgaacctgtggcagaagctgaagctaagcagagatgatgccaagcctctgctgagactgaagggattcccttcctttcctctggtcgagagacaggccaacgaagtggactggtgggacatggtgtgtaacgtgaagaagctgatcaacgagaaaaaggaggatggcaaggtgttttggcagaatctggctggctacaagagacaggaagccctgagaccatacctgagcagcgaggaagatcggaagaagggaaagaaattcgctcggtaccagctgggcgacctgctgctgcacctggaaaagaagcacggcgaggactggggaaaggtgtacgacgaggcctgggagcggattgacaagaaagtggaaggcctgagcaagcacatcaagctggaagaggaacggagaagcgaggacgcccagagcaaggccgccctgaccgactggctgcgggctaaggccagcttcgtgatcgagggcctgaaggaggccgacaaggacgagttctgcagatgcgagctgaagctgcagaagtggtacggggacctgcggggaaagcccttcgccatcgaagccgagaacagcatcctggacatcagcggcttcagcaagcagtacaactgtgccttcatctggcagaaggacggcgtgaagaagctgaacctgtacctgatcatcaactacttcaagggcggcaagctgcggttcaagaagatcaaacctgaagccttcgaagccaacagattctacaccgtgatcaacaaaaagagcggcgagatcgtgcccatggaggtgaacttcaacttcgacgaccccaacctgatcatcctgcctctggcctttggcaagagacagggcagagaattcatctggaacgacctgctgtccctggaaaccggcagcctgaagctggccaacggaagagtgatcgagaagacactgtacaacagaagaacccggcaggatgagcctgccctgttcgtggccctgaccttcgagcggcgggaggtcctggactcctccaatatcaaaccaatgaacctgatcggcgtggcaagaggcgaaaacatccccgccgtgatcgccctgaccgaccccgagggctgcccactgagccggtttaaggatagcctgggaaacccaacccacatcctgagaatcggcgagagctataaggagaagcagcggaccatccaggccaagaaggaggtggagcagcggagagccggcggctacagccggaagtacgccagcaaagccaagaatctggcagacgatatggtgagaaacaccgctagagatctgctgtactacgccgtgacccaggatgccatgctgatcttcgccaacctgagccggggcttcggccggcagggcaagcggaccttcatggccgagagacagtacacacggatggaggactggctgaccgccaagctggcctacgagggcctgagcaagacctacctgtccaagacactggcccagtacacctccaagacatgcagcaactgtgggtttaccatcaccagcgccgactacgacagggtgctggagaagctgaagaagacagcaacaggctggatgaccacaattaacggcaaggagctgaaggtggagggccagattacctactacaacagatacaagagacagaacgtagtcaaggacctgtccgtcgagctggatagactgagcgaagaatctgtgaacaacgacatctcctcctggacaaagggcagaagcggagaagctctgagcctcctgaagaaaagattctcccatagacccgtgcaggagaagttcgtgtgcctgaactgcggcttcgagacacacgcagccgagcaagccgccctgaacatcgccagatcctggctgttcctgcggagccaggagtacaagaaataccagacaaacaagacaaccggcaacaccgataagagagccttcgtcgagacctggcagtccttttaccggaagaagcttaaggaggtgtggaaacctgccgtgcggtctggcggatctggcggaggctccacaagcccccccaggcaggagagggtgaccttcggcgacgtggccgtggacttcaccctggacgagtgggtgtgcctggacagcgcccagaaggccctgtacagggacgtgatgctggagaactacggccacctggtgtgcctgggcctggccggcgccaagcccgccgtgatccagaggctggagaggggcgaggccgcctggtgccccggcgtgcccggcagcaggctgcccggcctgttcttcttcaccagccccaagaaaaagagaaaagtctaagctgccttctgcggggcttgccttctggccatgcccttcttctctcccttgcacctgtacctcttggtctttgaataaagcctgagtaggaaggctagcaaaaaaaaaaaaaaaaaaaaaaaaaaaaaaaaaaaaaaaaaaaaaaaaaaaaaaaaaaaaaaaaaaaaaaaaaaaaaaaa

SEQ ID NO: 6690 - RNA, 5797 nt, synthetic construct
  source 1..5797: mol_type = other RNA
aggaaataagagagaaaagaagagtaagaagaaatataagagccaccatggcccctaagaagaagcgtaaagtgagccggatggaacgcctcgtctacgaggtgcggcagaagtgcagaaacatcgaggacatctgcatctcctgcggatctctgaacgtgaccctggagcacccactgttcatcggcggcatgtgccagaactgtaaaaactgttttctggagtgtgcctatcaatacgacgatgacggctaccagagctactgcaccatctgttgcggcggaagagaggtgctgatgtgtggaaataacaactgctgccggtgcttctgcgtggaatgcgtggacctgctggtgggccccggcgccgcccaggccgctattaaggaagatccttggaactgctacatgtgcggccacaagggcacatacggcctgctgagacggagagaggactggcctagcagactgcagatgttcttcgccaataaccacgaccaggagttcgacccccctaaggtgtaccctcccgtccccgccgagaagagaaagcccatccgggtcctgagcctgttcgatggcatcgccaccggtctgctggtgctgaaggacctgggcatccaggtggataggtacattgcctccgaggtgtgcgaggactccatcaccgtgggaatggtgcgtcatcagggcaagatcatgtacgtgggcgacgtgcggagcgtgacacagaagcatatccaggagtggggccctttcgacctggtgatcggcggcagcccttgcaatgacctgagcatcgtgaacccagcccggaagggcctgtacgagggaaccggcagactgttcttcgagttttacagactgctgcacgacgcccggcctaaggaaggcgacgaccggcccttcttttggctgttcgagaatgtggtggccatgggagtcagcgacaagcgggatattagccggttcctggagagcaaccccgtgatgatcgatgccaaggaagtgagcgccgcccaccgggccagatacttctggggcaatctgcctggcatgaacagacccctggccagcaccgtgaacgacaagctggagctgcaggagtgcctggagcacggccggatcgccaagttcagcaaggtgagaaccatcaccacccgaagcaacagcatcaaacaaggcaaggaccagcactttcctgtgttcatgaacgagaaggaggacatcctgtggtgtaccgagatggagagagtgttcgggttcccagtccactacacagatgtcagcaacatgtctagactggccagacagagactgctgggaagaagctggtccgtccctgtgatcagacacctgttcgcccctctgaaggagtacttcgcctgcgtgagcagcggcaacagcaacgccaacagccggggccccagcttctctagcggcctggtgccactgtccctgagagggagccacatgggccccatggagatctacaaaaccgtgagcgcctggaagcggcagcctgtgcgcgtgctgagcctgtttcggaatatcgataaagtcctgaaaagcctgggattcctggagagcggctctggctccggcggtggcaccctgaagtacgtggaggatgtgacaaacgtggtcagacgggatgtggagaagtggggccccttcgatctggtgtacggcagcacccaacccctgggcagctcttgtgaccggtgccctggctggtacatgtttcagttccaccggatcctgcagtacgccctgccgagacaggagtcccagcggccattcttttggattttcatggacaacttgctgctgaccgaggatgaccaggaaactaccactcggttcctgcagaccgaagccgtgaccctgcaggacgtgagaggccgggactaccagaacgccatgcgggtgtggtccaacatccctggactgaaaagcaagcacgcacctctgacccctaaagaagaggagtacctgcaggcccaggtgcggagcagaagcaagctggacgcccctaaggtggatctgctggtgaagaattgcctcctgcccctgagagagtacttcaagtatttcagccagaatagtctgcccctgggcggcccaagcagcggcgcccctcctcccagcggcggcagcccagccggctccccaacctctaccgaggagggcacctctgagtccgccacccccgagagcggccctggcacctccaccgagcccagcgagggcagcgcacccggcagccctgccggcagccccacctccacagaggagggaaccagcaccgagcccagcgaaggcagcgccccaggcaccagcaccgagcctagtgagggcggctctggcggcggcagcgcccaggagattaaacggatcaacaagatcagaagaagacttgtgaaagacagcaacaccaagaaggccggcaagacaggccccatgaaaaccctgctggttagagtgatgacacccgatctgagagagcggctggaaaacctgagaaagaagcctgaaaatatcccccagcccatcagcaatacatctagagccaacctgaataagctgctgaccgattacaccgaaatgaagaaggcgatcctgcatgtgtactgggaagagttccagaaggaccctgtgggcctgatgagccgggtggcccagcctgccagcaagaagatcgatcagaacaagctgaaacctgagatggacgagaagggcaacctgaccaccgccggctttgcctgctctcagtgtggccagcccctgttcgtgtacaagctggagcaggtgtctgagaagggcaaggcttacaccaactacttcggacggtgcaatgtggccgagcacgaaaagctgatcctgctggcccagctgaagcccgagaaggatagcgacgaagccgtgacatatagcctgggaaagtttgggcagagggccctggatttctacagcattcatgtgaccaaggagtccacccaccccgtgaagcccctggcccagatcgccggaaacagatacgcctccggacctgtgggaaaggccctgagcgacgcatgtatgggcacaatcgcctccttcctgtctaagtaccaggacatcatcatcgaacaccagaaggtggtgaagggcaaccagaagagactggagagcctgcgggagctggccggcaaggaaaacctggaataccctagcgtgaccctgccacctcagcctcacaccaaggagggcgttgatgcctacaacgaagtgatcgcccgggtgcgaatgtgggtgaacctgaacctgtggcagaagctgaagctaagcagagatgatgccaagcctctgctgagactgaagggattcccttcctttcctctggtcgagagacaggccaacgaagtggactggtgggacatggtgtgtaacgtgaagaagctgatcaacgagaaaaaggaggatggcaaggtgttttggcagaatctggctggctacaagagacaggaagccctgagaccatacctgagcagcgaggaagatcggaagaagggaaagaaattcgctcggtaccagctgggcgacctgctgctgcacctggaaaagaagcacggcgaggactggggaaaggtgtacgacgaggcctgggagcggattgacaagaaagtggaaggcctgagcaagcacatcaagctggaagaggaacggagaagcgaggacgcccagagcaaggccgccctgaccgactggctgcgggctaaggccagcttcgtgatcgagggcctgaaggaggccgacaaggacgagttctgcagatgcgagctgaagctgcagaagtggtacggggacctgcggggaaagcccttcgccatcgaagccgagaacagcatcctggacatcagcggcttcagcaagcagtacaactgtgccttcatctggcagaaggacggcgtgaagaagctgaacctgtacctgatcatcaactacttcaagggcggcaagctgcggttcaagaagatcaaacctgaagccttcgaagccaacagattctacaccgtgatcaacaaaaagagcggcgagatcgtgcccatggaggtgaacttcaacttcgacgaccccaacctgatcatcctgcctctggcctttggcaagagacagggcagagaattcatctggaacgacctgctgtccctggaaaccggcagcctgaagctggccaacggaagagtgatcgagaagacactgtacaacagaagaacccggcaggatgagcctgccctgttcgtggccctgaccttcgagcggcgggaggtcctggactcctccaatatcaaaccaatgaacctgatcggcgtggcaagaggcgaaaacatccccgccgtgatcgccctgaccgaccccgagggctgcccactgagccggtttaaggatagcctgggaaacccaacccacatcctgagaatcggcgagagctataaggagaagcagcggaccatccaggccaagaaggaggtggagcagcggagagccggcggctacagccggaagtacgccagcaaagccaagaatctggcagacgatatggtgagaaacaccgctagagatctgctgtactacgccgtgacccaggatgccatgctgatcttcgccaacctgagccggggcttcggccggcagggcaagcggaccttcatggccgagagacagtacacacggatggaggactggctgaccgccaagctggcctacgagggcctgagcaagacctacctgtccaagacactggcccagtacacctccaagacatgcagcaactgtgggtttaccatcaccagcgccgactacgacagggtgctggagaagctgaagaagacagcaacaggctggatgaccacaattaacggcaaggagctgaaggtggagggccagattacctactacaacagatacaagagacagaacgtagtcaaggacctgtccgtcgagctggatagactgagcgaagaatctgtgaacaacgacatctcctcctggacaaagggcagaagcggagaagctctgagcctcctgaagaaaagattctcccatagacccgtgcaggagaagttcgtgtgcctgaactgcggcttcgagacacacgcagccgagcaagccgccctgaacatcgccagatcctggctgttcctgcggagccaggagtacaagaaataccagacaaacaagacaaccggcaacaccgataagagagccttcgtcgagacctggcagtccttttaccggaagaagcttaaggaggtgtggaaacctgccgtgcggtctggcggatctggcggaggctccacaagcatggccgccgccgccctgaggctgcccgcccagggcaccgtgaccttcgaggacgtggccgtgaagttcagccaggaggagtggagcatcctgaccgaggcccagaggtgcctgtaccacgacgtgatgctggagaacctggccctgatcagcagcctgggctgctggtacggcgccaaggacgagacccccagcaagcagaccctgagcatccagcagcagagccccctgaggagccactggaccagccccaagaaaaagagaaaagtctaagctgccttctgcggggcttgccttctggccatgcccttcttctctcccttgcacctgtacctcttggtctttgaataaagcctgagtaggaaggctagcaaaaaaaaaaaaaaaaaaaaaaaaaaaaaaaaaaaaaaaaaaaaaaaaaaaaaaaaaaaaaaaaaaaaaaaaaaaaaaaa

SEQ ID NO: 6691 - RNA, 5797 nt, synthetic construct
  source 1..5797: mol_type = other RNA
aggaaataagagagaaaagaagagtaagaagaaatataagagccaccatggcccctaagaagaagcgtaaagtgagccggatggaacgcctcgtctacgaggtgcggcagaagtgcagaaacatcgaggacatctgcatctcctgcggatctctgaacgtgaccctggagcacccactgttcatcggcggcatgtgccagaactgtaaaaactgttttctggagtgtgcctatcaatacgacgatgacggctaccagagctactgcaccatctgttgcggcggaagagaggtgctgatgtgtggaaataacaactgctgccggtgcttctgcgtggaatgcgtggacctgctggtgggccccggcgccgcccaggccgctattaaggaagatccttggaactgctacatgtgcggccacaagggcacatacggcctgctgagacggagagaggactggcctagcagactgcagatgttcttcgccaataaccacgaccaggagttcgacccccctaaggtgtaccctcccgtccccgccgagaagagaaagcccatccgggtcctgagcctgttcgatggcatcgccaccggtctgctggtgctgaaggacctgggcatccaggtggataggtacattgcctccgaggtgtgcgaggactccatcaccgtgggaatggtgcgtcatcagggcaagatcatgtacgtgggcgacgtgcggagcgtgacacagaagcatatccaggagtggggccctttcgacctggtgatcggcggcagcccttgcaatgacctgagcatcgtgaacccagcccggaagggcctgtacgagggaaccggcagactgttcttcgagttttacagactgctgcacgacgcccggcctaaggaaggcgacgaccggcccttcttttggctgttcgagaatgtggtggccatgggagtcagcgacaagcgggatattagccggttcctggagagcaaccccgtgatgatcgatgccaaggaagtgagcgccgcccaccgggccagatacttctggggcaatctgcctggcatgaacagacccctggccagcaccgtgaacgacaagctggagctgcaggagtgcctggagcacggccggatcgccaagttcagcaaggtgagaaccatcaccacccgaagcaacagcatcaaacaaggcaaggaccagcactttcctgtgttcatgaacgagaaggaggacatcctgtggtgtaccgagatggagagagtgttcgggttcccagtccactacacagatgtcagcaacatgtctagactggccagacagagactgctgggaagaagctggtccgtccctgtgatcagacacctgttcgcccctctgaaggagtacttcgcctgcgtgagcagcggcaacagcaacgccaacagccggggccccagcttctctagcggcctggtgccactgtccctgagagggagccacatgggccccatggagatctacaaaaccgtgagcgcctggaagcggcagcctgtgcgcgtgctgagcctgtttcggaatatcgataaagtcctgaaaagcctgggattcctggagagcggctctggctccggcggtggcaccctgaagtacgtggaggatgtgacaaacgtggtcagacgggatgtggagaagtggggccccttcgatctggtgtacggcagcacccaacccctgggcagctcttgtgaccggtgccctggctggtacatgtttcagttccaccggatcctgcagtacgccctgccgagacaggagtcccagcggccattcttttggattttcatggacaacttgctgctgaccgaggatgaccaggaaactaccactcggttcctgcagaccgaagccgtgaccctgcaggacgtgagaggccgggactaccagaacgccatgcgggtgtggtccaacatccctggactgaaaagcaagcacgcacctctgacccctaaagaagaggagtacctgcaggcccaggtgcggagcagaagcaagctggacgcccctaaggtggatctgctggtgaagaattgcctcctgcccctgagagagtacttcaagtatttcagccagaatagtctgcccctgggcggcccaagcagcggcgcccctcctcccagcggcggcagcccagccggctccccaacctctaccgaggagggcacctctgagtccgccacccccgagagcggccctggcacctccaccgagcccagcgagggcagcgcacccggcagccctgccggcagccccacctccacagaggagggaaccagcaccgagcccagcgaaggcagcgccccaggcaccagcaccgagcctagtgagggcggctctggcggcggcagcgcccaggagattaaacggatcaacaagatcagaagaagacttgtgaaagacagcaacaccaagaaggccggcaagacaggccccatgaaaaccctgctggttagagtgatgacacccgatctgagagagcggctggaaaacctgagaaagaagcctgaaaatatcccccagcccatcagcaatacatctagagccaacctgaataagctgctgaccgattacaccgaaatgaagaaggcgatcctgcatgtgtactgggaagagttccagaaggaccctgtgggcctgatgagccgggtggcccagcctgccagcaagaagatcgatcagaacaagctgaaacctgagatggacgagaagggcaacctgaccaccgccggctttgcctgctctcagtgtggccagcccctgttcgtgtacaagctggagcaggtgtctgagaagggcaaggcttacaccaactacttcggacggtgcaatgtggccgagcacgaaaagctgatcctgctggcccagctgaagcccgagaaggatagcgacgaagccgtgacatatagcctgggaaagtttgggcagagggccctggatttctacagcattcatgtgaccaaggagtccacccaccccgtgaagcccctggcccagatcgccggaaacagatacgcctccggacctgtgggaaaggccctgagcgacgcatgtatgggcacaatcgcctccttcctgtctaagtaccaggacatcatcatcgaacaccagaaggtggtgaagggcaaccagaagagactggagagcctgcgggagctggccggcaaggaaaacctggaataccctagcgtgaccctgccacctcagcctcacaccaaggagggcgttgatgcctacaacgaagtgatcgcccgggtgcgaatgtgggtgaacctgaacctgtggcagaagctgaagctaagcagagatgatgccaagcctctgctgagactgaagggattcccttcctttcctctggtcgagagacaggccaacgaagtggactggtgggacatggtgtgtaacgtgaagaagctgatcaacgagaaaaaggaggatggcaaggtgttttggcagaatctggctggctacaagagacaggaagccctgagaccatacctgagcagcgaggaagatcggaagaagggaaagaaattcgctcggtaccagctgggcgacctgctgctgcacctggaaaagaagcacggcgaggactggggaaaggtgtacgacgaggcctgggagcggattgacaagaaagtggaaggcctgagcaagcacatcaagctggaagaggaacggagaagcgaggacgcccagagcaaggccgccctgaccgactggctgcgggctaaggccagcttcgtgatcgagggcctgaaggaggccgacaaggacgagttctgcagatgcgagctgaagctgcagaagtggtacggggacctgcggggaaagcccttcgccatcgaagccgagaacagcatcctggacatcagcggcttcagcaagcagtacaactgtgccttcatctggcagaaggacggcgtgaagaagctgaacctgtacctgatcatcaactacttcaagggcggcaagctgcggttcaagaagatcaaacctgaagccttcgaagccaacagattctacaccgtgatcaacaaaaagagcggcgagatcgtgcccatggaggtgaacttcaacttcgacgaccccaacctgatcatcctgcctctggcctttggcaagagacagggcagagaattcatctggaacgacctgctgtccctggaaaccggcagcctgaagctggccaacggaagagtgatcgagaagacactgtacaacagaagaacccggcaggatgagcctgccctgttcgtggccctgaccttcgagcggcgggaggtcctggactcctccaatatcaaaccaatgaacctgatcggcgtggcaagaggcgaaaacatccccgccgtgatcgccctgaccgaccccgagggctgcccactgagccggtttaaggatagcctgggaaacccaacccacatcctgagaatcggcgagagctataaggagaagcagcggaccatccaggccaagaaggaggtggagcagcggagagccggcggctacagccggaagtacgccagcaaagccaagaatctggcagacgatatggtgagaaacaccgctagagatctgctgtactacgccgtgacccaggatgccatgctgatcttcgccaacctgagccggggcttcggccggcagggcaagcggaccttcatggccgagagacagtacacacggatggaggactggctgaccgccaagctggcctacgagggcctgagcaagacctacctgtccaagacactggcccagtacacctccaagacatgcagcaactgtgggtttaccatcaccagcgccgactacgacagggtgctggagaagctgaagaagacagcaacaggctggatgaccacaattaacggcaaggagctgaaggtggagggccagattacctactacaacagatacaagagacagaacgtagtcaaggacctgtccgtcgagctggatagactgagcgaagaatctgtgaacaacgacatctcctcctggacaaagggcagaagcggagaagctctgagcctcctgaagaaaagattctcccatagacccgtgcaggagaagttcgtgtgcctgaactgcggcttcgagacacacgcagccgagcaagccgccctgaacatcgccagatcctggctgttcctgcggagccaggagtacaagaaataccagacaaacaagacaaccggcaacaccgataagagagccttcgtcgagacctggcagtccttttaccggaagaagcttaaggaggtgtggaaacctgccgtgcggtctggcggatctggcggaggctccacaagcatggcccacatggccttcagggacgtggccgtggacttcacccaggacgagtggaggctgctgagccccgcccagaggaccctgtacagggaggtgatgctggagaactacagcaacctggtgagcctgggcatcagcttcagcaagcccgagatcatcacccagctggagcagggcaaggagacctggagggaggagaagaagtgcccccccgccacctgccccgaccccgagcccgagctgaccagccccaagaaaaagagaaaagtctaagctgccttctgcggggcttgccttctggccatgcccttcttctctcccttgcacctgtacctcttggtctttgaataaagcctgagtaggaaggctagcaaaaaaaaaaaaaaaaaaaaaaaaaaaaaaaaaaaaaaaaaaaaaaaaaaaaaaaaaaaaaaaaaaaaaaaaaaaaaaaa

SEQ ID NO: 6692 - RNA, 5797 nt, synthetic construct
  source 1..5797: mol_type = other RNA
aggaaataagagagaaaagaagagtaagaagaaatataagagccaccatggcccctaagaagaagcgtaaagtgagccggatggaacgcctcgtctacgaggtgcggcagaagtgcagaaacatcgaggacatctgcatctcctgcggatctctgaacgtgaccctggagcacccactgttcatcggcggcatgtgccagaactgtaaaaactgttttctggagtgtgcctatcaatacgacgatgacggctaccagagctactgcaccatctgttgcggcggaagagaggtgctgatgtgtggaaataacaactgctgccggtgcttctgcgtggaatgcgtggacctgctggtgggccccggcgccgcccaggccgctattaaggaagatccttggaactgctacatgtgcggccacaagggcacatacggcctgctgagacggagagaggactggcctagcagactgcagatgttcttcgccaataaccacgaccaggagttcgacccccctaaggtgtaccctcccgtccccgccgagaagagaaagcccatccgggtcctgagcctgttcgatggcatcgccaccggtctgctggtgctgaaggacctgggcatccaggtggataggtacattgcctccgaggtgtgcgaggactccatcaccgtgggaatggtgcgtcatcagggcaagatcatgtacgtgggcgacgtgcggagcgtgacacagaagcatatccaggagtggggccctttcgacctggtgatcggcggcagcccttgcaatgacctgagcatcgtgaacccagcccggaagggcctgtacgagggaaccggcagactgttcttcgagttttacagactgctgcacgacgcccggcctaaggaaggcgacgaccggcccttcttttggctgttcgagaatgtggtggccatgggagtcagcgacaagcgggatattagccggttcctggagagcaaccccgtgatgatcgatgccaaggaagtgagcgccgcccaccgggccagatacttctggggcaatctgcctggcatgaacagacccctggccagcaccgtgaacgacaagctggagctgcaggagtgcctggagcacggccggatcgccaagttcagcaaggtgagaaccatcaccacccgaagcaacagcatcaaacaaggcaaggaccagcactttcctgtgttcatgaacgagaaggaggacatcctgtggtgtaccgagatggagagagtgttcgggttcccagtccactacacagatgtcagcaacatgtctagactggccagacagagactgctgggaagaagctggtccgtccctgtgatcagacacctgttcgcccctctgaaggagtacttcgcctgcgtgagcagcggcaacagcaacgccaacagccggggccccagcttctctagcggcctggtgccactgtccctgagagggagccacatgggccccatggagatctacaaaaccgtgagcgcctggaagcggcagcctgtgcgcgtgctgagcctgtttcggaatatcgataaagtcctgaaaagcctgggattcctggagagcggctctggctccggcggtggcaccctgaagtacgtggaggatgtgacaaacgtggtcagacgggatgtggagaagtggggccccttcgatctggtgtacggcagcacccaacccctgggcagctcttgtgaccggtgccctggctggtacatgtttcagttccaccggatcctgcagtacgccctgccgagacaggagtcccagcggccattcttttggattttcatggacaacttgctgctgaccgaggatgaccaggaaactaccactcggttcctgcagaccgaagccgtgaccctgcaggacgtgagaggccgggactaccagaacgccatgcgggtgtggtccaacatccctggactgaaaagcaagcacgcacctctgacccctaaagaagaggagtacctgcaggcccaggtgcggagcagaagcaagctggacgcccctaaggtggatctgctggtgaagaattgcctcctgcccctgagagagtacttcaagtatttcagccagaatagtctgcccctgggcggcccaagcagcggcgcccctcctcccagcggcggcagcccagccggctccccaacctctaccgaggagggcacctctgagtccgccacccccgagagcggccctggcacctccaccgagcccagcgagggcagcgcacccggcagccctgccggcagccccacctccacagaggagggaaccagcaccgagcccagcgaaggcagcgccccaggcaccagcaccgagcctagtgagggcggctctggcggcggcagcgcccaggagattaaacggatcaacaagatcagaagaagacttgtgaaagacagcaacaccaagaaggccggcaagacaggccccatgaaaaccctgctggttagagtgatgacacccgatctgagagagcggctggaaaacctgagaaagaagcctgaaaatatcccccagcccatcagcaatacatctagagccaacctgaataagctgctgaccgattacaccgaaatgaagaaggcgatcctgcatgtgtactgggaagagttccagaaggaccctgtgggcctgatgagccgggtggcccagcctgccagcaagaagatcgatcagaacaagctgaaacctgagatggacgagaagggcaacctgaccaccgccggctttgcctgctctcagtgtggccagcccctgttcgtgtacaagctggagcaggtgtctgagaagggcaaggcttacaccaactacttcggacggtgcaatgtggccgagcacgaaaagctgatcctgctggcccagctgaagcccgagaaggatagcgacgaagccgtgacatatagcctgggaaagtttgggcagagggccctggatttctacagcattcatgtgaccaaggagtccacccaccccgtgaagcccctggcccagatcgccggaaacagatacgcctccggacctgtgggaaaggccctgagcgacgcatgtatgggcacaatcgcctccttcctgtctaagtaccaggacatcatcatcgaacaccagaaggtggtgaagggcaaccagaagagactggagagcctgcgggagctggccggcaaggaaaacctggaataccctagcgtgaccctgccacctcagcctcacaccaaggagggcgttgatgcctacaacgaagtgatcgcccgggtgcgaatgtgggtgaacctgaacctgtggcagaagctgaagctaagcagagatgatgccaagcctctgctgagactgaagggattcccttcctttcctctggtcgagagacaggccaacgaagtggactggtgggacatggtgtgtaacgtgaagaagctgatcaacgagaaaaaggaggatggcaaggtgttttggcagaatctggctggctacaagagacaggaagccctgagaccatacctgagcagcgaggaagatcggaagaagggaaagaaattcgctcggtaccagctgggcgacctgctgctgcacctggaaaagaagcacggcgaggactggggaaaggtgtacgacgaggcctgggagcggattgacaagaaagtggaaggcctgagcaagcacatcaagctggaagaggaacggagaagcgaggacgcccagagcaaggccgccctgaccgactggctgcgggctaaggccagcttcgtgatcgagggcctgaaggaggccgacaaggacgagttctgcagatgcgagctgaagctgcagaagtggtacggggacctgcggggaaagcccttcgccatcgaagccgagaacagcatcctggacatcagcggcttcagcaagcagtacaactgtgccttcatctggcagaaggacggcgtgaagaagctgaacctgtacctgatcatcaactacttcaagggcggcaagctgcggttcaagaagatcaaacctgaagccttcgaagccaacagattctacaccgtgatcaacaaaaagagcggcgagatcgtgcccatggaggtgaacttcaacttcgacgaccccaacctgatcatcctgcctctggcctttggcaagagacagggcagagaattcatctggaacgacctgctgtccctggaaaccggcagcctgaagctggccaacggaagagtgatcgagaagacactgtacaacagaagaacccggcaggatgagcctgccctgttcgtggccctgaccttcgagcggcgggaggtcctggactcctccaatatcaaaccaatgaacctgatcggcgtggcaagaggcgaaaacatccccgccgtgatcgccctgaccgaccccgagggctgcccactgagccggtttaaggatagcctgggaaacccaacccacatcctgagaatcggcgagagctataaggagaagcagcggaccatccaggccaagaaggaggtggagcagcggagagccggcggctacagccggaagtacgccagcaaagccaagaatctggcagacgatatggtgagaaacaccgctagagatctgctgtactacgccgtgacccaggatgccatgctgatcttcgccaacctgagccggggcttcggccggcagggcaagcggaccttcatggccgagagacagtacacacggatggaggactggctgaccgccaagctggcctacgagggcctgagcaagacctacctgtccaagacactggcccagtacacctccaagacatgcagcaactgtgggtttaccatcaccagcgccgactacgacagggtgctggagaagctgaagaagacagcaacaggctggatgaccacaattaacggcaaggagctgaaggtggagggccagattacctactacaacagatacaagagacagaacgtagtcaaggacctgtccgtcgagctggatagactgagcgaagaatctgtgaacaacgacatctcctcctggacaaagggcagaagcggagaagctctgagcctcctgaagaaaagattctcccatagacccgtgcaggagaagttcgtgtgcctgaactgcggcttcgagacacacgcagccgagcaagccgccctgaacatcgccagatcctggctgttcctgcggagccaggagtacaagaaataccagacaaacaagacaaccggcaacaccgataagagagccttcgtcgagacctggcagtccttttaccggaagaagcttaaggaggtgtggaaacctgccgtgcggtctggcggatctggcggaggctccacaagccaggccgaggtgaccttcgaggacgtggccgtgctgctgagcagggaggagtggggcaggctgggccccgtgcagaagggcctgtacagggacgtgatgctggagacctacaggaacctggtgagcctgggcgccggccccgccggccccaagcccgaggtgatcacccagctggagaggggcgacgagccctgggtgcccgacgtgcagggcagggagaggcccaacatcgacggcagcgccaccagccccaagaaaaagagaaaagtctaagctgccttctgcggggcttgccttctggccatgcccttcttctctcccttgcacctgtacctcttggtctttgaataaagcctgagtaggaaggctagcaaaaaaaaaaaaaaaaaaaaaaaaaaaaaaaaaaaaaaaaaaaaaaaaaaaaaaaaaaaaaaaaaaaaaaaaaaaaaaaa

SEQ ID NO: 6693 - RNA, 5797 nt, synthetic construct
  source 1..5797: mol_type = other RNA
aggaaataagagagaaaagaagagtaagaagaaatataagagccaccatggcccctaagaagaagcgtaaagtgagccggatggaacgcctcgtctacgaggtgcggcagaagtgcagaaacatcgaggacatctgcatctcctgcggatctctgaacgtgaccctggagcacccactgttcatcggcggcatgtgccagaactgtaaaaactgttttctggagtgtgcctatcaatacgacgatgacggctaccagagctactgcaccatctgttgcggcggaagagaggtgctgatgtgtggaaataacaactgctgccggtgcttctgcgtggaatgcgtggacctgctggtgggccccggcgccgcccaggccgctattaaggaagatccttggaactgctacatgtgcggccacaagggcacatacggcctgctgagacggagagaggactggcctagcagactgcagatgttcttcgccaataaccacgaccaggagttcgacccccctaaggtgtaccctcccgtccccgccgagaagagaaagcccatccgggtcctgagcctgttcgatggcatcgccaccggtctgctggtgctgaaggacctgggcatccaggtggataggtacattgcctccgaggtgtgcgaggactccatcaccgtgggaatggtgcgtcatcagggcaagatcatgtacgtgggcgacgtgcggagcgtgacacagaagcatatccaggagtggggccctttcgacctggtgatcggcggcagcccttgcaatgacctgagcatcgtgaacccagcccggaagggcctgtacgagggaaccggcagactgttcttcgagttttacagactgctgcacgacgcccggcctaaggaaggcgacgaccggcccttcttttggctgttcgagaatgtggtggccatgggagtcagcgacaagcgggatattagccggttcctggagagcaaccccgtgatgatcgatgccaaggaagtgagcgccgcccaccgggccagatacttctggggcaatctgcctggcatgaacagacccctggccagcaccgtgaacgacaagctggagctgcaggagtgcctggagcacggccggatcgccaagttcagcaaggtgagaaccatcaccacccgaagcaacagcatcaaacaaggcaaggaccagcactttcctgtgttcatgaacgagaaggaggacatcctgtggtgtaccgagatggagagagtgttcgggttcccagtccactacacagatgtcagcaacatgtctagactggccagacagagactgctgggaagaagctggtccgtccctgtgatcagacacctgttcgcccctctgaaggagtacttcgcctgcgtgagcagcggcaacagcaacgccaacagccggggccccagcttctctagcggcctggtgccactgtccctgagagggagccacatgggccccatggagatctacaaaaccgtgagcgcctggaagcggcagcctgtgcgcgtgctgagcctgtttcggaatatcgataaagtcctgaaaagcctgggattcctggagagcggctctggctccggcggtggcaccctgaagtacgtggaggatgtgacaaacgtggtcagacgggatgtggagaagtggggccccttcgatctggtgtacggcagcacccaacccctgggcagctcttgtgaccggtgccctggctggtacatgtttcagttccaccggatcctgcagtacgccctgccgagacaggagtcccagcggccattcttttggattttcatggacaacttgctgctgaccgaggatgaccaggaaactaccactcggttcctgcagaccgaagccgtgaccctgcaggacgtgagaggccgggactaccagaacgccatgcgggtgtggtccaacatccctggactgaaaagcaagcacgcacctctgacccctaaagaagaggagtacctgcaggcccaggtgcggagcagaagcaagctggacgcccctaaggtggatctgctggtgaagaattgcctcctgcccctgagagagtacttcaagtatttcagccagaatagtctgcccctgggcggcccaagcagcggcgcccctcctcccagcggcggcagcccagccggctccccaacctctaccgaggagggcacctctgagtccgccacccccgagagcggccctggcacctccaccgagcccagcgagggcagcgcacccggcagccctgccggcagccccacctccacagaggagggaaccagcaccgagcccagcgaaggcagcgccccaggcaccagcaccgagcctagtgagggcggctctggcggcggcagcgcccaggagattaaacggatcaacaagatcagaagaagacttgtgaaagacagcaacaccaagaaggccggcaagacaggccccatgaaaaccctgctggttagagtgatgacacccgatctgagagagcggctggaaaacctgagaaagaagcctgaaaatatcccccagcccatcagcaatacatctagagccaacctgaataagctgctgaccgattacaccgaaatgaagaaggcgatcctgcatgtgtactgggaagagttccagaaggaccctgtgggcctgatgagccgggtggcccagcctgccagcaagaagatcgatcagaacaagctgaaacctgagatggacgagaagggcaacctgaccaccgccggctttgcctgctctcagtgtggccagcccctgttcgtgtacaagctggagcaggtgtctgagaagggcaaggcttacaccaactacttcggacggtgcaatgtggccgagcacgaaaagctgatcctgctggcccagctgaagcccgagaaggatagcgacgaagccgtgacatatagcctgggaaagtttgggcagagggccctggatttctacagcattcatgtgaccaaggagtccacccaccccgtgaagcccctggcccagatcgccggaaacagatacgcctccggacctgtgggaaaggccctgagcgacgcatgtatgggcacaatcgcctccttcctgtctaagtaccaggacatcatcatcgaacaccagaaggtggtgaagggcaaccagaagagactggagagcctgcgggagctggccggcaaggaaaacctggaataccctagcgtgaccctgccacctcagcctcacaccaaggagggcgttgatgcctacaacgaagtgatcgcccgggtgcgaatgtgggtgaacctgaacctgtggcagaagctgaagctaagcagagatgatgccaagcctctgctgagactgaagggattcccttcctttcctctggtcgagagacaggccaacgaagtggactggtgggacatggtgtgtaacgtgaagaagctgatcaacgagaaaaaggaggatggcaaggtgttttggcagaatctggctggctacaagagacaggaagccctgagaccatacctgagcagcgaggaagatcggaagaagggaaagaaattcgctcggtaccagctgggcgacctgctgctgcacctggaaaagaagcacggcgaggactggggaaaggtgtacgacgaggcctgggagcggattgacaagaaagtggaaggcctgagcaagcacatcaagctggaagaggaacggagaagcgaggacgcccagagcaaggccgccctgaccgactggctgcgggctaaggccagcttcgtgatcgagggcctgaaggaggccgacaaggacgagttctgcagatgcgagctgaagctgcagaagtggtacggggacctgcggggaaagcccttcgccatcgaagccgagaacagcatcctggacatcagcggcttcagcaagcagtacaactgtgccttcatctggcagaaggacggcgtgaagaagctgaacctgtacctgatcatcaactacttcaagggcggcaagctgcggttcaagaagatcaaacctgaagccttcgaagccaacagattctacaccgtgatcaacaaaaagagcggcgagatcgtgcccatggaggtgaacttcaacttcgacgaccccaacctgatcatcctgcctctggcctttggcaagagacagggcagagaattcatctggaacgacctgctgtccctggaaaccggcagcctgaagctggccaacggaagagtgatcgagaagacactgtacaacagaagaacccggcaggatgagcctgccctgttcgtggccctgaccttcgagcggcgggaggtcctggactcctccaatatcaaaccaatgaacctgatcggcgtggcaagaggcgaaaacatccccgccgtgatcgccctgaccgaccccgagggctgcccactgagccggtttaaggatagcctgggaaacccaacccacatcctgagaatcggcgagagctataaggagaagcagcggaccatccaggccaagaaggaggtggagcagcggagagccggcggctacagccggaagtacgccagcaaagccaagaatctggcagacgatatggtgagaaacaccgctagagatctgctgtactacgccgtgacccaggatgccatgctgatcttcgccaacctgagccggggcttcggccggcagggcaagcggaccttcatggccgagagacagtacacacggatggaggactggctgaccgccaagctggcctacgagggcctgagcaagacctacctgtccaagacactggcccagtacacctccaagacatgcagcaactgtgggtttaccatcaccagcgccgactacgacagggtgctggagaagctgaagaagacagcaacaggctggatgaccacaattaacggcaaggagctgaaggtggagggccagattacctactacaacagatacaagagacagaacgtagtcaaggacctgtccgtcgagctggatagactgagcgaagaatctgtgaacaacgacatctcctcctggacaaagggcagaagcggagaagctctgagcctcctgaagaaaagattctcccatagacccgtgcaggagaagttcgtgtgcctgaactgcggcttcgagacacacgcagccgagcaagccgccctgaacatcgccagatcctggctgttcctgcggagccaggagtacaagaaataccagacaaacaagacaaccggcaacaccgataagagagccttcgtcgagacctggcagtccttttaccggaagaagcttaaggaggtgtggaaacctgccgtgcggtctggcggatctggcggaggctccacaagcctgagggacctggtgaccttcgaggacgtggccgtggacttcacccaggaggagtgggccctgctggacgccagccagaggagcctgtacagggaggtgatgctggagaactgcaggaacctggccagcctgggctgccacgtggacaagcccagcctgatcagccagctggagcaggaggaccaggccatgaccgaggagaggggcaacctgcccggcacctgccccgacctggagaccgtgaccagccccaagaaaaagagaaaagtctaagctgccttctgcggggcttgccttctggccatgcccttcttctctcccttgcacctgtacctcttggtctttgaataaagcctgagtaggaaggctagcaaaaaaaaaaaaaaaaaaaaaaaaaaaaaaaaaaaaaaaaaaaaaaaaaaaaaaaaaaaaaaaaaaaaaaaaaaaaaaaa

SEQ ID NO: 6694 - RNA, 5797 nt, synthetic construct
  source 1..5797: mol_type = other RNA
aggaaataagagagaaaagaagagtaagaagaaatataagagccaccatggcccctaagaagaagcgtaaagtgagccggatggaacgcctcgtctacgaggtgcggcagaagtgcagaaacatcgaggacatctgcatctcctgcggatctctgaacgtgaccctggagcacccactgttcatcggcggcatgtgccagaactgtaaaaactgttttctggagtgtgcctatcaatacgacgatgacggctaccagagctactgcaccatctgttgcggcggaagagaggtgctgatgtgtggaaataacaactgctgccggtgcttctgcgtggaatgcgtggacctgctggtgggccccggcgccgcccaggccgctattaaggaagatccttggaactgctacatgtgcggccacaagggcacatacggcctgctgagacggagagaggactggcctagcagactgcagatgttcttcgccaataaccacgaccaggagttcgacccccctaaggtgtaccctcccgtccccgccgagaagagaaagcccatccgggtcctgagcctgttcgatggcatcgccaccggtctgctggtgctgaaggacctgggcatccaggtggataggtacattgcctccgaggtgtgcgaggactccatcaccgtgggaatggtgcgtcatcagggcaagatcatgtacgtgggcgacgtgcggagcgtgacacagaagcatatccaggagtggggccctttcgacctggtgatcggcggcagcccttgcaatgacctgagcatcgtgaacccagcccggaagggcctgtacgagggaaccggcagactgttcttcgagttttacagactgctgcacgacgcccggcctaaggaaggcgacgaccggcccttcttttggctgttcgagaatgtggtggccatgggagtcagcgacaagcgggatattagccggttcctggagagcaaccccgtgatgatcgatgccaaggaagtgagcgccgcccaccgggccagatacttctggggcaatctgcctggcatgaacagacccctggccagcaccgtgaacgacaagctggagctgcaggagtgcctggagcacggccggatcgccaagttcagcaaggtgagaaccatcaccacccgaagcaacagcatcaaacaaggcaaggaccagcactttcctgtgttcatgaacgagaaggaggacatcctgtggtgtaccgagatggagagagtgttcgggttcccagtccactacacagatgtcagcaacatgtctagactggccagacagagactgctgggaagaagctggtccgtccctgtgatcagacacctgttcgcccctctgaaggagtacttcgcctgcgtgagcagcggcaacagcaacgccaacagccggggccccagcttctctagcggcctggtgccactgtccctgagagggagccacatgggccccatggagatctacaaaaccgtgagcgcctggaagcggcagcctgtgcgcgtgctgagcctgtttcggaatatcgataaagtcctgaaaagcctgggattcctggagagcggctctggctccggcggtggcaccctgaagtacgtggaggatgtgacaaacgtggtcagacgggatgtggagaagtggggccccttcgatctggtgtacggcagcacccaacccctgggcagctcttgtgaccggtgccctggctggtacatgtttcagttccaccggatcctgcagtacgccctgccgagacaggagtcccagcggccattcttttggattttcatggacaacttgctgctgaccgaggatgaccaggaaactaccactcggttcctgcagaccgaagccgtgaccctgcaggacgtgagaggccgggactaccagaacgccatgcgggtgtggtccaacatccctggactgaaaagcaagcacgcacctctgacccctaaagaagaggagtacctgcaggcccaggtgcggagcagaagcaagctggacgcccctaaggtggatctgctggtgaagaattgcctcctgcccctgagagagtacttcaagtatttcagccagaatagtctgcccctgggcggcccaagcagcggcgcccctcctcccagcggcggcagcccagccggctccccaacctctaccgaggagggcacctctgagtccgccacccccgagagcggccctggcacctccaccgagcccagcgagggcagcgcacccggcagccctgccggcagccccacctccacagaggagggaaccagcaccgagcccagcgaaggcagcgccccaggcaccagcaccgagcctagtgagggcggctctggcggcggcagcgcccaggagattaaacggatcaacaagatcagaagaagacttgtgaaagacagcaacaccaagaaggccggcaagacaggccccatgaaaaccctgctggttagagtgatgacacccgatctgagagagcggctggaaaacctgagaaagaagcctgaaaatatcccccagcccatcagcaatacatctagagccaacctgaataagctgctgaccgattacaccgaaatgaagaaggcgatcctgcatgtgtactgggaagagttccagaaggaccctgtgggcctgatgagccgggtggcccagcctgccagcaagaagatcgatcagaacaagctgaaacctgagatggacgagaagggcaacctgaccaccgccggctttgcctgctctcagtgtggccagcccctgttcgtgtacaagctggagcaggtgtctgagaagggcaaggcttacaccaactacttcggacggtgcaatgtggccgagcacgaaaagctgatcctgctggcccagctgaagcccgagaaggatagcgacgaagccgtgacatatagcctgggaaagtttgggcagagggccctggatttctacagcattcatgtgaccaaggagtccacccaccccgtgaagcccctggcccagatcgccggaaacagatacgcctccggacctgtgggaaaggccctgagcgacgcatgtatgggcacaatcgcctccttcctgtctaagtaccaggacatcatcatcgaacaccagaaggtggtgaagggcaaccagaagagactggagagcctgcgggagctggccggcaaggaaaacctggaataccctagcgtgaccctgccacctcagcctcacaccaaggagggcgttgatgcctacaacgaagtgatcgcccgggtgcgaatgtgggtgaacctgaacctgtggcagaagctgaagctaagcagagatgatgccaagcctctgctgagactgaagggattcccttcctttcctctggtcgagagacaggccaacgaagtggactggtgggacatggtgtgtaacgtgaagaagctgatcaacgagaaaaaggaggatggcaaggtgttttggcagaatctggctggctacaagagacaggaagccctgagaccatacctgagcagcgaggaagatcggaagaagggaaagaaattcgctcggtaccagctgggcgacctgctgctgcacctggaaaagaagcacggcgaggactggggaaaggtgtacgacgaggcctgggagcggattgacaagaaagtggaaggcctgagcaagcacatcaagctggaagaggaacggagaagcgaggacgcccagagcaaggccgccctgaccgactggctgcgggctaaggccagcttcgtgatcgagggcctgaaggaggccgacaaggacgagttctgcagatgcgagctgaagctgcagaagtggtacggggacctgcggggaaagcccttcgccatcgaagccgagaacagcatcctggacatcagcggcttcagcaagcagtacaactgtgccttcatctggcagaaggacggcgtgaagaagctgaacctgtacctgatcatcaactacttcaagggcggcaagctgcggttcaagaagatcaaacctgaagccttcgaagccaacagattctacaccgtgatcaacaaaaagagcggcgagatcgtgcccatggaggtgaacttcaacttcgacgaccccaacctgatcatcctgcctctggcctttggcaagagacagggcagagaattcatctggaacgacctgctgtccctggaaaccggcagcctgaagctggccaacggaagagtgatcgagaagacactgtacaacagaagaacccggcaggatgagcctgccctgttcgtggccctgaccttcgagcggcgggaggtcctggactcctccaatatcaaaccaatgaacctgatcggcgtggcaagaggcgaaaacatccccgccgtgatcgccctgaccgaccccgagggctgcccactgagccggtttaaggatagcctgggaaacccaacccacatcctgagaatcggcgagagctataaggagaagcagcggaccatccaggccaagaaggaggtggagcagcggagagccggcggctacagccggaagtacgccagcaaagccaagaatctggcagacgatatggtgagaaacaccgctagagatctgctgtactacgccgtgacccaggatgccatgctgatcttcgccaacctgagccggggcttcggccggcagggcaagcggaccttcatggccgagagacagtacacacggatggaggactggctgaccgccaagctggcctacgagggcctgagcaagacctacctgtccaagacactggcccagtacacctccaagacatgcagcaactgtgggtttaccatcaccagcgccgactacgacagggtgctggagaagctgaagaagacagcaacaggctggatgaccacaattaacggcaaggagctgaaggtggagggccagattacctactacaacagatacaagagacagaacgtagtcaaggacctgtccgtcgagctggatagactgagcgaagaatctgtgaacaacgacatctcctcctggacaaagggcagaagcggagaagctctgagcctcctgaagaaaagattctcccatagacccgtgcaggagaagttcgtgtgcctgaactgcggcttcgagacacacgcagccgagcaagccgccctgaacatcgccagatcctggctgttcctgcggagccaggagtacaagaaataccagacaaacaagacaaccggcaacaccgataagagagccttcgtcgagacctggcagtccttttaccggaagaagcttaaggaggtgtggaaacctgccgtgcggtctggcggatctggcggaggctccacaagcgcccagaggcccgtgaccttcgaggacgtggccgtgtacttcagcgaggcccagggcaccctgctggaccccgaccagaaggccctgtacagggaggtgatgatggagaactacgagaacgtggccagcctgggcagcctgacccccaagcccgagctgatcatcaggctggagaggggcgaggagccctgggtgagcgaccccggcgacgcccccgtgagcggcgacttcaggaagagccacaccagccccaagaaaaagagaaaagtctaagctgccttctgcggggcttgccttctggccatgcccttcttctctcccttgcacctgtacctcttggtctttgaataaagcctgagtaggaaggctagcaaaaaaaaaaaaaaaaaaaaaaaaaaaaaaaaaaaaaaaaaaaaaaaaaaaaaaaaaaaaaaaaaaaaaaaaaaaaaaaa

SEQ ID NO: 6695 - RNA, 5797 nt, synthetic construct
  source 1..5797: mol_type = other RNA
aggaaataagagagaaaagaagagtaagaagaaatataagagccaccatggcccctaagaagaagcgtaaagtgagccggatggaacgcctcgtctacgaggtgcggcagaagtgcagaaacatcgaggacatctgcatctcctgcggatctctgaacgtgaccctggagcacccactgttcatcggcggcatgtgccagaactgtaaaaactgttttctggagtgtgcctatcaatacgacgatgacggctaccagagctactgcaccatctgttgcggcggaagagaggtgctgatgtgtggaaataacaactgctgccggtgcttctgcgtggaatgcgtggacctgctggtgggccccggcgccgcccaggccgctattaaggaagatccttggaactgctacatgtgcggccacaagggcacatacggcctgctgagacggagagaggactggcctagcagactgcagatgttcttcgccaataaccacgaccaggagttcgacccccctaaggtgtaccctcccgtccccgccgagaagagaaagcccatccgggtcctgagcctgttcgatggcatcgccaccggtctgctggtgctgaaggacctgggcatccaggtggataggtacattgcctccgaggtgtgcgaggactccatcaccgtgggaatggtgcgtcatcagggcaagatcatgtacgtgggcgacgtgcggagcgtgacacagaagcatatccaggagtggggccctttcgacctggtgatcggcggcagcccttgcaatgacctgagcatcgtgaacccagcccggaagggcctgtacgagggaaccggcagactgttcttcgagttttacagactgctgcacgacgcccggcctaaggaaggcgacgaccggcccttcttttggctgttcgagaatgtggtggccatgggagtcagcgacaagcgggatattagccggttcctggagagcaaccccgtgatgatcgatgccaaggaagtgagcgccgcccaccgggccagatacttctggggcaatctgcctggcatgaacagacccctggccagcaccgtgaacgacaagctggagctgcaggagtgcctggagcacggccggatcgccaagttcagcaaggtgagaaccatcaccacccgaagcaacagcatcaaacaaggcaaggaccagcactttcctgtgttcatgaacgagaaggaggacatcctgtggtgtaccgagatggagagagtgttcgggttcccagtccactacacagatgtcagcaacatgtctagactggccagacagagactgctgggaagaagctggtccgtccctgtgatcagacacctgttcgcccctctgaaggagtacttcgcctgcgtgagcagcggcaacagcaacgccaacagccggggccccagcttctctagcggcctggtgccactgtccctgagagggagccacatgggccccatggagatctacaaaaccgtgagcgcctggaagcggcagcctgtgcgcgtgctgagcctgtttcggaatatcgataaagtcctgaaaagcctgggattcctggagagcggctctggctccggcggtggcaccctgaagtacgtggaggatgtgacaaacgtggtcagacgggatgtggagaagtggggccccttcgatctggtgtacggcagcacccaacccctgggcagctcttgtgaccggtgccctggctggtacatgtttcagttccaccggatcctgcagtacgccctgccgagacaggagtcccagcggccattcttttggattttcatggacaacttgctgctgaccgaggatgaccaggaaactaccactcggttcctgcagaccgaagccgtgaccctgcaggacgtgagaggccgggactaccagaacgccatgcgggtgtggtccaacatccctggactgaaaagcaagcacgcacctctgacccctaaagaagaggagtacctgcaggcccaggtgcggagcagaagcaagctggacgcccctaaggtggatctgctggtgaagaattgcctcctgcccctgagagagtacttcaagtatttcagccagaatagtctgcccctgggcggcccaagcagcggcgcccctcctcccagcggcggcagcccagccggctccccaacctctaccgaggagggcacctctgagtccgccacccccgagagcggccctggcacctccaccgagcccagcgagggcagcgcacccggcagccctgccggcagccccacctccacagaggagggaaccagcaccgagcccagcgaaggcagcgccccaggcaccagcaccgagcctagtgagggcggctctggcggcggcagcgcccaggagattaaacggatcaacaagatcagaagaagacttgtgaaagacagcaacaccaagaaggccggcaagacaggccccatgaaaaccctgctggttagagtgatgacacccgatctgagagagcggctggaaaacctgagaaagaagcctgaaaatatcccccagcccatcagcaatacatctagagccaacctgaataagctgctgaccgattacaccgaaatgaagaaggcgatcctgcatgtgtactgggaagagttccagaaggaccctgtgggcctgatgagccgggtggcccagcctgccagcaagaagatcgatcagaacaagctgaaacctgagatggacgagaagggcaacctgaccaccgccggctttgcctgctctcagtgtggccagcccctgttcgtgtacaagctggagcaggtgtctgagaagggcaaggcttacaccaactacttcggacggtgcaatgtggccgagcacgaaaagctgatcctgctggcccagctgaagcccgagaaggatagcgacgaagccgtgacatatagcctgggaaagtttgggcagagggccctggatttctacagcattcatgtgaccaaggagtccacccaccccgtgaagcccctggcccagatcgccggaaacagatacgcctccggacctgtgggaaaggccctgagcgacgcatgtatgggcacaatcgcctccttcctgtctaagtaccaggacatcatcatcgaacaccagaaggtggtgaagggcaaccagaagagactggagagcctgcgggagctggccggcaaggaaaacctggaataccctagcgtgaccctgccacctcagcctcacaccaaggagggcgttgatgcctacaacgaagtgatcgcccgggtgcgaatgtgggtgaacctgaacctgtggcagaagctgaagctaagcagagatgatgccaagcctctgctgagactgaagggattcccttcctttcctctggtcgagagacaggccaacgaagtggactggtgggacatggtgtgtaacgtgaagaagctgatcaacgagaaaaaggaggatggcaaggtgttttggcagaatctggctggctacaagagacaggaagccctgagaccatacctgagcagcgaggaagatcggaagaagggaaagaaattcgctcggtaccagctgggcgacctgctgctgcacctggaaaagaagcacggcgaggactggggaaaggtgtacgacgaggcctgggagcggattgacaagaaagtggaaggcctgagcaagcacatcaagctggaagaggaacggagaagcgaggacgcccagagcaaggccgccctgaccgactggctgcgggctaaggccagcttcgtgatcgagggcctgaaggaggccgacaaggacgagttctgcagatgcgagctgaagctgcagaagtggtacggggacctgcggggaaagcccttcgccatcgaagccgagaacagcatcctggacatcagcggcttcagcaagcagtacaactgtgccttcatctggcagaaggacggcgtgaagaagctgaacctgtacctgatcatcaactacttcaagggcggcaagctgcggttcaagaagatcaaacctgaagccttcgaagccaacagattctacaccgtgatcaacaaaaagagcggcgagatcgtgcccatggaggtgaacttcaacttcgacgaccccaacctgatcatcctgcctctggcctttggcaagagacagggcagagaattcatctggaacgacctgctgtccctggaaaccggcagcctgaagctggccaacggaagagtgatcgagaagacactgtacaacagaagaacccggcaggatgagcctgccctgttcgtggccctgaccttcgagcggcgggaggtcctggactcctccaatatcaaaccaatgaacctgatcggcgtggcaagaggcgaaaacatccccgccgtgatcgccctgaccgaccccgagggctgcccactgagccggtttaaggatagcctgggaaacccaacccacatcctgagaatcggcgagagctataaggagaagcagcggaccatccaggccaagaaggaggtggagcagcggagagccggcggctacagccggaagtacgccagcaaagccaagaatctggcagacgatatggtgagaaacaccgctagagatctgctgtactacgccgtgacccaggatgccatgctgatcttcgccaacctgagccggggcttcggccggcagggcaagcggaccttcatggccgagagacagtacacacggatggaggactggctgaccgccaagctggcctacgagggcctgagcaagacctacctgtccaagacactggcccagtacacctccaagacatgcagcaactgtgggtttaccatcaccagcgccgactacgacagggtgctggagaagctgaagaagacagcaacaggctggatgaccacaattaacggcaaggagctgaaggtggagggccagattacctactacaacagatacaagagacagaacgtagtcaaggacctgtccgtcgagctggatagactgagcgaagaatctgtgaacaacgacatctcctcctggacaaagggcagaagcggagaagctctgagcctcctgaagaaaagattctcccatagacccgtgcaggagaagttcgtgtgcctgaactgcggcttcgagacacacgcagccgagcaagccgccctgaacatcgccagatcctggctgttcctgcggagccaggagtacaagaaataccagacaaacaagacaaccggcaacaccgataagagagccttcgtcgagacctggcagtccttttaccggaagaagcttaaggaggtgtggaaacctgccgtgcggtctggcggatctggcggaggctccacaagcgcccaggtgcccgtgaccttcgaggaggtggccgtgtacttcaccgccggccagggcgccctgctgggccccaaccagagggccctgtacagggacgtgatgcaggagaactacgagaccgtggccagcctgggcttcagcatccccaagcccgacctgatcacccagctggagaggggcgaggagccctgggtgcccgacctgcagcccagcaaggagatggagttcctgaggggcacctgcaccagccccaagaaaaagagaaaagtctaagctgccttctgcggggcttgccttctggccatgcccttcttctctcccttgcacctgtacctcttggtctttgaataaagcctgagtaggaaggctagcaaaaaaaaaaaaaaaaaaaaaaaaaaaaaaaaaaaaaaaaaaaaaaaaaaaaaaaaaaaaaaaaaaaaaaaaaaaaaaaa

SEQ ID NO: 6696 - RNA, 5797 nt, synthetic construct
  source 1..5797: mol_type = other RNA
aggaaataagagagaaaagaagagtaagaagaaatataagagccaccatggcccctaagaagaagcgtaaagtgagccggatggaacgcctcgtctacgaggtgcggcagaagtgcagaaacatcgaggacatctgcatctcctgcggatctctgaacgtgaccctggagcacccactgttcatcggcggcatgtgccagaactgtaaaaactgttttctggagtgtgcctatcaatacgacgatgacggctaccagagctactgcaccatctgttgcggcggaagagaggtgctgatgtgtggaaataacaactgctgccggtgcttctgcgtggaatgcgtggacctgctggtgggccccggcgccgcccaggccgctattaaggaagatccttggaactgctacatgtgcggccacaagggcacatacggcctgctgagacggagagaggactggcctagcagactgcagatgttcttcgccaataaccacgaccaggagttcgacccccctaaggtgtaccctcccgtccccgccgagaagagaaagcccatccgggtcctgagcctgttcgatggcatcgccaccggtctgctggtgctgaaggacctgggcatccaggtggataggtacattgcctccgaggtgtgcgaggactccatcaccgtgggaatggtgcgtcatcagggcaagatcatgtacgtgggcgacgtgcggagcgtgacacagaagcatatccaggagtggggccctttcgacctggtgatcggcggcagcccttgcaatgacctgagcatcgtgaacccagcccggaagggcctgtacgagggaaccggcagactgttcttcgagttttacagactgctgcacgacgcccggcctaaggaaggcgacgaccggcccttcttttggctgttcgagaatgtggtggccatgggagtcagcgacaagcgggatattagccggttcctggagagcaaccccgtgatgatcgatgccaaggaagtgagcgccgcccaccgggccagatacttctggggcaatctgcctggcatgaacagacccctggccagcaccgtgaacgacaagctggagctgcaggagtgcctggagcacggccggatcgccaagttcagcaaggtgagaaccatcaccacccgaagcaacagcatcaaacaaggcaaggaccagcactttcctgtgttcatgaacgagaaggaggacatcctgtggtgtaccgagatggagagagtgttcgggttcccagtccactacacagatgtcagcaacatgtctagactggccagacagagactgctgggaagaagctggtccgtccctgtgatcagacacctgttcgcccctctgaaggagtacttcgcctgcgtgagcagcggcaacagcaacgccaacagccggggccccagcttctctagcggcctggtgccactgtccctgagagggagccacatgggccccatggagatctacaaaaccgtgagcgcctggaagcggcagcctgtgcgcgtgctgagcctgtttcggaatatcgataaagtcctgaaaagcctgggattcctggagagcggctctggctccggcggtggcaccctgaagtacgtggaggatgtgacaaacgtggtcagacgggatgtggagaagtggggccccttcgatctggtgtacggcagcacccaacccctgggcagctcttgtgaccggtgccctggctggtacatgtttcagttccaccggatcctgcagtacgccctgccgagacaggagtcccagcggccattcttttggattttcatggacaacttgctgctgaccgaggatgaccaggaaactaccactcggttcctgcagaccgaagccgtgaccctgcaggacgtgagaggccgggactaccagaacgccatgcgggtgtggtccaacatccctggactgaaaagcaagcacgcacctctgacccctaaagaagaggagtacctgcaggcccaggtgcggagcagaagcaagctggacgcccctaaggtggatctgctggtgaagaattgcctcctgcccctgagagagtacttcaagtatttcagccagaatagtctgcccctgggcggcccaagcagcggcgcccctcctcccagcggcggcagcccagccggctccccaacctctaccgaggagggcacctctgagtccgccacccccgagagcggccctggcacctccaccgagcccagcgagggcagcgcacccggcagccctgccggcagccccacctccacagaggagggaaccagcaccgagcccagcgaaggcagcgccccaggcaccagcaccgagcctagtgagggcggctctggcggcggcagcgcccaggagattaaacggatcaacaagatcagaagaagacttgtgaaagacagcaacaccaagaaggccggcaagacaggccccatgaaaaccctgctggttagagtgatgacacccgatctgagagagcggctggaaaacctgagaaagaagcctgaaaatatcccccagcccatcagcaatacatctagagccaacctgaataagctgctgaccgattacaccgaaatgaagaaggcgatcctgcatgtgtactgggaagagttccagaaggaccctgtgggcctgatgagccgggtggcccagcctgccagcaagaagatcgatcagaacaagctgaaacctgagatggacgagaagggcaacctgaccaccgccggctttgcctgctctcagtgtggccagcccctgttcgtgtacaagctggagcaggtgtctgagaagggcaaggcttacaccaactacttcggacggtgcaatgtggccgagcacgaaaagctgatcctgctggcccagctgaagcccgagaaggatagcgacgaagccgtgacatatagcctgggaaagtttgggcagagggccctggatttctacagcattcatgtgaccaaggagtccacccaccccgtgaagcccctggcccagatcgccggaaacagatacgcctccggacctgtgggaaaggccctgagcgacgcatgtatgggcacaatcgcctccttcctgtctaagtaccaggacatcatcatcgaacaccagaaggtggtgaagggcaaccagaagagactggagagcctgcgggagctggccggcaaggaaaacctggaataccctagcgtgaccctgccacctcagcctcacaccaaggagggcgttgatgcctacaacgaagtgatcgcccgggtgcgaatgtgggtgaacctgaacctgtggcagaagctgaagctaagcagagatgatgccaagcctctgctgagactgaagggattcccttcctttcctctggtcgagagacaggccaacgaagtggactggtgggacatggtgtgtaacgtgaagaagctgatcaacgagaaaaaggaggatggcaaggtgttttggcagaatctggctggctacaagagacaggaagccctgagaccatacctgagcagcgaggaagatcggaagaagggaaagaaattcgctcggtaccagctgggcgacctgctgctgcacctggaaaagaagcacggcgaggactggggaaaggtgtacgacgaggcctgggagcggattgacaagaaagtggaaggcctgagcaagcacatcaagctggaagaggaacggagaagcgaggacgcccagagcaaggccgccctgaccgactggctgcgggctaaggccagcttcgtgatcgagggcctgaaggaggccgacaaggacgagttctgcagatgcgagctgaagctgcagaagtggtacggggacctgcggggaaagcccttcgccatcgaagccgagaacagcatcctggacatcagcggcttcagcaagcagtacaactgtgccttcatctggcagaaggacggcgtgaagaagctgaacctgtacctgatcatcaactacttcaagggcggcaagctgcggttcaagaagatcaaacctgaagccttcgaagccaacagattctacaccgtgatcaacaaaaagagcggcgagatcgtgcccatggaggtgaacttcaacttcgacgaccccaacctgatcatcctgcctctggcctttggcaagagacagggcagagaattcatctggaacgacctgctgtccctggaaaccggcagcctgaagctggccaacggaagagtgatcgagaagacactgtacaacagaagaacccggcaggatgagcctgccctgttcgtggccctgaccttcgagcggcgggaggtcctggactcctccaatatcaaaccaatgaacctgatcggcgtggcaagaggcgaaaacatccccgccgtgatcgccctgaccgaccccgagggctgcccactgagccggtttaaggatagcctgggaaacccaacccacatcctgagaatcggcgagagctataaggagaagcagcggaccatccaggccaagaaggaggtggagcagcggagagccggcggctacagccggaagtacgccagcaaagccaagaatctggcagacgatatggtgagaaacaccgctagagatctgctgtactacgccgtgacccaggatgccatgctgatcttcgccaacctgagccggggcttcggccggcagggcaagcggaccttcatggccgagagacagtacacacggatggaggactggctgaccgccaagctggcctacgagggcctgagcaagacctacctgtccaagacactggcccagtacacctccaagacatgcagcaactgtgggtttaccatcaccagcgccgactacgacagggtgctggagaagctgaagaagacagcaacaggctggatgaccacaattaacggcaaggagctgaaggtggagggccagattacctactacaacagatacaagagacagaacgtagtcaaggacctgtccgtcgagctggatagactgagcgaagaatctgtgaacaacgacatctcctcctggacaaagggcagaagcggagaagctctgagcctcctgaagaaaagattctcccatagacccgtgcaggagaagttcgtgtgcctgaactgcggcttcgagacacacgcagccgagcaagccgccctgaacatcgccagatcctggctgttcctgcggagccaggagtacaagaaataccagacaaacaagacaaccggcaacaccgataagagagccttcgtcgagacctggcagtccttttaccggaagaagcttaaggaggtgtggaaacctgccgtgcggtctggcggatctggcggaggctccacaagccccaacgccctggtgaccttccaggacgtgttcgtggacttcagccccgaggagctggccagcctgagcgccgcccagaggaggctgcacagggaggtgaccctggagaactacaggaacctggtgagcctgggctaccagttccccaggcccgacatcatcacccagctggaggaggaggagagcagcgccatggaggaggacagcaacaccaagaccggccccgactgggagaccggccccaccagccccaagaaaaagagaaaagtctaagctgccttctgcggggcttgccttctggccatgcccttcttctctcccttgcacctgtacctcttggtctttgaataaagcctgagtaggaaggctagcaaaaaaaaaaaaaaaaaaaaaaaaaaaaaaaaaaaaaaaaaaaaaaaaaaaaaaaaaaaaaaaaaaaaaaaaaaaaaaaa

SEQ ID NO: 6697 - RNA, 5797 nt, synthetic construct
  source 1..5797: mol_type = other RNA
aggaaataagagagaaaagaagagtaagaagaaatataagagccaccatggcccctaagaagaagcgtaaagtgagccggatggaacgcctcgtctacgaggtgcggcagaagtgcagaaacatcgaggacatctgcatctcctgcggatctctgaacgtgaccctggagcacccactgttcatcggcggcatgtgccagaactgtaaaaactgttttctggagtgtgcctatcaatacgacgatgacggctaccagagctactgcaccatctgttgcggcggaagagaggtgctgatgtgtggaaataacaactgctgccggtgcttctgcgtggaatgcgtggacctgctggtgggccccggcgccgcccaggccgctattaaggaagatccttggaactgctacatgtgcggccacaagggcacatacggcctgctgagacggagagaggactggcctagcagactgcagatgttcttcgccaataaccacgaccaggagttcgacccccctaaggtgtaccctcccgtccccgccgagaagagaaagcccatccgggtcctgagcctgttcgatggcatcgccaccggtctgctggtgctgaaggacctgggcatccaggtggataggtacattgcctccgaggtgtgcgaggactccatcaccgtgggaatggtgcgtcatcagggcaagatcatgtacgtgggcgacgtgcggagcgtgacacagaagcatatccaggagtggggccctttcgacctggtgatcggcggcagcccttgcaatgacctgagcatcgtgaacccagcccggaagggcctgtacgagggaaccggcagactgttcttcgagttttacagactgctgcacgacgcccggcctaaggaaggcgacgaccggcccttcttttggctgttcgagaatgtggtggccatgggagtcagcgacaagcgggatattagccggttcctggagagcaaccccgtgatgatcgatgccaaggaagtgagcgccgcccaccgggccagatacttctggggcaatctgcctggcatgaacagacccctggccagcaccgtgaacgacaagctggagctgcaggagtgcctggagcacggccggatcgccaagttcagcaaggtgagaaccatcaccacccgaagcaacagcatcaaacaaggcaaggaccagcactttcctgtgttcatgaacgagaaggaggacatcctgtggtgtaccgagatggagagagtgttcgggttcccagtccactacacagatgtcagcaacatgtctagactggccagacagagactgctgggaagaagctggtccgtccctgtgatcagacacctgttcgcccctctgaaggagtacttcgcctgcgtgagcagcggcaacagcaacgccaacagccggggccccagcttctctagcggcctggtgccactgtccctgagagggagccacatgggccccatggagatctacaaaaccgtgagcgcctggaagcggcagcctgtgcgcgtgctgagcctgtttcggaatatcgataaagtcctgaaaagcctgggattcctggagagcggctctggctccggcggtggcaccctgaagtacgtggaggatgtgacaaacgtggtcagacgggatgtggagaagtggggccccttcgatctggtgtacggcagcacccaacccctgggcagctcttgtgaccggtgccctggctggtacatgtttcagttccaccggatcctgcagtacgccctgccgagacaggagtcccagcggccattcttttggattttcatggacaacttgctgctgaccgaggatgaccaggaaactaccactcggttcctgcagaccgaagccgtgaccctgcaggacgtgagaggccgggactaccagaacgccatgcgggtgtggtccaacatccctggactgaaaagcaagcacgcacctctgacccctaaagaagaggagtacctgcaggcccaggtgcggagcagaagcaagctggacgcccctaaggtggatctgctggtgaagaattgcctcctgcccctgagagagtacttcaagtatttcagccagaatagtctgcccctgggcggcccaagcagcggcgcccctcctcccagcggcggcagcccagccggctccccaacctctaccgaggagggcacctctgagtccgccacccccgagagcggccctggcacctccaccgagcccagcgagggcagcgcacccggcagccctgccggcagccccacctccacagaggagggaaccagcaccgagcccagcgaaggcagcgccccaggcaccagcaccgagcctagtgagggcggctctggcggcggcagcgcccaggagattaaacggatcaacaagatcagaagaagacttgtgaaagacagcaacaccaagaaggccggcaagacaggccccatgaaaaccctgctggttagagtgatgacacccgatctgagagagcggctggaaaacctgagaaagaagcctgaaaatatcccccagcccatcagcaatacatctagagccaacctgaataagctgctgaccgattacaccgaaatgaagaaggcgatcctgcatgtgtactgggaagagttccagaaggaccctgtgggcctgatgagccgggtggcccagcctgccagcaagaagatcgatcagaacaagctgaaacctgagatggacgagaagggcaacctgaccaccgccggctttgcctgctctcagtgtggccagcccctgttcgtgtacaagctggagcaggtgtctgagaagggcaaggcttacaccaactacttcggacggtgcaatgtggccgagcacgaaaagctgatcctgctggcccagctgaagcccgagaaggatagcgacgaagccgtgacatatagcctgggaaagtttgggcagagggccctggatttctacagcattcatgtgaccaaggagtccacccaccccgtgaagcccctggcccagatcgccggaaacagatacgcctccggacctgtgggaaaggccctgagcgacgcatgtatgggcacaatcgcctccttcctgtctaagtaccaggacatcatcatcgaacaccagaaggtggtgaagggcaaccagaagagactggagagcctgcgggagctggccggcaaggaaaacctggaataccctagcgtgaccctgccacctcagcctcacaccaaggagggcgttgatgcctacaacgaagtgatcgcccgggtgcgaatgtgggtgaacctgaacctgtggcagaagctgaagctaagcagagatgatgccaagcctctgctgagactgaagggattcccttcctttcctctggtcgagagacaggccaacgaagtggactggtgggacatggtgtgtaacgtgaagaagctgatcaacgagaaaaaggaggatggcaaggtgttttggcagaatctggctggctacaagagacaggaagccctgagaccatacctgagcagcgaggaagatcggaagaagggaaagaaattcgctcggtaccagctgggcgacctgctgctgcacctggaaaagaagcacggcgaggactggggaaaggtgtacgacgaggcctgggagcggattgacaagaaagtggaaggcctgagcaagcacatcaagctggaagaggaacggagaagcgaggacgcccagagcaaggccgccctgaccgactggctgcgggctaaggccagcttcgtgatcgagggcctgaaggaggccgacaaggacgagttctgcagatgcgagctgaagctgcagaagtggtacggggacctgcggggaaagcccttcgccatcgaagccgagaacagcatcctggacatcagcggcttcagcaagcagtacaactgtgccttcatctggcagaaggacggcgtgaagaagctgaacctgtacctgatcatcaactacttcaagggcggcaagctgcggttcaagaagatcaaacctgaagccttcgaagccaacagattctacaccgtgatcaacaaaaagagcggcgagatcgtgcccatggaggtgaacttcaacttcgacgaccccaacctgatcatcctgcctctggcctttggcaagagacagggcagagaattcatctggaacgacctgctgtccctggaaaccggcagcctgaagctggccaacggaagagtgatcgagaagacactgtacaacagaagaacccggcaggatgagcctgccctgttcgtggccctgaccttcgagcggcgggaggtcctggactcctccaatatcaaaccaatgaacctgatcggcgtggcaagaggcgaaaacatccccgccgtgatcgccctgaccgaccccgagggctgcccactgagccggtttaaggatagcctgggaaacccaacccacatcctgagaatcggcgagagctataaggagaagcagcggaccatccaggccaagaaggaggtggagcagcggagagccggcggctacagccggaagtacgccagcaaagccaagaatctggcagacgatatggtgagaaacaccgctagagatctgctgtactacgccgtgacccaggatgccatgctgatcttcgccaacctgagccggggcttcggccggcagggcaagcggaccttcatggccgagagacagtacacacggatggaggactggctgaccgccaagctggcctacgagggcctgagcaagacctacctgtccaagacactggcccagtacacctccaagacatgcagcaactgtgggtttaccatcaccagcgccgactacgacagggtgctggagaagctgaagaagacagcaacaggctggatgaccacaattaacggcaaggagctgaaggtggagggccagattacctactacaacagatacaagagacagaacgtagtcaaggacctgtccgtcgagctggatagactgagcgaagaatctgtgaacaacgacatctcctcctggacaaagggcagaagcggagaagctctgagcctcctgaagaaaagattctcccatagacccgtgcaggagaagttcgtgtgcctgaactgcggcttcgagacacacgcagccgagcaagccgccctgaacatcgccagatcctggctgttcctgcggagccaggagtacaagaaataccagacaaacaagacaaccggcaacaccgataagagagccttcgtcgagacctggcagtccttttaccggaagaagcttaaggaggtgtggaaacctgccgtgcggtctggcggatctggcggaggctccacaagcgcccaggagagcgtgatgttcagcgacgtgagcatcgacttcagccaggaggagtgggagtgcctgaacgacgaccagagggacctgtacagggacgtgatgctggagaactacagcaacctggtgagcatgggccacagcatcagcaagcccaacgtgatcagctacctggagcagggcaaggagccctggctggtggacagggagctgaccaggggccagtggcccgtgctggagagcaggaccagccccaagaaaaagagaaaagtctaagctgccttctgcggggcttgccttctggccatgcccttcttctctcccttgcacctgtacctcttggtctttgaataaagcctgagtaggaaggctagcaaaaaaaaaaaaaaaaaaaaaaaaaaaaaaaaaaaaaaaaaaaaaaaaaaaaaaaaaaaaaaaaaaaaaaaaaaaaaaaa

SEQ ID NO: 6698 - RNA, 5797 nt, synthetic construct
  source 1..5797: mol_type = other RNA
aggaaataagagagaaaagaagagtaagaagaaatataagagccaccatggcccctaagaagaagcgtaaagtgagccggatggaacgcctcgtctacgaggtgcggcagaagtgcagaaacatcgaggacatctgcatctcctgcggatctctgaacgtgaccctggagcacccactgttcatcggcggcatgtgccagaactgtaaaaactgttttctggagtgtgcctatcaatacgacgatgacggctaccagagctactgcaccatctgttgcggcggaagagaggtgctgatgtgtggaaataacaactgctgccggtgcttctgcgtggaatgcgtggacctgctggtgggccccggcgccgcccaggccgctattaaggaagatccttggaactgctacatgtgcggccacaagggcacatacggcctgctgagacggagagaggactggcctagcagactgcagatgttcttcgccaataaccacgaccaggagttcgacccccctaaggtgtaccctcccgtccccgccgagaagagaaagcccatccgggtcctgagcctgttcgatggcatcgccaccggtctgctggtgctgaaggacctgggcatccaggtggataggtacattgcctccgaggtgtgcgaggactccatcaccgtgggaatggtgcgtcatcagggcaagatcatgtacgtgggcgacgtgcggagcgtgacacagaagcatatccaggagtggggccctttcgacctggtgatcggcggcagcccttgcaatgacctgagcatcgtgaacccagcccggaagggcctgtacgagggaaccggcagactgttcttcgagttttacagactgctgcacgacgcccggcctaaggaaggcgacgaccggcccttcttttggctgttcgagaatgtggtggccatgggagtcagcgacaagcgggatattagccggttcctggagagcaaccccgtgatgatcgatgccaaggaagtgagcgccgcccaccgggccagatacttctggggcaatctgcctggcatgaacagacccctggccagcaccgtgaacgacaagctggagctgcaggagtgcctggagcacggccggatcgccaagttcagcaaggtgagaaccatcaccacccgaagcaacagcatcaaacaaggcaaggaccagcactttcctgtgttcatgaacgagaaggaggacatcctgtggtgtaccgagatggagagagtgttcgggttcccagtccactacacagatgtcagcaacatgtctagactggccagacagagactgctgggaagaagctggtccgtccctgtgatcagacacctgttcgcccctctgaaggagtacttcgcctgcgtgagcagcggcaacagcaacgccaacagccggggccccagcttctctagcggcctggtgccactgtccctgagagggagccacatgggccccatggagatctacaaaaccgtgagcgcctggaagcggcagcctgtgcgcgtgctgagcctgtttcggaatatcgataaagtcctgaaaagcctgggattcctggagagcggctctggctccggcggtggcaccctgaagtacgtggaggatgtgacaaacgtggtcagacgggatgtggagaagtggggccccttcgatctggtgtacggcagcacccaacccctgggcagctcttgtgaccggtgccctggctggtacatgtttcagttccaccggatcctgcagtacgccctgccgagacaggagtcccagcggccattcttttggattttcatggacaacttgctgctgaccgaggatgaccaggaaactaccactcggttcctgcagaccgaagccgtgaccctgcaggacgtgagaggccgggactaccagaacgccatgcgggtgtggtccaacatccctggactgaaaagcaagcacgcacctctgacccctaaagaagaggagtacctgcaggcccaggtgcggagcagaagcaagctggacgcccctaaggtggatctgctggtgaagaattgcctcctgcccctgagagagtacttcaagtatttcagccagaatagtctgcccctgggcggcccaagcagcggcgcccctcctcccagcggcggcagcccagccggctccccaacctctaccgaggagggcacctctgagtccgccacccccgagagcggccctggcacctccaccgagcccagcgagggcagcgcacccggcagccctgccggcagccccacctccacagaggagggaaccagcaccgagcccagcgaaggcagcgccccaggcaccagcaccgagcctagtgagggcggctctggcggcggcagcgcccaggagattaaacggatcaacaagatcagaagaagacttgtgaaagacagcaacaccaagaaggccggcaagacaggccccatgaaaaccctgctggttagagtgatgacacccgatctgagagagcggctggaaaacctgagaaagaagcctgaaaatatcccccagcccatcagcaatacatctagagccaacctgaataagctgctgaccgattacaccgaaatgaagaaggcgatcctgcatgtgtactgggaagagttccagaaggaccctgtgggcctgatgagccgggtggcccagcctgccagcaagaagatcgatcagaacaagctgaaacctgagatggacgagaagggcaacctgaccaccgccggctttgcctgctctcagtgtggccagcccctgttcgtgtacaagctggagcaggtgtctgagaagggcaaggcttacaccaactacttcggacggtgcaatgtggccgagcacgaaaagctgatcctgctggcccagctgaagcccgagaaggatagcgacgaagccgtgacatatagcctgggaaagtttgggcagagggccctggatttctacagcattcatgtgaccaaggagtccacccaccccgtgaagcccctggcccagatcgccggaaacagatacgcctccggacctgtgggaaaggccctgagcgacgcatgtatgggcacaatcgcctccttcctgtctaagtaccaggacatcatcatcgaacaccagaaggtggtgaagggcaaccagaagagactggagagcctgcgggagctggccggcaaggaaaacctggaataccctagcgtgaccctgccacctcagcctcacaccaaggagggcgttgatgcctacaacgaagtgatcgcccgggtgcgaatgtgggtgaacctgaacctgtggcagaagctgaagctaagcagagatgatgccaagcctctgctgagactgaagggattcccttcctttcctctggtcgagagacaggccaacgaagtggactggtgggacatggtgtgtaacgtgaagaagctgatcaacgagaaaaaggaggatggcaaggtgttttggcagaatctggctggctacaagagacaggaagccctgagaccatacctgagcagcgaggaagatcggaagaagggaaagaaattcgctcggtaccagctgggcgacctgctgctgcacctggaaaagaagcacggcgaggactggggaaaggtgtacgacgaggcctgggagcggattgacaagaaagtggaaggcctgagcaagcacatcaagctggaagaggaacggagaagcgaggacgcccagagcaaggccgccctgaccgactggctgcgggctaaggccagcttcgtgatcgagggcctgaaggaggccgacaaggacgagttctgcagatgcgagctgaagctgcagaagtggtacggggacctgcggggaaagcccttcgccatcgaagccgagaacagcatcctggacatcagcggcttcagcaagcagtacaactgtgccttcatctggcagaaggacggcgtgaagaagctgaacctgtacctgatcatcaactacttcaagggcggcaagctgcggttcaagaagatcaaacctgaagccttcgaagccaacagattctacaccgtgatcaacaaaaagagcggcgagatcgtgcccatggaggtgaacttcaacttcgacgaccccaacctgatcatcctgcctctggcctttggcaagagacagggcagagaattcatctggaacgacctgctgtccctggaaaccggcagcctgaagctggccaacggaagagtgatcgagaagacactgtacaacagaagaacccggcaggatgagcctgccctgttcgtggccctgaccttcgagcggcgggaggtcctggactcctccaatatcaaaccaatgaacctgatcggcgtggcaagaggcgaaaacatccccgccgtgatcgccctgaccgaccccgagggctgcccactgagccggtttaaggatagcctgggaaacccaacccacatcctgagaatcggcgagagctataaggagaagcagcggaccatccaggccaagaaggaggtggagcagcggagagccggcggctacagccggaagtacgccagcaaagccaagaatctggcagacgatatggtgagaaacaccgctagagatctgctgtactacgccgtgacccaggatgccatgctgatcttcgccaacctgagccggggcttcggccggcagggcaagcggaccttcatggccgagagacagtacacacggatggaggactggctgaccgccaagctggcctacgagggcctgagcaagacctacctgtccaagacactggcccagtacacctccaagacatgcagcaactgtgggtttaccatcaccagcgccgactacgacagggtgctggagaagctgaagaagacagcaacaggctggatgaccacaattaacggcaaggagctgaaggtggagggccagattacctactacaacagatacaagagacagaacgtagtcaaggacctgtccgtcgagctggatagactgagcgaagaatctgtgaacaacgacatctcctcctggacaaagggcagaagcggagaagctctgagcctcctgaagaaaagattctcccatagacccgtgcaggagaagttcgtgtgcctgaactgcggcttcgagacacacgcagccgagcaagccgccctgaacatcgccagatcctggctgttcctgcggagccaggagtacaagaaataccagacaaacaagacaaccggcaacaccgataagagagccttcgtcgagacctggcagtccttttaccggaagaagcttaaggaggtgtggaaacctgccgtgcggtctggcggatctggcggaggctccacaagcaccatgagctgcagcagggccggcggcatcaccggctgcatcaagtacagcaccgccagcgtggccttcagggacgtggccgtggacttcacccaggaggagtggaggctgctgagccccgcccagaggaccctgcacagggaggtgatgctggagacctacaaccacctggtgagcctggagatccccagcagcaagcccaagctgatcgcccagctggagaggggcgaggagccctggaggaccagccccaagaaaaagagaaaagtctaagctgccttctgcggggcttgccttctggccatgcccttcttctctcccttgcacctgtacctcttggtctttgaataaagcctgagtaggaaggctagcaaaaaaaaaaaaaaaaaaaaaaaaaaaaaaaaaaaaaaaaaaaaaaaaaaaaaaaaaaaaaaaaaaaaaaaaaaaaaaaa

SEQ ID NO: 6699 - RNA, 5797 nt, synthetic construct
  source 1..5797: mol_type = other RNA
aggaaataagagagaaaagaagagtaagaagaaatataagagccaccatggcccctaagaagaagcgtaaagtgagccggatggaacgcctcgtctacgaggtgcggcagaagtgcagaaacatcgaggacatctgcatctcctgcggatctctgaacgtgaccctggagcacccactgttcatcggcggcatgtgccagaactgtaaaaactgttttctggagtgtgcctatcaatacgacgatgacggctaccagagctactgcaccatctgttgcggcggaagagaggtgctgatgtgtggaaataacaactgctgccggtgcttctgcgtggaatgcgtggacctgctggtgggccccggcgccgcccaggccgctattaaggaagatccttggaactgctacatgtgcggccacaagggcacatacggcctgctgagacggagagaggactggcctagcagactgcagatgttcttcgccaataaccacgaccaggagttcgacccccctaaggtgtaccctcccgtccccgccgagaagagaaagcccatccgggtcctgagcctgttcgatggcatcgccaccggtctgctggtgctgaaggacctgggcatccaggtggataggtacattgcctccgaggtgtgcgaggactccatcaccgtgggaatggtgcgtcatcagggcaagatcatgtacgtgggcgacgtgcggagcgtgacacagaagcatatccaggagtggggccctttcgacctggtgatcggcggcagcccttgcaatgacctgagcatcgtgaacccagcccggaagggcctgtacgagggaaccggcagactgttcttcgagttttacagactgctgcacgacgcccggcctaaggaaggcgacgaccggcccttcttttggctgttcgagaatgtggtggccatgggagtcagcgacaagcgggatattagccggttcctggagagcaaccccgtgatgatcgatgccaaggaagtgagcgccgcccaccgggccagatacttctggggcaatctgcctggcatgaacagacccctggccagcaccgtgaacgacaagctggagctgcaggagtgcctggagcacggccggatcgccaagttcagcaaggtgagaaccatcaccacccgaagcaacagcatcaaacaaggcaaggaccagcactttcctgtgttcatgaacgagaaggaggacatcctgtggtgtaccgagatggagagagtgttcgggttcccagtccactacacagatgtcagcaacatgtctagactggccagacagagactgctgggaagaagctggtccgtccctgtgatcagacacctgttcgcccctctgaaggagtacttcgcctgcgtgagcagcggcaacagcaacgccaacagccggggccccagcttctctagcggcctggtgccactgtccctgagagggagccacatgggccccatggagatctacaaaaccgtgagcgcctggaagcggcagcctgtgcgcgtgctgagcctgtttcggaatatcgataaagtcctgaaaagcctgggattcctggagagcggctctggctccggcggtggcaccctgaagtacgtggaggatgtgacaaacgtggtcagacgggatgtggagaagtggggccccttcgatctggtgtacggcagcacccaacccctgggcagctcttgtgaccggtgccctggctggtacatgtttcagttccaccggatcctgcagtacgccctgccgagacaggagtcccagcggccattcttttggattttcatggacaacttgctgctgaccgaggatgaccaggaaactaccactcggttcctgcagaccgaagccgtgaccctgcaggacgtgagaggccgggactaccagaacgccatgcgggtgtggtccaacatccctggactgaaaagcaagcacgcacctctgacccctaaagaagaggagtacctgcaggcccaggtgcggagcagaagcaagctggacgcccctaaggtggatctgctggtgaagaattgcctcctgcccctgagagagtacttcaagtatttcagccagaatagtctgcccctgggcggcccaagcagcggcgcccctcctcccagcggcggcagcccagccggctccccaacctctaccgaggagggcacctctgagtccgccacccccgagagcggccctggcacctccaccgagcccagcgagggcagcgcacccggcagccctgccggcagccccacctccacagaggagggaaccagcaccgagcccagcgaaggcagcgccccaggcaccagcaccgagcctagtgagggcggctctggcggcggcagcgcccaggagattaaacggatcaacaagatcagaagaagacttgtgaaagacagcaacaccaagaaggccggcaagacaggccccatgaaaaccctgctggttagagtgatgacacccgatctgagagagcggctggaaaacctgagaaagaagcctgaaaatatcccccagcccatcagcaatacatctagagccaacctgaataagctgctgaccgattacaccgaaatgaagaaggcgatcctgcatgtgtactgggaagagttccagaaggaccctgtgggcctgatgagccgggtggcccagcctgccagcaagaagatcgatcagaacaagctgaaacctgagatggacgagaagggcaacctgaccaccgccggctttgcctgctctcagtgtggccagcccctgttcgtgtacaagctggagcaggtgtctgagaagggcaaggcttacaccaactacttcggacggtgcaatgtggccgagcacgaaaagctgatcctgctggcccagctgaagcccgagaaggatagcgacgaagccgtgacatatagcctgggaaagtttgggcagagggccctggatttctacagcattcatgtgaccaaggagtccacccaccccgtgaagcccctggcccagatcgccggaaacagatacgcctccggacctgtgggaaaggccctgagcgacgcatgtatgggcacaatcgcctccttcctgtctaagtaccaggacatcatcatcgaacaccagaaggtggtgaagggcaaccagaagagactggagagcctgcgggagctggccggcaaggaaaacctggaataccctagcgtgaccctgccacctcagcctcacaccaaggagggcgttgatgcctacaacgaagtgatcgcccgggtgcgaatgtgggtgaacctgaacctgtggcagaagctgaagctaagcagagatgatgccaagcctctgctgagactgaagggattcccttcctttcctctggtcgagagacaggccaacgaagtggactggtgggacatggtgtgtaacgtgaagaagctgatcaacgagaaaaaggaggatggcaaggtgttttggcagaatctggctggctacaagagacaggaagccctgagaccatacctgagcagcgaggaagatcggaagaagggaaagaaattcgctcggtaccagctgggcgacctgctgctgcacctggaaaagaagcacggcgaggactggggaaaggtgtacgacgaggcctgggagcggattgacaagaaagtggaaggcctgagcaagcacatcaagctggaagaggaacggagaagcgaggacgcccagagcaaggccgccctgaccgactggctgcgggctaaggccagcttcgtgatcgagggcctgaaggaggccgacaaggacgagttctgcagatgcgagctgaagctgcagaagtggtacggggacctgcggggaaagcccttcgccatcgaagccgagaacagcatcctggacatcagcggcttcagcaagcagtacaactgtgccttcatctggcagaaggacggcgtgaagaagctgaacctgtacctgatcatcaactacttcaagggcggcaagctgcggttcaagaagatcaaacctgaagccttcgaagccaacagattctacaccgtgatcaacaaaaagagcggcgagatcgtgcccatggaggtgaacttcaacttcgacgaccccaacctgatcatcctgcctctggcctttggcaagagacagggcagagaattcatctggaacgacctgctgtccctggaaaccggcagcctgaagctggccaacggaagagtgatcgagaagacactgtacaacagaagaacccggcaggatgagcctgccctgttcgtggccctgaccttcgagcggcgggaggtcctggactcctccaatatcaaaccaatgaacctgatcggcgtggcaagaggcgaaaacatccccgccgtgatcgccctgaccgaccccgagggctgcccactgagccggtttaaggatagcctgggaaacccaacccacatcctgagaatcggcgagagctataaggagaagcagcggaccatccaggccaagaaggaggtggagcagcggagagccggcggctacagccggaagtacgccagcaaagccaagaatctggcagacgatatggtgagaaacaccgctagagatctgctgtactacgccgtgacccaggatgccatgctgatcttcgccaacctgagccggggcttcggccggcagggcaagcggaccttcatggccgagagacagtacacacggatggaggactggctgaccgccaagctggcctacgagggcctgagcaagacctacctgtccaagacactggcccagtacacctccaagacatgcagcaactgtgggtttaccatcaccagcgccgactacgacagggtgctggagaagctgaagaagacagcaacaggctggatgaccacaattaacggcaaggagctgaaggtggagggccagattacctactacaacagatacaagagacagaacgtagtcaaggacctgtccgtcgagctggatagactgagcgaagaatctgtgaacaacgacatctcctcctggacaaagggcagaagcggagaagctctgagcctcctgaagaaaagattctcccatagacccgtgcaggagaagttcgtgtgcctgaactgcggcttcgagacacacgcagccgagcaagccgccctgaacatcgccagatcctggctgttcctgcggagccaggagtacaagaaataccagacaaacaagacaaccggcaacaccgataagagagccttcgtcgagacctggcagtccttttaccggaagaagcttaaggaggtgtggaaacctgccgtgcggtctggcggatctggcggaggctccacaagcgacatgggcctggtgagcttcgaggacgtggccgtggacttcacctggcaggagtggcaggagctggacgccgcccagaggaccctgtacagggacgtgatgctggagaactacagcagcctggtgagcctgggcaactgcctggacaagcccgagctgatcagcaagctggagcagggcctggtgccctggagcggcgccgaggccaccgagcagtaccagcccgacgtgcacaagtggagcaccagccccaagaaaaagagaaaagtctaagctgccttctgcggggcttgccttctggccatgcccttcttctctcccttgcacctgtacctcttggtctttgaataaagcctgagtaggaaggctagcaaaaaaaaaaaaaaaaaaaaaaaaaaaaaaaaaaaaaaaaaaaaaaaaaaaaaaaaaaaaaaaaaaaaaaaaaaaaaaaa

SEQ ID NO: 6700 - RNA, 5797 nt, synthetic construct
  source 1..5797: mol_type = other RNA
aggaaataagagagaaaagaagagtaagaagaaatataagagccaccatggcccctaagaagaagcgtaaagtgagccggatggaacgcctcgtctacgaggtgcggcagaagtgcagaaacatcgaggacatctgcatctcctgcggatctctgaacgtgaccctggagcacccactgttcatcggcggcatgtgccagaactgtaaaaactgttttctggagtgtgcctatcaatacgacgatgacggctaccagagctactgcaccatctgttgcggcggaagagaggtgctgatgtgtggaaataacaactgctgccggtgcttctgcgtggaatgcgtggacctgctggtgggccccggcgccgcccaggccgctattaaggaagatccttggaactgctacatgtgcggccacaagggcacatacggcctgctgagacggagagaggactggcctagcagactgcagatgttcttcgccaataaccacgaccaggagttcgacccccctaaggtgtaccctcccgtccccgccgagaagagaaagcccatccgggtcctgagcctgttcgatggcatcgccaccggtctgctggtgctgaaggacctgggcatccaggtggataggtacattgcctccgaggtgtgcgaggactccatcaccgtgggaatggtgcgtcatcagggcaagatcatgtacgtgggcgacgtgcggagcgtgacacagaagcatatccaggagtggggccctttcgacctggtgatcggcggcagcccttgcaatgacctgagcatcgtgaacccagcccggaagggcctgtacgagggaaccggcagactgttcttcgagttttacagactgctgcacgacgcccggcctaaggaaggcgacgaccggcccttcttttggctgttcgagaatgtggtggccatgggagtcagcgacaagcgggatattagccggttcctggagagcaaccccgtgatgatcgatgccaaggaagtgagcgccgcccaccgggccagatacttctggggcaatctgcctggcatgaacagacccctggccagcaccgtgaacgacaagctggagctgcaggagtgcctggagcacggccggatcgccaagttcagcaaggtgagaaccatcaccacccgaagcaacagcatcaaacaaggcaaggaccagcactttcctgtgttcatgaacgagaaggaggacatcctgtggtgtaccgagatggagagagtgttcgggttcccagtccactacacagatgtcagcaacatgtctagactggccagacagagactgctgggaagaagctggtccgtccctgtgatcagacacctgttcgcccctctgaaggagtacttcgcctgcgtgagcagcggcaacagcaacgccaacagccggggccccagcttctctagcggcctggtgccactgtccctgagagggagccacatgggccccatggagatctacaaaaccgtgagcgcctggaagcggcagcctgtgcgcgtgctgagcctgtttcggaatatcgataaagtcctgaaaagcctgggattcctggagagcggctctggctccggcggtggcaccctgaagtacgtggaggatgtgacaaacgtggtcagacgggatgtggagaagtggggccccttcgatctggtgtacggcagcacccaacccctgggcagctcttgtgaccggtgccctggctggtacatgtttcagttccaccggatcctgcagtacgccctgccgagacaggagtcccagcggccattcttttggattttcatggacaacttgctgctgaccgaggatgaccaggaaactaccactcggttcctgcagaccgaagccgtgaccctgcaggacgtgagaggccgggactaccagaacgccatgcgggtgtggtccaacatccctggactgaaaagcaagcacgcacctctgacccctaaagaagaggagtacctgcaggcccaggtgcggagcagaagcaagctggacgcccctaaggtggatctgctggtgaagaattgcctcctgcccctgagagagtacttcaagtatttcagccagaatagtctgcccctgggcggcccaagcagcggcgcccctcctcccagcggcggcagcccagccggctccccaacctctaccgaggagggcacctctgagtccgccacccccgagagcggccctggcacctccaccgagcccagcgagggcagcgcacccggcagccctgccggcagccccacctccacagaggagggaaccagcaccgagcccagcgaaggcagcgccccaggcaccagcaccgagcctagtgagggcggctctggcggcggcagcgcccaggagattaaacggatcaacaagatcagaagaagacttgtgaaagacagcaacaccaagaaggccggcaagacaggccccatgaaaaccctgctggttagagtgatgacacccgatctgagagagcggctggaaaacctgagaaagaagcctgaaaatatcccccagcccatcagcaatacatctagagccaacctgaataagctgctgaccgattacaccgaaatgaagaaggcgatcctgcatgtgtactgggaagagttccagaaggaccctgtgggcctgatgagccgggtggcccagcctgccagcaagaagatcgatcagaacaagctgaaacctgagatggacgagaagggcaacctgaccaccgccggctttgcctgctctcagtgtggccagcccctgttcgtgtacaagctggagcaggtgtctgagaagggcaaggcttacaccaactacttcggacggtgcaatgtggccgagcacgaaaagctgatcctgctggcccagctgaagcccgagaaggatagcgacgaagccgtgacatatagcctgggaaagtttgggcagagggccctggatttctacagcattcatgtgaccaaggagtccacccaccccgtgaagcccctggcccagatcgccggaaacagatacgcctccggacctgtgggaaaggccctgagcgacgcatgtatgggcacaatcgcctccttcctgtctaagtaccaggacatcatcatcgaacaccagaaggtggtgaagggcaaccagaagagactggagagcctgcgggagctggccggcaaggaaaacctggaataccctagcgtgaccctgccacctcagcctcacaccaaggagggcgttgatgcctacaacgaagtgatcgcccgggtgcgaatgtgggtgaacctgaacctgtggcagaagctgaagctaagcagagatgatgccaagcctctgctgagactgaagggattcccttcctttcctctggtcgagagacaggccaacgaagtggactggtgggacatggtgtgtaacgtgaagaagctgatcaacgagaaaaaggaggatggcaaggtgttttggcagaatctggctggctacaagagacaggaagccctgagaccatacctgagcagcgaggaagatcggaagaagggaaagaaattcgctcggtaccagctgggcgacctgctgctgcacctggaaaagaagcacggcgaggactggggaaaggtgtacgacgaggcctgggagcggattgacaagaaagtggaaggcctgagcaagcacatcaagctggaagaggaacggagaagcgaggacgcccagagcaaggccgccctgaccgactggctgcgggctaaggccagcttcgtgatcgagggcctgaaggaggccgacaaggacgagttctgcagatgcgagctgaagctgcagaagtggtacggggacctgcggggaaagcccttcgccatcgaagccgagaacagcatcctggacatcagcggcttcagcaagcagtacaactgtgccttcatctggcagaaggacggcgtgaagaagctgaacctgtacctgatcatcaactacttcaagggcggcaagctgcggttcaagaagatcaaacctgaagccttcgaagccaacagattctacaccgtgatcaacaaaaagagcggcgagatcgtgcccatggaggtgaacttcaacttcgacgaccccaacctgatcatcctgcctctggcctttggcaagagacagggcagagaattcatctggaacgacctgctgtccctggaaaccggcagcctgaagctggccaacggaagagtgatcgagaagacactgtacaacagaagaacccggcaggatgagcctgccctgttcgtggccctgaccttcgagcggcgggaggtcctggactcctccaatatcaaaccaatgaacctgatcggcgtggcaagaggcgaaaacatccccgccgtgatcgccctgaccgaccccgagggctgcccactgagccggtttaaggatagcctgggaaacccaacccacatcctgagaatcggcgagagctataaggagaagcagcggaccatccaggccaagaaggaggtggagcagcggagagccggcggctacagccggaagtacgccagcaaagccaagaatctggcagacgatatggtgagaaacaccgctagagatctgctgtactacgccgtgacccaggatgccatgctgatcttcgccaacctgagccggggcttcggccggcagggcaagcggaccttcatggccgagagacagtacacacggatggaggactggctgaccgccaagctggcctacgagggcctgagcaagacctacctgtccaagacactggcccagtacacctccaagacatgcagcaactgtgggtttaccatcaccagcgccgactacgacagggtgctggagaagctgaagaagacagcaacaggctggatgaccacaattaacggcaaggagctgaaggtggagggccagattacctactacaacagatacaagagacagaacgtagtcaaggacctgtccgtcgagctggatagactgagcgaagaatctgtgaacaacgacatctcctcctggacaaagggcagaagcggagaagctctgagcctcctgaagaaaagattctcccatagacccgtgcaggagaagttcgtgtgcctgaactgcggcttcgagacacacgcagccgagcaagccgccctgaacatcgccagatcctggctgttcctgcggagccaggagtacaagaaataccagacaaacaagacaaccggcaacaccgataagagagccttcgtcgagacctggcagtccttttaccggaagaagcttaaggaggtgtggaaacctgccgtgcggtctggcggatctggcggaggctccacaagcagccaggtgagcgtgaccttcgaggacgtggccgtgctgttcaccagggacgagtggaagaagctggaccacagccagaggagcctgtacagggaggtgatgctggagaactacagcaacctggccagcctgggcttccccttcgccaagcccgagatgatcagcgtgctgcagcagggcgaggagccctggaaggtggagaagaggagcctgggcttcagcctgggctgcaacagcagcctgaccagccccaagaaaaagagaaaagtctaagctgccttctgcggggcttgccttctggccatgcccttcttctctcccttgcacctgtacctcttggtctttgaataaagcctgagtaggaaggctagcaaaaaaaaaaaaaaaaaaaaaaaaaaaaaaaaaaaaaaaaaaaaaaaaaaaaaaaaaaaaaaaaaaaaaaaaaaaaaaaa

SEQ ID NO: 6701 - RNA, 5797 nt, synthetic construct
  source 1..5797: mol_type = other RNA
aggaaataagagagaaaagaagagtaagaagaaatataagagccaccatggcccctaagaagaagcgtaaagtgagccggatggaacgcctcgtctacgaggtgcggcagaagtgcagaaacatcgaggacatctgcatctcctgcggatctctgaacgtgaccctggagcacccactgttcatcggcggcatgtgccagaactgtaaaaactgttttctggagtgtgcctatcaatacgacgatgacggctaccagagctactgcaccatctgttgcggcggaagagaggtgctgatgtgtggaaataacaactgctgccggtgcttctgcgtggaatgcgtggacctgctggtgggccccggcgccgcccaggccgctattaaggaagatccttggaactgctacatgtgcggccacaagggcacatacggcctgctgagacggagagaggactggcctagcagactgcagatgttcttcgccaataaccacgaccaggagttcgacccccctaaggtgtaccctcccgtccccgccgagaagagaaagcccatccgggtcctgagcctgttcgatggcatcgccaccggtctgctggtgctgaaggacctgggcatccaggtggataggtacattgcctccgaggtgtgcgaggactccatcaccgtgggaatggtgcgtcatcagggcaagatcatgtacgtgggcgacgtgcggagcgtgacacagaagcatatccaggagtggggccctttcgacctggtgatcggcggcagcccttgcaatgacctgagcatcgtgaacccagcccggaagggcctgtacgagggaaccggcagactgttcttcgagttttacagactgctgcacgacgcccggcctaaggaaggcgacgaccggcccttcttttggctgttcgagaatgtggtggccatgggagtcagcgacaagcgggatattagccggttcctggagagcaaccccgtgatgatcgatgccaaggaagtgagcgccgcccaccgggccagatacttctggggcaatctgcctggcatgaacagacccctggccagcaccgtgaacgacaagctggagctgcaggagtgcctggagcacggccggatcgccaagttcagcaaggtgagaaccatcaccacccgaagcaacagcatcaaacaaggcaaggaccagcactttcctgtgttcatgaacgagaaggaggacatcctgtggtgtaccgagatggagagagtgttcgggttcccagtccactacacagatgtcagcaacatgtctagactggccagacagagactgctgggaagaagctggtccgtccctgtgatcagacacctgttcgcccctctgaaggagtacttcgcctgcgtgagcagcggcaacagcaacgccaacagccggggccccagcttctctagcggcctggtgccactgtccctgagagggagccacatgggccccatggagatctacaaaaccgtgagcgcctggaagcggcagcctgtgcgcgtgctgagcctgtttcggaatatcgataaagtcctgaaaagcctgggattcctggagagcggctctggctccggcggtggcaccctgaagtacgtggaggatgtgacaaacgtggtcagacgggatgtggagaagtggggccccttcgatctggtgtacggcagcacccaacccctgggcagctcttgtgaccggtgccctggctggtacatgtttcagttccaccggatcctgcagtacgccctgccgagacaggagtcccagcggccattcttttggattttcatggacaacttgctgctgaccgaggatgaccaggaaactaccactcggttcctgcagaccgaagccgtgaccctgcaggacgtgagaggccgggactaccagaacgccatgcgggtgtggtccaacatccctggactgaaaagcaagcacgcacctctgacccctaaagaagaggagtacctgcaggcccaggtgcggagcagaagcaagctggacgcccctaaggtggatctgctggtgaagaattgcctcctgcccctgagagagtacttcaagtatttcagccagaatagtctgcccctgggcggcccaagcagcggcgcccctcctcccagcggcggcagcccagccggctccccaacctctaccgaggagggcacctctgagtccgccacccccgagagcggccctggcacctccaccgagcccagcgagggcagcgcacccggcagccctgccggcagccccacctccacagaggagggaaccagcaccgagcccagcgaaggcagcgccccaggcaccagcaccgagcctagtgagggcggctctggcggcggcagcgcccaggagattaaacggatcaacaagatcagaagaagacttgtgaaagacagcaacaccaagaaggccggcaagacaggccccatgaaaaccctgctggttagagtgatgacacccgatctgagagagcggctggaaaacctgagaaagaagcctgaaaatatcccccagcccatcagcaatacatctagagccaacctgaataagctgctgaccgattacaccgaaatgaagaaggcgatcctgcatgtgtactgggaagagttccagaaggaccctgtgggcctgatgagccgggtggcccagcctgccagcaagaagatcgatcagaacaagctgaaacctgagatggacgagaagggcaacctgaccaccgccggctttgcctgctctcagtgtggccagcccctgttcgtgtacaagctggagcaggtgtctgagaagggcaaggcttacaccaactacttcggacggtgcaatgtggccgagcacgaaaagctgatcctgctggcccagctgaagcccgagaaggatagcgacgaagccgtgacatatagcctgggaaagtttgggcagagggccctggatttctacagcattcatgtgaccaaggagtccacccaccccgtgaagcccctggcccagatcgccggaaacagatacgcctccggacctgtgggaaaggccctgagcgacgcatgtatgggcacaatcgcctccttcctgtctaagtaccaggacatcatcatcgaacaccagaaggtggtgaagggcaaccagaagagactggagagcctgcgggagctggccggcaaggaaaacctggaataccctagcgtgaccctgccacctcagcctcacaccaaggagggcgttgatgcctacaacgaagtgatcgcccgggtgcgaatgtgggtgaacctgaacctgtggcagaagctgaagctaagcagagatgatgccaagcctctgctgagactgaagggattcccttcctttcctctggtcgagagacaggccaacgaagtggactggtgggacatggtgtgtaacgtgaagaagctgatcaacgagaaaaaggaggatggcaaggtgttttggcagaatctggctggctacaagagacaggaagccctgagaccatacctgagcagcgaggaagatcggaagaagggaaagaaattcgctcggtaccagctgggcgacctgctgctgcacctggaaaagaagcacggcgaggactggggaaaggtgtacgacgaggcctgggagcggattgacaagaaagtggaaggcctgagcaagcacatcaagctggaagaggaacggagaagcgaggacgcccagagcaaggccgccctgaccgactggctgcgggctaaggccagcttcgtgatcgagggcctgaaggaggccgacaaggacgagttctgcagatgcgagctgaagctgcagaagtggtacggggacctgcggggaaagcccttcgccatcgaagccgagaacagcatcctggacatcagcggcttcagcaagcagtacaactgtgccttcatctggcagaaggacggcgtgaagaagctgaacctgtacctgatcatcaactacttcaagggcggcaagctgcggttcaagaagatcaaacctgaagccttcgaagccaacagattctacaccgtgatcaacaaaaagagcggcgagatcgtgcccatggaggtgaacttcaacttcgacgaccccaacctgatcatcctgcctctggcctttggcaagagacagggcagagaattcatctggaacgacctgctgtccctggaaaccggcagcctgaagctggccaacggaagagtgatcgagaagacactgtacaacagaagaacccggcaggatgagcctgccctgttcgtggccctgaccttcgagcggcgggaggtcctggactcctccaatatcaaaccaatgaacctgatcggcgtggcaagaggcgaaaacatccccgccgtgatcgccctgaccgaccccgagggctgcccactgagccggtttaaggatagcctgggaaacccaacccacatcctgagaatcggcgagagctataaggagaagcagcggaccatccaggccaagaaggaggtggagcagcggagagccggcggctacagccggaagtacgccagcaaagccaagaatctggcagacgatatggtgagaaacaccgctagagatctgctgtactacgccgtgacccaggatgccatgctgatcttcgccaacctgagccggggcttcggccggcagggcaagcggaccttcatggccgagagacagtacacacggatggaggactggctgaccgccaagctggcctacgagggcctgagcaagacctacctgtccaagacactggcccagtacacctccaagacatgcagcaactgtgggtttaccatcaccagcgccgactacgacagggtgctggagaagctgaagaagacagcaacaggctggatgaccacaattaacggcaaggagctgaaggtggagggccagattacctactacaacagatacaagagacagaacgtagtcaaggacctgtccgtcgagctggatagactgagcgaagaatctgtgaacaacgacatctcctcctggacaaagggcagaagcggagaagctctgagcctcctgaagaaaagattctcccatagacccgtgcaggagaagttcgtgtgcctgaactgcggcttcgagacacacgcagccgagcaagccgccctgaacatcgccagatcctggctgttcctgcggagccaggagtacaagaaataccagacaaacaagacaaccggcaacaccgataagagagccttcgtcgagacctggcagtccttttaccggaagaagcttaaggaggtgtggaaacctgccgtgcggtctggcggatctggcggaggctccacaagccaggaggaccccgtgaccttccaggacgtggccgtggtgttcacccaggagcagtggggctacctggaccccagccagaaggagctgtacagggacgtgatgctggagaactaccagaacctgctgtgcctgggcctggccgtgagcaagcccgaggtgatctgccagctggagcagggcgaggccccctggaggcccgagggcagggtgcccggcagcagccaccccgacggcgaggtgaggaccagccccaagaaaaagagaaaagtctaagctgccttctgcggggcttgccttctggccatgcccttcttctctcccttgcacctgtacctcttggtctttgaataaagcctgagtaggaaggctagcaaaaaaaaaaaaaaaaaaaaaaaaaaaaaaaaaaaaaaaaaaaaaaaaaaaaaaaaaaaaaaaaaaaaaaaaaaaaaaaa

SEQ ID NO: 6702 - RNA, 5797 nt, synthetic construct
  source 1..5797: mol_type = other RNA
aggaaataagagagaaaagaagagtaagaagaaatataagagccaccatggcccctaagaagaagcgtaaagtgagccggatggaacgcctcgtctacgaggtgcggcagaagtgcagaaacatcgaggacatctgcatctcctgcggatctctgaacgtgaccctggagcacccactgttcatcggcggcatgtgccagaactgtaaaaactgttttctggagtgtgcctatcaatacgacgatgacggctaccagagctactgcaccatctgttgcggcggaagagaggtgctgatgtgtggaaataacaactgctgccggtgcttctgcgtggaatgcgtggacctgctggtgggccccggcgccgcccaggccgctattaaggaagatccttggaactgctacatgtgcggccacaagggcacatacggcctgctgagacggagagaggactggcctagcagactgcagatgttcttcgccaataaccacgaccaggagttcgacccccctaaggtgtaccctcccgtccccgccgagaagagaaagcccatccgggtcctgagcctgttcgatggcatcgccaccggtctgctggtgctgaaggacctgggcatccaggtggataggtacattgcctccgaggtgtgcgaggactccatcaccgtgggaatggtgcgtcatcagggcaagatcatgtacgtgggcgacgtgcggagcgtgacacagaagcatatccaggagtggggccctttcgacctggtgatcggcggcagcccttgcaatgacctgagcatcgtgaacccagcccggaagggcctgtacgagggaaccggcagactgttcttcgagttttacagactgctgcacgacgcccggcctaaggaaggcgacgaccggcccttcttttggctgttcgagaatgtggtggccatgggagtcagcgacaagcgggatattagccggttcctggagagcaaccccgtgatgatcgatgccaaggaagtgagcgccgcccaccgggccagatacttctggggcaatctgcctggcatgaacagacccctggccagcaccgtgaacgacaagctggagctgcaggagtgcctggagcacggccggatcgccaagttcagcaaggtgagaaccatcaccacccgaagcaacagcatcaaacaaggcaaggaccagcactttcctgtgttcatgaacgagaaggaggacatcctgtggtgtaccgagatggagagagtgttcgggttcccagtccactacacagatgtcagcaacatgtctagactggccagacagagactgctgggaagaagctggtccgtccctgtgatcagacacctgttcgcccctctgaaggagtacttcgcctgcgtgagcagcggcaacagcaacgccaacagccggggccccagcttctctagcggcctggtgccactgtccctgagagggagccacatgggccccatggagatctacaaaaccgtgagcgcctggaagcggcagcctgtgcgcgtgctgagcctgtttcggaatatcgataaagtcctgaaaagcctgggattcctggagagcggctctggctccggcggtggcaccctgaagtacgtggaggatgtgacaaacgtggtcagacgggatgtggagaagtggggccccttcgatctggtgtacggcagcacccaacccctgggcagctcttgtgaccggtgccctggctggtacatgtttcagttccaccggatcctgcagtacgccctgccgagacaggagtcccagcggccattcttttggattttcatggacaacttgctgctgaccgaggatgaccaggaaactaccactcggttcctgcagaccgaagccgtgaccctgcaggacgtgagaggccgggactaccagaacgccatgcgggtgtggtccaacatccctggactgaaaagcaagcacgcacctctgacccctaaagaagaggagtacctgcaggcccaggtgcggagcagaagcaagctggacgcccctaaggtggatctgctggtgaagaattgcctcctgcccctgagagagtacttcaagtatttcagccagaatagtctgcccctgggcggcccaagcagcggcgcccctcctcccagcggcggcagcccagccggctccccaacctctaccgaggagggcacctctgagtccgccacccccgagagcggccctggcacctccaccgagcccagcgagggcagcgcacccggcagccctgccggcagccccacctccacagaggagggaaccagcaccgagcccagcgaaggcagcgccccaggcaccagcaccgagcctagtgagggcggctctggcggcggcagcgcccaggagattaaacggatcaacaagatcagaagaagacttgtgaaagacagcaacaccaagaaggccggcaagacaggccccatgaaaaccctgctggttagagtgatgacacccgatctgagagagcggctggaaaacctgagaaagaagcctgaaaatatcccccagcccatcagcaatacatctagagccaacctgaataagctgctgaccgattacaccgaaatgaagaaggcgatcctgcatgtgtactgggaagagttccagaaggaccctgtgggcctgatgagccgggtggcccagcctgccagcaagaagatcgatcagaacaagctgaaacctgagatggacgagaagggcaacctgaccaccgccggctttgcctgctctcagtgtggccagcccctgttcgtgtacaagctggagcaggtgtctgagaagggcaaggcttacaccaactacttcggacggtgcaatgtggccgagcacgaaaagctgatcctgctggcccagctgaagcccgagaaggatagcgacgaagccgtgacatatagcctgggaaagtttgggcagagggccctggatttctacagcattcatgtgaccaaggagtccacccaccccgtgaagcccctggcccagatcgccggaaacagatacgcctccggacctgtgggaaaggccctgagcgacgcatgtatgggcacaatcgcctccttcctgtctaagtaccaggacatcatcatcgaacaccagaaggtggtgaagggcaaccagaagagactggagagcctgcgggagctggccggcaaggaaaacctggaataccctagcgtgaccctgccacctcagcctcacaccaaggagggcgttgatgcctacaacgaagtgatcgcccgggtgcgaatgtgggtgaacctgaacctgtggcagaagctgaagctaagcagagatgatgccaagcctctgctgagactgaagggattcccttcctttcctctggtcgagagacaggccaacgaagtggactggtgggacatggtgtgtaacgtgaagaagctgatcaacgagaaaaaggaggatggcaaggtgttttggcagaatctggctggctacaagagacaggaagccctgagaccatacctgagcagcgaggaagatcggaagaagggaaagaaattcgctcggtaccagctgggcgacctgctgctgcacctggaaaagaagcacggcgaggactggggaaaggtgtacgacgaggcctgggagcggattgacaagaaagtggaaggcctgagcaagcacatcaagctggaagaggaacggagaagcgaggacgcccagagcaaggccgccctgaccgactggctgcgggctaaggccagcttcgtgatcgagggcctgaaggaggccgacaaggacgagttctgcagatgcgagctgaagctgcagaagtggtacggggacctgcggggaaagcccttcgccatcgaagccgagaacagcatcctggacatcagcggcttcagcaagcagtacaactgtgccttcatctggcagaaggacggcgtgaagaagctgaacctgtacctgatcatcaactacttcaagggcggcaagctgcggttcaagaagatcaaacctgaagccttcgaagccaacagattctacaccgtgatcaacaaaaagagcggcgagatcgtgcccatggaggtgaacttcaacttcgacgaccccaacctgatcatcctgcctctggcctttggcaagagacagggcagagaattcatctggaacgacctgctgtccctggaaaccggcagcctgaagctggccaacggaagagtgatcgagaagacactgtacaacagaagaacccggcaggatgagcctgccctgttcgtggccctgaccttcgagcggcgggaggtcctggactcctccaatatcaaaccaatgaacctgatcggcgtggcaagaggcgaaaacatccccgccgtgatcgccctgaccgaccccgagggctgcccactgagccggtttaaggatagcctgggaaacccaacccacatcctgagaatcggcgagagctataaggagaagcagcggaccatccaggccaagaaggaggtggagcagcggagagccggcggctacagccggaagtacgccagcaaagccaagaatctggcagacgatatggtgagaaacaccgctagagatctgctgtactacgccgtgacccaggatgccatgctgatcttcgccaacctgagccggggcttcggccggcagggcaagcggaccttcatggccgagagacagtacacacggatggaggactggctgaccgccaagctggcctacgagggcctgagcaagacctacctgtccaagacactggcccagtacacctccaagacatgcagcaactgtgggtttaccatcaccagcgccgactacgacagggtgctggagaagctgaagaagacagcaacaggctggatgaccacaattaacggcaaggagctgaaggtggagggccagattacctactacaacagatacaagagacagaacgtagtcaaggacctgtccgtcgagctggatagactgagcgaagaatctgtgaacaacgacatctcctcctggacaaagggcagaagcggagaagctctgagcctcctgaagaaaagattctcccatagacccgtgcaggagaagttcgtgtgcctgaactgcggcttcgagacacacgcagccgagcaagccgccctgaacatcgccagatcctggctgttcctgcggagccaggagtacaagaaataccagacaaacaagacaaccggcaacaccgataagagagccttcgtcgagacctggcagtccttttaccggaagaagcttaaggaggtgtggaaacctgccgtgcggtctggcggatctggcggaggctccacaagcatggacgccctgaccttcgacgacgtgcacgtgcacttcaccagggaggagtggagcctgctggaccccagccagaagaggctgtacaaggacgtgatgctggagatctacaagaacctgaccgccatcggctacaagtggaaggaccacaacgtgggcgagcacagccagaacgacaggaggtacggcaggcacgagaggagccccgccggcgagaaccacaacgagtacacccagtgcgacaccagccccaagaaaaagagaaaagtctaagctgccttctgcggggcttgccttctggccatgcccttcttctctcccttgcacctgtacctcttggtctttgaataaagcctgagtaggaaggctagcaaaaaaaaaaaaaaaaaaaaaaaaaaaaaaaaaaaaaaaaaaaaaaaaaaaaaaaaaaaaaaaaaaaaaaaaaaaaaaaa

SEQ ID NO: 6703 - RNA, 5797 nt, synthetic construct
  source 1..5797: mol_type = other RNA
aggaaataagagagaaaagaagagtaagaagaaatataagagccaccatggcccctaagaagaagcgtaaagtgagccggatggaacgcctcgtctacgaggtgcggcagaagtgcagaaacatcgaggacatctgcatctcctgcggatctctgaacgtgaccctggagcacccactgttcatcggcggcatgtgccagaactgtaaaaactgttttctggagtgtgcctatcaatacgacgatgacggctaccagagctactgcaccatctgttgcggcggaagagaggtgctgatgtgtggaaataacaactgctgccggtgcttctgcgtggaatgcgtggacctgctggtgggccccggcgccgcccaggccgctattaaggaagatccttggaactgctacatgtgcggccacaagggcacatacggcctgctgagacggagagaggactggcctagcagactgcagatgttcttcgccaataaccacgaccaggagttcgacccccctaaggtgtaccctcccgtccccgccgagaagagaaagcccatccgggtcctgagcctgttcgatggcatcgccaccggtctgctggtgctgaaggacctgggcatccaggtggataggtacattgcctccgaggtgtgcgaggactccatcaccgtgggaatggtgcgtcatcagggcaagatcatgtacgtgggcgacgtgcggagcgtgacacagaagcatatccaggagtggggccctttcgacctggtgatcggcggcagcccttgcaatgacctgagcatcgtgaacccagcccggaagggcctgtacgagggaaccggcagactgttcttcgagttttacagactgctgcacgacgcccggcctaaggaaggcgacgaccggcccttcttttggctgttcgagaatgtggtggccatgggagtcagcgacaagcgggatattagccggttcctggagagcaaccccgtgatgatcgatgccaaggaagtgagcgccgcccaccgggccagatacttctggggcaatctgcctggcatgaacagacccctggccagcaccgtgaacgacaagctggagctgcaggagtgcctggagcacggccggatcgccaagttcagcaaggtgagaaccatcaccacccgaagcaacagcatcaaacaaggcaaggaccagcactttcctgtgttcatgaacgagaaggaggacatcctgtggtgtaccgagatggagagagtgttcgggttcccagtccactacacagatgtcagcaacatgtctagactggccagacagagactgctgggaagaagctggtccgtccctgtgatcagacacctgttcgcccctctgaaggagtacttcgcctgcgtgagcagcggcaacagcaacgccaacagccggggccccagcttctctagcggcctggtgccactgtccctgagagggagccacatgggccccatggagatctacaaaaccgtgagcgcctggaagcggcagcctgtgcgcgtgctgagcctgtttcggaatatcgataaagtcctgaaaagcctgggattcctggagagcggctctggctccggcggtggcaccctgaagtacgtggaggatgtgacaaacgtggtcagacgggatgtggagaagtggggccccttcgatctggtgtacggcagcacccaacccctgggcagctcttgtgaccggtgccctggctggtacatgtttcagttccaccggatcctgcagtacgccctgccgagacaggagtcccagcggccattcttttggattttcatggacaacttgctgctgaccgaggatgaccaggaaactaccactcggttcctgcagaccgaagccgtgaccctgcaggacgtgagaggccgggactaccagaacgccatgcgggtgtggtccaacatccctggactgaaaagcaagcacgcacctctgacccctaaagaagaggagtacctgcaggcccaggtgcggagcagaagcaagctggacgcccctaaggtggatctgctggtgaagaattgcctcctgcccctgagagagtacttcaagtatttcagccagaatagtctgcccctgggcggcccaagcagcggcgcccctcctcccagcggcggcagcccagccggctccccaacctctaccgaggagggcacctctgagtccgccacccccgagagcggccctggcacctccaccgagcccagcgagggcagcgcacccggcagccctgccggcagccccacctccacagaggagggaaccagcaccgagcccagcgaaggcagcgccccaggcaccagcaccgagcctagtgagggcggctctggcggcggcagcgcccaggagattaaacggatcaacaagatcagaagaagacttgtgaaagacagcaacaccaagaaggccggcaagacaggccccatgaaaaccctgctggttagagtgatgacacccgatctgagagagcggctggaaaacctgagaaagaagcctgaaaatatcccccagcccatcagcaatacatctagagccaacctgaataagctgctgaccgattacaccgaaatgaagaaggcgatcctgcatgtgtactgggaagagttccagaaggaccctgtgggcctgatgagccgggtggcccagcctgccagcaagaagatcgatcagaacaagctgaaacctgagatggacgagaagggcaacctgaccaccgccggctttgcctgctctcagtgtggccagcccctgttcgtgtacaagctggagcaggtgtctgagaagggcaaggcttacaccaactacttcggacggtgcaatgtggccgagcacgaaaagctgatcctgctggcccagctgaagcccgagaaggatagcgacgaagccgtgacatatagcctgggaaagtttgggcagagggccctggatttctacagcattcatgtgaccaaggagtccacccaccccgtgaagcccctggcccagatcgccggaaacagatacgcctccggacctgtgggaaaggccctgagcgacgcatgtatgggcacaatcgcctccttcctgtctaagtaccaggacatcatcatcgaacaccagaaggtggtgaagggcaaccagaagagactggagagcctgcgggagctggccggcaaggaaaacctggaataccctagcgtgaccctgccacctcagcctcacaccaaggagggcgttgatgcctacaacgaagtgatcgcccgggtgcgaatgtgggtgaacctgaacctgtggcagaagctgaagctaagcagagatgatgccaagcctctgctgagactgaagggattcccttcctttcctctggtcgagagacaggccaacgaagtggactggtgggacatggtgtgtaacgtgaagaagctgatcaacgagaaaaaggaggatggcaaggtgttttggcagaatctggctggctacaagagacaggaagccctgagaccatacctgagcagcgaggaagatcggaagaagggaaagaaattcgctcggtaccagctgggcgacctgctgctgcacctggaaaagaagcacggcgaggactggggaaaggtgtacgacgaggcctgggagcggattgacaagaaagtggaaggcctgagcaagcacatcaagctggaagaggaacggagaagcgaggacgcccagagcaaggccgccctgaccgactggctgcgggctaaggccagcttcgtgatcgagggcctgaaggaggccgacaaggacgagttctgcagatgcgagctgaagctgcagaagtggtacggggacctgcggggaaagcccttcgccatcgaagccgagaacagcatcctggacatcagcggcttcagcaagcagtacaactgtgccttcatctggcagaaggacggcgtgaagaagctgaacctgtacctgatcatcaactacttcaagggcggcaagctgcggttcaagaagatcaaacctgaagccttcgaagccaacagattctacaccgtgatcaacaaaaagagcggcgagatcgtgcccatggaggtgaacttcaacttcgacgaccccaacctgatcatcctgcctctggcctttggcaagagacagggcagagaattcatctggaacgacctgctgtccctggaaaccggcagcctgaagctggccaacggaagagtgatcgagaagacactgtacaacagaagaacccggcaggatgagcctgccctgttcgtggccctgaccttcgagcggcgggaggtcctggactcctccaatatcaaaccaatgaacctgatcggcgtggcaagaggcgaaaacatccccgccgtgatcgccctgaccgaccccgagggctgcccactgagccggtttaaggatagcctgggaaacccaacccacatcctgagaatcggcgagagctataaggagaagcagcggaccatccaggccaagaaggaggtggagcagcggagagccggcggctacagccggaagtacgccagcaaagccaagaatctggcagacgatatggtgagaaacaccgctagagatctgctgtactacgccgtgacccaggatgccatgctgatcttcgccaacctgagccggggcttcggccggcagggcaagcggaccttcatggccgagagacagtacacacggatggaggactggctgaccgccaagctggcctacgagggcctgagcaagacctacctgtccaagacactggcccagtacacctccaagacatgcagcaactgtgggtttaccatcaccagcgccgactacgacagggtgctggagaagctgaagaagacagcaacaggctggatgaccacaattaacggcaaggagctgaaggtggagggccagattacctactacaacagatacaagagacagaacgtagtcaaggacctgtccgtcgagctggatagactgagcgaagaatctgtgaacaacgacatctcctcctggacaaagggcagaagcggagaagctctgagcctcctgaagaaaagattctcccatagacccgtgcaggagaagttcgtgtgcctgaactgcggcttcgagacacacgcagccgagcaagccgccctgaacatcgccagatcctggctgttcctgcggagccaggagtacaagaaataccagacaaacaagacaaccggcaacaccgataagagagccttcgtcgagacctggcagtccttttaccggaagaagcttaaggaggtgtggaaacctgccgtgcggtctggcggatctggcggaggctccacaagcagccaggagagcctgaccttcaaggacgtggccgtggacttcacccaggaggagtggggcaagctggacagcggccagaggtacctgtacagggacgtgatgctggagaactacaggaacctggtgagcctgggccaccagggcagcaagccctacgtgatcagccagctggagcagggccaggagccctggatcgtggagagggagatcagcaggggcaactgcaaggactggggcaccaggaccagccccaagaaaaagagaaaagtctaagctgccttctgcggggcttgccttctggccatgcccttcttctctcccttgcacctgtacctcttggtctttgaataaagcctgagtaggaaggctagcaaaaaaaaaaaaaaaaaaaaaaaaaaaaaaaaaaaaaaaaaaaaaaaaaaaaaaaaaaaaaaaaaaaaaaaaaaaaaaaa

SEQ ID NO: 6704 - RNA, 5797 nt, synthetic construct
  source 1..5797: mol_type = other RNA
aggaaataagagagaaaagaagagtaagaagaaatataagagccaccatggcccctaagaagaagcgtaaagtgagccggatggaacgcctcgtctacgaggtgcggcagaagtgcagaaacatcgaggacatctgcatctcctgcggatctctgaacgtgaccctggagcacccactgttcatcggcggcatgtgccagaactgtaaaaactgttttctggagtgtgcctatcaatacgacgatgacggctaccagagctactgcaccatctgttgcggcggaagagaggtgctgatgtgtggaaataacaactgctgccggtgcttctgcgtggaatgcgtggacctgctggtgggccccggcgccgcccaggccgctattaaggaagatccttggaactgctacatgtgcggccacaagggcacatacggcctgctgagacggagagaggactggcctagcagactgcagatgttcttcgccaataaccacgaccaggagttcgacccccctaaggtgtaccctcccgtccccgccgagaagagaaagcccatccgggtcctgagcctgttcgatggcatcgccaccggtctgctggtgctgaaggacctgggcatccaggtggataggtacattgcctccgaggtgtgcgaggactccatcaccgtgggaatggtgcgtcatcagggcaagatcatgtacgtgggcgacgtgcggagcgtgacacagaagcatatccaggagtggggccctttcgacctggtgatcggcggcagcccttgcaatgacctgagcatcgtgaacccagcccggaagggcctgtacgagggaaccggcagactgttcttcgagttttacagactgctgcacgacgcccggcctaaggaaggcgacgaccggcccttcttttggctgttcgagaatgtggtggccatgggagtcagcgacaagcgggatattagccggttcctggagagcaaccccgtgatgatcgatgccaaggaagtgagcgccgcccaccgggccagatacttctggggcaatctgcctggcatgaacagacccctggccagcaccgtgaacgacaagctggagctgcaggagtgcctggagcacggccggatcgccaagttcagcaaggtgagaaccatcaccacccgaagcaacagcatcaaacaaggcaaggaccagcactttcctgtgttcatgaacgagaaggaggacatcctgtggtgtaccgagatggagagagtgttcgggttcccagtccactacacagatgtcagcaacatgtctagactggccagacagagactgctgggaagaagctggtccgtccctgtgatcagacacctgttcgcccctctgaaggagtacttcgcctgcgtgagcagcggcaacagcaacgccaacagccggggccccagcttctctagcggcctggtgccactgtccctgagagggagccacatgggccccatggagatctacaaaaccgtgagcgcctggaagcggcagcctgtgcgcgtgctgagcctgtttcggaatatcgataaagtcctgaaaagcctgggattcctggagagcggctctggctccggcggtggcaccctgaagtacgtggaggatgtgacaaacgtggtcagacgggatgtggagaagtggggccccttcgatctggtgtacggcagcacccaacccctgggcagctcttgtgaccggtgccctggctggtacatgtttcagttccaccggatcctgcagtacgccctgccgagacaggagtcccagcggccattcttttggattttcatggacaacttgctgctgaccgaggatgaccaggaaactaccactcggttcctgcagaccgaagccgtgaccctgcaggacgtgagaggccgggactaccagaacgccatgcgggtgtggtccaacatccctggactgaaaagcaagcacgcacctctgacccctaaagaagaggagtacctgcaggcccaggtgcggagcagaagcaagctggacgcccctaaggtggatctgctggtgaagaattgcctcctgcccctgagagagtacttcaagtatttcagccagaatagtctgcccctgggcggcccaagcagcggcgcccctcctcccagcggcggcagcccagccggctccccaacctctaccgaggagggcacctctgagtccgccacccccgagagcggccctggcacctccaccgagcccagcgagggcagcgcacccggcagccctgccggcagccccacctccacagaggagggaaccagcaccgagcccagcgaaggcagcgccccaggcaccagcaccgagcctagtgagggcggctctggcggcggcagcgcccaggagattaaacggatcaacaagatcagaagaagacttgtgaaagacagcaacaccaagaaggccggcaagacaggccccatgaaaaccctgctggttagagtgatgacacccgatctgagagagcggctggaaaacctgagaaagaagcctgaaaatatcccccagcccatcagcaatacatctagagccaacctgaataagctgctgaccgattacaccgaaatgaagaaggcgatcctgcatgtgtactgggaagagttccagaaggaccctgtgggcctgatgagccgggtggcccagcctgccagcaagaagatcgatcagaacaagctgaaacctgagatggacgagaagggcaacctgaccaccgccggctttgcctgctctcagtgtggccagcccctgttcgtgtacaagctggagcaggtgtctgagaagggcaaggcttacaccaactacttcggacggtgcaatgtggccgagcacgaaaagctgatcctgctggcccagctgaagcccgagaaggatagcgacgaagccgtgacatatagcctgggaaagtttgggcagagggccctggatttctacagcattcatgtgaccaaggagtccacccaccccgtgaagcccctggcccagatcgccggaaacagatacgcctccggacctgtgggaaaggccctgagcgacgcatgtatgggcacaatcgcctccttcctgtctaagtaccaggacatcatcatcgaacaccagaaggtggtgaagggcaaccagaagagactggagagcctgcgggagctggccggcaaggaaaacctggaataccctagcgtgaccctgccacctcagcctcacaccaaggagggcgttgatgcctacaacgaagtgatcgcccgggtgcgaatgtgggtgaacctgaacctgtggcagaagctgaagctaagcagagatgatgccaagcctctgctgagactgaagggattcccttcctttcctctggtcgagagacaggccaacgaagtggactggtgggacatggtgtgtaacgtgaagaagctgatcaacgagaaaaaggaggatggcaaggtgttttggcagaatctggctggctacaagagacaggaagccctgagaccatacctgagcagcgaggaagatcggaagaagggaaagaaattcgctcggtaccagctgggcgacctgctgctgcacctggaaaagaagcacggcgaggactggggaaaggtgtacgacgaggcctgggagcggattgacaagaaagtggaaggcctgagcaagcacatcaagctggaagaggaacggagaagcgaggacgcccagagcaaggccgccctgaccgactggctgcgggctaaggccagcttcgtgatcgagggcctgaaggaggccgacaaggacgagttctgcagatgcgagctgaagctgcagaagtggtacggggacctgcggggaaagcccttcgccatcgaagccgagaacagcatcctggacatcagcggcttcagcaagcagtacaactgtgccttcatctggcagaaggacggcgtgaagaagctgaacctgtacctgatcatcaactacttcaagggcggcaagctgcggttcaagaagatcaaacctgaagccttcgaagccaacagattctacaccgtgatcaacaaaaagagcggcgagatcgtgcccatggaggtgaacttcaacttcgacgaccccaacctgatcatcctgcctctggcctttggcaagagacagggcagagaattcatctggaacgacctgctgtccctggaaaccggcagcctgaagctggccaacggaagagtgatcgagaagacactgtacaacagaagaacccggcaggatgagcctgccctgttcgtggccctgaccttcgagcggcgggaggtcctggactcctccaatatcaaaccaatgaacctgatcggcgtggcaagaggcgaaaacatccccgccgtgatcgccctgaccgaccccgagggctgcccactgagccggtttaaggatagcctgggaaacccaacccacatcctgagaatcggcgagagctataaggagaagcagcggaccatccaggccaagaaggaggtggagcagcggagagccggcggctacagccggaagtacgccagcaaagccaagaatctggcagacgatatggtgagaaacaccgctagagatctgctgtactacgccgtgacccaggatgccatgctgatcttcgccaacctgagccggggcttcggccggcagggcaagcggaccttcatggccgagagacagtacacacggatggaggactggctgaccgccaagctggcctacgagggcctgagcaagacctacctgtccaagacactggcccagtacacctccaagacatgcagcaactgtgggtttaccatcaccagcgccgactacgacagggtgctggagaagctgaagaagacagcaacaggctggatgaccacaattaacggcaaggagctgaaggtggagggccagattacctactacaacagatacaagagacagaacgtagtcaaggacctgtccgtcgagctggatagactgagcgaagaatctgtgaacaacgacatctcctcctggacaaagggcagaagcggagaagctctgagcctcctgaagaaaagattctcccatagacccgtgcaggagaagttcgtgtgcctgaactgcggcttcgagacacacgcagccgagcaagccgccctgaacatcgccagatcctggctgttcctgcggagccaggagtacaagaaataccagacaaacaagacaaccggcaacaccgataagagagccttcgtcgagacctggcagtccttttaccggaagaagcttaaggaggtgtggaaacctgccgtgcggtctggcggatctggcggaggctccacaagcctgcagggcctgctgaccttcagggacgtggccatcgagttcagccaggacgagtggggctgcctgaaccagagccagagggagctgtacagggacgtgatgctggagacctacggccacctgctgttcctgggcctgatcgtgagcaagccccacctggtgatcttcctggagcagaagagggagctgtgggacgtgaagaggaagaagaccgtgaggacccagaagggcgagaacaccagcaccagccccaagaaaaagagaaaagtctaagctgccttctgcggggcttgccttctggccatgcccttcttctctcccttgcacctgtacctcttggtctttgaataaagcctgagtaggaaggctagcaaaaaaaaaaaaaaaaaaaaaaaaaaaaaaaaaaaaaaaaaaaaaaaaaaaaaaaaaaaaaaaaaaaaaaaaaaaaaaaa

SEQ ID NO: 6705 - RNA, 5797 nt, synthetic construct
  source 1..5797: mol_type = other RNA
aggaaataagagagaaaagaagagtaagaagaaatataagagccaccatggcccctaagaagaagcgtaaagtgagccggatggaacgcctcgtctacgaggtgcggcagaagtgcagaaacatcgaggacatctgcatctcctgcggatctctgaacgtgaccctggagcacccactgttcatcggcggcatgtgccagaactgtaaaaactgttttctggagtgtgcctatcaatacgacgatgacggctaccagagctactgcaccatctgttgcggcggaagagaggtgctgatgtgtggaaataacaactgctgccggtgcttctgcgtggaatgcgtggacctgctggtgggccccggcgccgcccaggccgctattaaggaagatccttggaactgctacatgtgcggccacaagggcacatacggcctgctgagacggagagaggactggcctagcagactgcagatgttcttcgccaataaccacgaccaggagttcgacccccctaaggtgtaccctcccgtccccgccgagaagagaaagcccatccgggtcctgagcctgttcgatggcatcgccaccggtctgctggtgctgaaggacctgggcatccaggtggataggtacattgcctccgaggtgtgcgaggactccatcaccgtgggaatggtgcgtcatcagggcaagatcatgtacgtgggcgacgtgcggagcgtgacacagaagcatatccaggagtggggccctttcgacctggtgatcggcggcagcccttgcaatgacctgagcatcgtgaacccagcccggaagggcctgtacgagggaaccggcagactgttcttcgagttttacagactgctgcacgacgcccggcctaaggaaggcgacgaccggcccttcttttggctgttcgagaatgtggtggccatgggagtcagcgacaagcgggatattagccggttcctggagagcaaccccgtgatgatcgatgccaaggaagtgagcgccgcccaccgggccagatacttctggggcaatctgcctggcatgaacagacccctggccagcaccgtgaacgacaagctggagctgcaggagtgcctggagcacggccggatcgccaagttcagcaaggtgagaaccatcaccacccgaagcaacagcatcaaacaaggcaaggaccagcactttcctgtgttcatgaacgagaaggaggacatcctgtggtgtaccgagatggagagagtgttcgggttcccagtccactacacagatgtcagcaacatgtctagactggccagacagagactgctgggaagaagctggtccgtccctgtgatcagacacctgttcgcccctctgaaggagtacttcgcctgcgtgagcagcggcaacagcaacgccaacagccggggccccagcttctctagcggcctggtgccactgtccctgagagggagccacatgggccccatggagatctacaaaaccgtgagcgcctggaagcggcagcctgtgcgcgtgctgagcctgtttcggaatatcgataaagtcctgaaaagcctgggattcctggagagcggctctggctccggcggtggcaccctgaagtacgtggaggatgtgacaaacgtggtcagacgggatgtggagaagtggggccccttcgatctggtgtacggcagcacccaacccctgggcagctcttgtgaccggtgccctggctggtacatgtttcagttccaccggatcctgcagtacgccctgccgagacaggagtcccagcggccattcttttggattttcatggacaacttgctgctgaccgaggatgaccaggaaactaccactcggttcctgcagaccgaagccgtgaccctgcaggacgtgagaggccgggactaccagaacgccatgcgggtgtggtccaacatccctggactgaaaagcaagcacgcacctctgacccctaaagaagaggagtacctgcaggcccaggtgcggagcagaagcaagctggacgcccctaaggtggatctgctggtgaagaattgcctcctgcccctgagagagtacttcaagtatttcagccagaatagtctgcccctgggcggcccaagcagcggcgcccctcctcccagcggcggcagcccagccggctccccaacctctaccgaggagggcacctctgagtccgccacccccgagagcggccctggcacctccaccgagcccagcgagggcagcgcacccggcagccctgccggcagccccacctccacagaggagggaaccagcaccgagcccagcgaaggcagcgccccaggcaccagcaccgagcctagtgagggcggctctggcggcggcagcgcccaggagattaaacggatcaacaagatcagaagaagacttgtgaaagacagcaacaccaagaaggccggcaagacaggccccatgaaaaccctgctggttagagtgatgacacccgatctgagagagcggctggaaaacctgagaaagaagcctgaaaatatcccccagcccatcagcaatacatctagagccaacctgaataagctgctgaccgattacaccgaaatgaagaaggcgatcctgcatgtgtactgggaagagttccagaaggaccctgtgggcctgatgagccgggtggcccagcctgccagcaagaagatcgatcagaacaagctgaaacctgagatggacgagaagggcaacctgaccaccgccggctttgcctgctctcagtgtggccagcccctgttcgtgtacaagctggagcaggtgtctgagaagggcaaggcttacaccaactacttcggacggtgcaatgtggccgagcacgaaaagctgatcctgctggcccagctgaagcccgagaaggatagcgacgaagccgtgacatatagcctgggaaagtttgggcagagggccctggatttctacagcattcatgtgaccaaggagtccacccaccccgtgaagcccctggcccagatcgccggaaacagatacgcctccggacctgtgggaaaggccctgagcgacgcatgtatgggcacaatcgcctccttcctgtctaagtaccaggacatcatcatcgaacaccagaaggtggtgaagggcaaccagaagagactggagagcctgcgggagctggccggcaaggaaaacctggaataccctagcgtgaccctgccacctcagcctcacaccaaggagggcgttgatgcctacaacgaagtgatcgcccgggtgcgaatgtgggtgaacctgaacctgtggcagaagctgaagctaagcagagatgatgccaagcctctgctgagactgaagggattcccttcctttcctctggtcgagagacaggccaacgaagtggactggtgggacatggtgtgtaacgtgaagaagctgatcaacgagaaaaaggaggatggcaaggtgttttggcagaatctggctggctacaagagacaggaagccctgagaccatacctgagcagcgaggaagatcggaagaagggaaagaaattcgctcggtaccagctgggcgacctgctgctgcacctggaaaagaagcacggcgaggactggggaaaggtgtacgacgaggcctgggagcggattgacaagaaagtggaaggcctgagcaagcacatcaagctggaagaggaacggagaagcgaggacgcccagagcaaggccgccctgaccgactggctgcgggctaaggccagcttcgtgatcgagggcctgaaggaggccgacaaggacgagttctgcagatgcgagctgaagctgcagaagtggtacggggacctgcggggaaagcccttcgccatcgaagccgagaacagcatcctggacatcagcggcttcagcaagcagtacaactgtgccttcatctggcagaaggacggcgtgaagaagctgaacctgtacctgatcatcaactacttcaagggcggcaagctgcggttcaagaagatcaaacctgaagccttcgaagccaacagattctacaccgtgatcaacaaaaagagcggcgagatcgtgcccatggaggtgaacttcaacttcgacgaccccaacctgatcatcctgcctctggcctttggcaagagacagggcagagaattcatctggaacgacctgctgtccctggaaaccggcagcctgaagctggccaacggaagagtgatcgagaagacactgtacaacagaagaacccggcaggatgagcctgccctgttcgtggccctgaccttcgagcggcgggaggtcctggactcctccaatatcaaaccaatgaacctgatcggcgtggcaagaggcgaaaacatccccgccgtgatcgccctgaccgaccccgagggctgcccactgagccggtttaaggatagcctgggaaacccaacccacatcctgagaatcggcgagagctataaggagaagcagcggaccatccaggccaagaaggaggtggagcagcggagagccggcggctacagccggaagtacgccagcaaagccaagaatctggcagacgatatggtgagaaacaccgctagagatctgctgtactacgccgtgacccaggatgccatgctgatcttcgccaacctgagccggggcttcggccggcagggcaagcggaccttcatggccgagagacagtacacacggatggaggactggctgaccgccaagctggcctacgagggcctgagcaagacctacctgtccaagacactggcccagtacacctccaagacatgcagcaactgtgggtttaccatcaccagcgccgactacgacagggtgctggagaagctgaagaagacagcaacaggctggatgaccacaattaacggcaaggagctgaaggtggagggccagattacctactacaacagatacaagagacagaacgtagtcaaggacctgtccgtcgagctggatagactgagcgaagaatctgtgaacaacgacatctcctcctggacaaagggcagaagcggagaagctctgagcctcctgaagaaaagattctcccatagacccgtgcaggagaagttcgtgtgcctgaactgcggcttcgagacacacgcagccgagcaagccgccctgaacatcgccagatcctggctgttcctgcggagccaggagtacaagaaataccagacaaacaagacaaccggcaacaccgataagagagccttcgtcgagacctggcagtccttttaccggaagaagcttaaggaggtgtggaaacctgccgtgcggtctggcggatctggcggaggctccacaagcgccctggagagcgtgaccttccaggacgtggccgtgaacttcacccacgaggagtggggccacctgaagcccgcccagaaggacctgtacagggaggtgatgatggagaactaccagaacttcgtgagcctgggcctgcccttcagcaagccccacgtgatcagccagctggagaagggcgaggccccctggatcaccgagaaggccagcctggtgcccagggtgagctgccaggacttcttcaccagccccaagaaaaagagaaaagtctaagctgccttctgcggggcttgccttctggccatgcccttcttctctcccttgcacctgtacctcttggtctttgaataaagcctgagtaggaaggctagcaaaaaaaaaaaaaaaaaaaaaaaaaaaaaaaaaaaaaaaaaaaaaaaaaaaaaaaaaaaaaaaaaaaaaaaaaaaaaaaa

SEQ ID NO: 6706 - RNA, 5797 nt, synthetic construct
  source 1..5797: mol_type = other RNA
aggaaataagagagaaaagaagagtaagaagaaatataagagccaccatggcccctaagaagaagcgtaaagtgagccggatggaacgcctcgtctacgaggtgcggcagaagtgcagaaacatcgaggacatctgcatctcctgcggatctctgaacgtgaccctggagcacccactgttcatcggcggcatgtgccagaactgtaaaaactgttttctggagtgtgcctatcaatacgacgatgacggctaccagagctactgcaccatctgttgcggcggaagagaggtgctgatgtgtggaaataacaactgctgccggtgcttctgcgtggaatgcgtggacctgctggtgggccccggcgccgcccaggccgctattaaggaagatccttggaactgctacatgtgcggccacaagggcacatacggcctgctgagacggagagaggactggcctagcagactgcagatgttcttcgccaataaccacgaccaggagttcgacccccctaaggtgtaccctcccgtccccgccgagaagagaaagcccatccgggtcctgagcctgttcgatggcatcgccaccggtctgctggtgctgaaggacctgggcatccaggtggataggtacattgcctccgaggtgtgcgaggactccatcaccgtgggaatggtgcgtcatcagggcaagatcatgtacgtgggcgacgtgcggagcgtgacacagaagcatatccaggagtggggccctttcgacctggtgatcggcggcagcccttgcaatgacctgagcatcgtgaacccagcccggaagggcctgtacgagggaaccggcagactgttcttcgagttttacagactgctgcacgacgcccggcctaaggaaggcgacgaccggcccttcttttggctgttcgagaatgtggtggccatgggagtcagcgacaagcgggatattagccggttcctggagagcaaccccgtgatgatcgatgccaaggaagtgagcgccgcccaccgggccagatacttctggggcaatctgcctggcatgaacagacccctggccagcaccgtgaacgacaagctggagctgcaggagtgcctggagcacggccggatcgccaagttcagcaaggtgagaaccatcaccacccgaagcaacagcatcaaacaaggcaaggaccagcactttcctgtgttcatgaacgagaaggaggacatcctgtggtgtaccgagatggagagagtgttcgggttcccagtccactacacagatgtcagcaacatgtctagactggccagacagagactgctgggaagaagctggtccgtccctgtgatcagacacctgttcgcccctctgaaggagtacttcgcctgcgtgagcagcggcaacagcaacgccaacagccggggccccagcttctctagcggcctggtgccactgtccctgagagggagccacatgggccccatggagatctacaaaaccgtgagcgcctggaagcggcagcctgtgcgcgtgctgagcctgtttcggaatatcgataaagtcctgaaaagcctgggattcctggagagcggctctggctccggcggtggcaccctgaagtacgtggaggatgtgacaaacgtggtcagacgggatgtggagaagtggggccccttcgatctggtgtacggcagcacccaacccctgggcagctcttgtgaccggtgccctggctggtacatgtttcagttccaccggatcctgcagtacgccctgccgagacaggagtcccagcggccattcttttggattttcatggacaacttgctgctgaccgaggatgaccaggaaactaccactcggttcctgcagaccgaagccgtgaccctgcaggacgtgagaggccgggactaccagaacgccatgcgggtgtggtccaacatccctggactgaaaagcaagcacgcacctctgacccctaaagaagaggagtacctgcaggcccaggtgcggagcagaagcaagctggacgcccctaaggtggatctgctggtgaagaattgcctcctgcccctgagagagtacttcaagtatttcagccagaatagtctgcccctgggcggcccaagcagcggcgcccctcctcccagcggcggcagcccagccggctccccaacctctaccgaggagggcacctctgagtccgccacccccgagagcggccctggcacctccaccgagcccagcgagggcagcgcacccggcagccctgccggcagccccacctccacagaggagggaaccagcaccgagcccagcgaaggcagcgccccaggcaccagcaccgagcctagtgagggcggctctggcggcggcagcgcccaggagattaaacggatcaacaagatcagaagaagacttgtgaaagacagcaacaccaagaaggccggcaagacaggccccatgaaaaccctgctggttagagtgatgacacccgatctgagagagcggctggaaaacctgagaaagaagcctgaaaatatcccccagcccatcagcaatacatctagagccaacctgaataagctgctgaccgattacaccgaaatgaagaaggcgatcctgcatgtgtactgggaagagttccagaaggaccctgtgggcctgatgagccgggtggcccagcctgccagcaagaagatcgatcagaacaagctgaaacctgagatggacgagaagggcaacctgaccaccgccggctttgcctgctctcagtgtggccagcccctgttcgtgtacaagctggagcaggtgtctgagaagggcaaggcttacaccaactacttcggacggtgcaatgtggccgagcacgaaaagctgatcctgctggcccagctgaagcccgagaaggatagcgacgaagccgtgacatatagcctgggaaagtttgggcagagggccctggatttctacagcattcatgtgaccaaggagtccacccaccccgtgaagcccctggcccagatcgccggaaacagatacgcctccggacctgtgggaaaggccctgagcgacgcatgtatgggcacaatcgcctccttcctgtctaagtaccaggacatcatcatcgaacaccagaaggtggtgaagggcaaccagaagagactggagagcctgcgggagctggccggcaaggaaaacctggaataccctagcgtgaccctgccacctcagcctcacaccaaggagggcgttgatgcctacaacgaagtgatcgcccgggtgcgaatgtgggtgaacctgaacctgtggcagaagctgaagctaagcagagatgatgccaagcctctgctgagactgaagggattcccttcctttcctctggtcgagagacaggccaacgaagtggactggtgggacatggtgtgtaacgtgaagaagctgatcaacgagaaaaaggaggatggcaaggtgttttggcagaatctggctggctacaagagacaggaagccctgagaccatacctgagcagcgaggaagatcggaagaagggaaagaaattcgctcggtaccagctgggcgacctgctgctgcacctggaaaagaagcacggcgaggactggggaaaggtgtacgacgaggcctgggagcggattgacaagaaagtggaaggcctgagcaagcacatcaagctggaagaggaacggagaagcgaggacgcccagagcaaggccgccctgaccgactggctgcgggctaaggccagcttcgtgatcgagggcctgaaggaggccgacaaggacgagttctgcagatgcgagctgaagctgcagaagtggtacggggacctgcggggaaagcccttcgccatcgaagccgagaacagcatcctggacatcagcggcttcagcaagcagtacaactgtgccttcatctggcagaaggacggcgtgaagaagctgaacctgtacctgatcatcaactacttcaagggcggcaagctgcggttcaagaagatcaaacctgaagccttcgaagccaacagattctacaccgtgatcaacaaaaagagcggcgagatcgtgcccatggaggtgaacttcaacttcgacgaccccaacctgatcatcctgcctctggcctttggcaagagacagggcagagaattcatctggaacgacctgctgtccctggaaaccggcagcctgaagctggccaacggaagagtgatcgagaagacactgtacaacagaagaacccggcaggatgagcctgccctgttcgtggccctgaccttcgagcggcgggaggtcctggactcctccaatatcaaaccaatgaacctgatcggcgtggcaagaggcgaaaacatccccgccgtgatcgccctgaccgaccccgagggctgcccactgagccggtttaaggatagcctgggaaacccaacccacatcctgagaatcggcgagagctataaggagaagcagcggaccatccaggccaagaaggaggtggagcagcggagagccggcggctacagccggaagtacgccagcaaagccaagaatctggcagacgatatggtgagaaacaccgctagagatctgctgtactacgccgtgacccaggatgccatgctgatcttcgccaacctgagccggggcttcggccggcagggcaagcggaccttcatggccgagagacagtacacacggatggaggactggctgaccgccaagctggcctacgagggcctgagcaagacctacctgtccaagacactggcccagtacacctccaagacatgcagcaactgtgggtttaccatcaccagcgccgactacgacagggtgctggagaagctgaagaagacagcaacaggctggatgaccacaattaacggcaaggagctgaaggtggagggccagattacctactacaacagatacaagagacagaacgtagtcaaggacctgtccgtcgagctggatagactgagcgaagaatctgtgaacaacgacatctcctcctggacaaagggcagaagcggagaagctctgagcctcctgaagaaaagattctcccatagacccgtgcaggagaagttcgtgtgcctgaactgcggcttcgagacacacgcagccgagcaagccgccctgaacatcgccagatcctggctgttcctgcggagccaggagtacaagaaataccagacaaacaagacaaccggcaacaccgataagagagccttcgtcgagacctggcagtccttttaccggaagaagcttaaggaggtgtggaaacctgccgtgcggtctggcggatctggcggaggctccacaagcaggaccggccccctgaccttcggcgacgtggccgtggagttcagcggcgaggagtgggcctggctggacagcgcccagaggagcctgcacaggagcgtgatgctggagaactacaggaacctggccagcctgggcctgtgcatgagcaagcccgagatgatcagcagcctggagcagagcaaggagccctgggccgtgaaggccaagagcaccaggggcaggtgccccgacctgaacctgtgcaccagccccaagaaaaagagaaaagtctaagctgccttctgcggggcttgccttctggccatgcccttcttctctcccttgcacctgtacctcttggtctttgaataaagcctgagtaggaaggctagcaaaaaaaaaaaaaaaaaaaaaaaaaaaaaaaaaaaaaaaaaaaaaaaaaaaaaaaaaaaaaaaaaaaaaaaaaaaaaaaa

SEQ ID NO: 6707 - RNA, 5797 nt, synthetic construct
  source 1..5797: mol_type = other RNA
aggaaataagagagaaaagaagagtaagaagaaatataagagccaccatggcccctaagaagaagcgtaaagtgagccggatggaacgcctcgtctacgaggtgcggcagaagtgcagaaacatcgaggacatctgcatctcctgcggatctctgaacgtgaccctggagcacccactgttcatcggcggcatgtgccagaactgtaaaaactgttttctggagtgtgcctatcaatacgacgatgacggctaccagagctactgcaccatctgttgcggcggaagagaggtgctgatgtgtggaaataacaactgctgccggtgcttctgcgtggaatgcgtggacctgctggtgggccccggcgccgcccaggccgctattaaggaagatccttggaactgctacatgtgcggccacaagggcacatacggcctgctgagacggagagaggactggcctagcagactgcagatgttcttcgccaataaccacgaccaggagttcgacccccctaaggtgtaccctcccgtccccgccgagaagagaaagcccatccgggtcctgagcctgttcgatggcatcgccaccggtctgctggtgctgaaggacctgggcatccaggtggataggtacattgcctccgaggtgtgcgaggactccatcaccgtgggaatggtgcgtcatcagggcaagatcatgtacgtgggcgacgtgcggagcgtgacacagaagcatatccaggagtggggccctttcgacctggtgatcggcggcagcccttgcaatgacctgagcatcgtgaacccagcccggaagggcctgtacgagggaaccggcagactgttcttcgagttttacagactgctgcacgacgcccggcctaaggaaggcgacgaccggcccttcttttggctgttcgagaatgtggtggccatgggagtcagcgacaagcgggatattagccggttcctggagagcaaccccgtgatgatcgatgccaaggaagtgagcgccgcccaccgggccagatacttctggggcaatctgcctggcatgaacagacccctggccagcaccgtgaacgacaagctggagctgcaggagtgcctggagcacggccggatcgccaagttcagcaaggtgagaaccatcaccacccgaagcaacagcatcaaacaaggcaaggaccagcactttcctgtgttcatgaacgagaaggaggacatcctgtggtgtaccgagatggagagagtgttcgggttcccagtccactacacagatgtcagcaacatgtctagactggccagacagagactgctgggaagaagctggtccgtccctgtgatcagacacctgttcgcccctctgaaggagtacttcgcctgcgtgagcagcggcaacagcaacgccaacagccggggccccagcttctctagcggcctggtgccactgtccctgagagggagccacatgggccccatggagatctacaaaaccgtgagcgcctggaagcggcagcctgtgcgcgtgctgagcctgtttcggaatatcgataaagtcctgaaaagcctgggattcctggagagcggctctggctccggcggtggcaccctgaagtacgtggaggatgtgacaaacgtggtcagacgggatgtggagaagtggggccccttcgatctggtgtacggcagcacccaacccctgggcagctcttgtgaccggtgccctggctggtacatgtttcagttccaccggatcctgcagtacgccctgccgagacaggagtcccagcggccattcttttggattttcatggacaacttgctgctgaccgaggatgaccaggaaactaccactcggttcctgcagaccgaagccgtgaccctgcaggacgtgagaggccgggactaccagaacgccatgcgggtgtggtccaacatccctggactgaaaagcaagcacgcacctctgacccctaaagaagaggagtacctgcaggcccaggtgcggagcagaagcaagctggacgcccctaaggtggatctgctggtgaagaattgcctcctgcccctgagagagtacttcaagtatttcagccagaatagtctgcccctgggcggcccaagcagcggcgcccctcctcccagcggcggcagcccagccggctccccaacctctaccgaggagggcacctctgagtccgccacccccgagagcggccctggcacctccaccgagcccagcgagggcagcgcacccggcagccctgccggcagccccacctccacagaggagggaaccagcaccgagcccagcgaaggcagcgccccaggcaccagcaccgagcctagtgagggcggctctggcggcggcagcgcccaggagattaaacggatcaacaagatcagaagaagacttgtgaaagacagcaacaccaagaaggccggcaagacaggccccatgaaaaccctgctggttagagtgatgacacccgatctgagagagcggctggaaaacctgagaaagaagcctgaaaatatcccccagcccatcagcaatacatctagagccaacctgaataagctgctgaccgattacaccgaaatgaagaaggcgatcctgcatgtgtactgggaagagttccagaaggaccctgtgggcctgatgagccgggtggcccagcctgccagcaagaagatcgatcagaacaagctgaaacctgagatggacgagaagggcaacctgaccaccgccggctttgcctgctctcagtgtggccagcccctgttcgtgtacaagctggagcaggtgtctgagaagggcaaggcttacaccaactacttcggacggtgcaatgtggccgagcacgaaaagctgatcctgctggcccagctgaagcccgagaaggatagcgacgaagccgtgacatatagcctgggaaagtttgggcagagggccctggatttctacagcattcatgtgaccaaggagtccacccaccccgtgaagcccctggcccagatcgccggaaacagatacgcctccggacctgtgggaaaggccctgagcgacgcatgtatgggcacaatcgcctccttcctgtctaagtaccaggacatcatcatcgaacaccagaaggtggtgaagggcaaccagaagagactggagagcctgcgggagctggccggcaaggaaaacctggaataccctagcgtgaccctgccacctcagcctcacaccaaggagggcgttgatgcctacaacgaagtgatcgcccgggtgcgaatgtgggtgaacctgaacctgtggcagaagctgaagctaagcagagatgatgccaagcctctgctgagactgaagggattcccttcctttcctctggtcgagagacaggccaacgaagtggactggtgggacatggtgtgtaacgtgaagaagctgatcaacgagaaaaaggaggatggcaaggtgttttggcagaatctggctggctacaagagacaggaagccctgagaccatacctgagcagcgaggaagatcggaagaagggaaagaaattcgctcggtaccagctgggcgacctgctgctgcacctggaaaagaagcacggcgaggactggggaaaggtgtacgacgaggcctgggagcggattgacaagaaagtggaaggcctgagcaagcacatcaagctggaagaggaacggagaagcgaggacgcccagagcaaggccgccctgaccgactggctgcgggctaaggccagcttcgtgatcgagggcctgaaggaggccgacaaggacgagttctgcagatgcgagctgaagctgcagaagtggtacggggacctgcggggaaagcccttcgccatcgaagccgagaacagcatcctggacatcagcggcttcagcaagcagtacaactgtgccttcatctggcagaaggacggcgtgaagaagctgaacctgtacctgatcatcaactacttcaagggcggcaagctgcggttcaagaagatcaaacctgaagccttcgaagccaacagattctacaccgtgatcaacaaaaagagcggcgagatcgtgcccatggaggtgaacttcaacttcgacgaccccaacctgatcatcctgcctctggcctttggcaagagacagggcagagaattcatctggaacgacctgctgtccctggaaaccggcagcctgaagctggccaacggaagagtgatcgagaagacactgtacaacagaagaacccggcaggatgagcctgccctgttcgtggccctgaccttcgagcggcgggaggtcctggactcctccaatatcaaaccaatgaacctgatcggcgtggcaagaggcgaaaacatccccgccgtgatcgccctgaccgaccccgagggctgcccactgagccggtttaaggatagcctgggaaacccaacccacatcctgagaatcggcgagagctataaggagaagcagcggaccatccaggccaagaaggaggtggagcagcggagagccggcggctacagccggaagtacgccagcaaagccaagaatctggcagacgatatggtgagaaacaccgctagagatctgctgtactacgccgtgacccaggatgccatgctgatcttcgccaacctgagccggggcttcggccggcagggcaagcggaccttcatggccgagagacagtacacacggatggaggactggctgaccgccaagctggcctacgagggcctgagcaagacctacctgtccaagacactggcccagtacacctccaagacatgcagcaactgtgggtttaccatcaccagcgccgactacgacagggtgctggagaagctgaagaagacagcaacaggctggatgaccacaattaacggcaaggagctgaaggtggagggccagattacctactacaacagatacaagagacagaacgtagtcaaggacctgtccgtcgagctggatagactgagcgaagaatctgtgaacaacgacatctcctcctggacaaagggcagaagcggagaagctctgagcctcctgaagaaaagattctcccatagacccgtgcaggagaagttcgtgtgcctgaactgcggcttcgagacacacgcagccgagcaagccgccctgaacatcgccagatcctggctgttcctgcggagccaggagtacaagaaataccagacaaacaagacaaccggcaacaccgataagagagccttcgtcgagacctggcagtccttttaccggaagaagcttaaggaggtgtggaaacctgccgtgcggtctggcggatctggcggaggctccacaagcatgggccccctgcagttcaaggacgtggccatcgagttcagcctggaggagtggcactgcctggacaccgcccagaggaacctgtacagggacgtgatgctggagaactacaggaacctggtgttcctgggcatcgtggtgagcaagcccgacctgatcgccaggctggagcagggcaagaagcccctgaccatgaagaggcacgagatggtggccaaccccagcggccccggcgtggtggtgaccagccccaagaaaaagagaaaagtctaagctgccttctgcggggcttgccttctggccatgcccttcttctctcccttgcacctgtacctcttggtctttgaataaagcctgagtaggaaggctagcaaaaaaaaaaaaaaaaaaaaaaaaaaaaaaaaaaaaaaaaaaaaaaaaaaaaaaaaaaaaaaaaaaaaaaaaaaaaaaaa

SEQ ID NO: 6708 - RNA, 5797 nt, synthetic construct
  source 1..5797: mol_type = other RNA
aggaaataagagagaaaagaagagtaagaagaaatataagagccaccatggcccctaagaagaagcgtaaagtgagccggatggaacgcctcgtctacgaggtgcggcagaagtgcagaaacatcgaggacatctgcatctcctgcggatctctgaacgtgaccctggagcacccactgttcatcggcggcatgtgccagaactgtaaaaactgttttctggagtgtgcctatcaatacgacgatgacggctaccagagctactgcaccatctgttgcggcggaagagaggtgctgatgtgtggaaataacaactgctgccggtgcttctgcgtggaatgcgtggacctgctggtgggccccggcgccgcccaggccgctattaaggaagatccttggaactgctacatgtgcggccacaagggcacatacggcctgctgagacggagagaggactggcctagcagactgcagatgttcttcgccaataaccacgaccaggagttcgacccccctaaggtgtaccctcccgtccccgccgagaagagaaagcccatccgggtcctgagcctgttcgatggcatcgccaccggtctgctggtgctgaaggacctgggcatccaggtggataggtacattgcctccgaggtgtgcgaggactccatcaccgtgggaatggtgcgtcatcagggcaagatcatgtacgtgggcgacgtgcggagcgtgacacagaagcatatccaggagtggggccctttcgacctggtgatcggcggcagcccttgcaatgacctgagcatcgtgaacccagcccggaagggcctgtacgagggaaccggcagactgttcttcgagttttacagactgctgcacgacgcccggcctaaggaaggcgacgaccggcccttcttttggctgttcgagaatgtggtggccatgggagtcagcgacaagcgggatattagccggttcctggagagcaaccccgtgatgatcgatgccaaggaagtgagcgccgcccaccgggccagatacttctggggcaatctgcctggcatgaacagacccctggccagcaccgtgaacgacaagctggagctgcaggagtgcctggagcacggccggatcgccaagttcagcaaggtgagaaccatcaccacccgaagcaacagcatcaaacaaggcaaggaccagcactttcctgtgttcatgaacgagaaggaggacatcctgtggtgtaccgagatggagagagtgttcgggttcccagtccactacacagatgtcagcaacatgtctagactggccagacagagactgctgggaagaagctggtccgtccctgtgatcagacacctgttcgcccctctgaaggagtacttcgcctgcgtgagcagcggcaacagcaacgccaacagccggggccccagcttctctagcggcctggtgccactgtccctgagagggagccacatgggccccatggagatctacaaaaccgtgagcgcctggaagcggcagcctgtgcgcgtgctgagcctgtttcggaatatcgataaagtcctgaaaagcctgggattcctggagagcggctctggctccggcggtggcaccctgaagtacgtggaggatgtgacaaacgtggtcagacgggatgtggagaagtggggccccttcgatctggtgtacggcagcacccaacccctgggcagctcttgtgaccggtgccctggctggtacatgtttcagttccaccggatcctgcagtacgccctgccgagacaggagtcccagcggccattcttttggattttcatggacaacttgctgctgaccgaggatgaccaggaaactaccactcggttcctgcagaccgaagccgtgaccctgcaggacgtgagaggccgggactaccagaacgccatgcgggtgtggtccaacatccctggactgaaaagcaagcacgcacctctgacccctaaagaagaggagtacctgcaggcccaggtgcggagcagaagcaagctggacgcccctaaggtggatctgctggtgaagaattgcctcctgcccctgagagagtacttcaagtatttcagccagaatagtctgcccctgggcggcccaagcagcggcgcccctcctcccagcggcggcagcccagccggctccccaacctctaccgaggagggcacctctgagtccgccacccccgagagcggccctggcacctccaccgagcccagcgagggcagcgcacccggcagccctgccggcagccccacctccacagaggagggaaccagcaccgagcccagcgaaggcagcgccccaggcaccagcaccgagcctagtgagggcggctctggcggcggcagcgcccaggagattaaacggatcaacaagatcagaagaagacttgtgaaagacagcaacaccaagaaggccggcaagacaggccccatgaaaaccctgctggttagagtgatgacacccgatctgagagagcggctggaaaacctgagaaagaagcctgaaaatatcccccagcccatcagcaatacatctagagccaacctgaataagctgctgaccgattacaccgaaatgaagaaggcgatcctgcatgtgtactgggaagagttccagaaggaccctgtgggcctgatgagccgggtggcccagcctgccagcaagaagatcgatcagaacaagctgaaacctgagatggacgagaagggcaacctgaccaccgccggctttgcctgctctcagtgtggccagcccctgttcgtgtacaagctggagcaggtgtctgagaagggcaaggcttacaccaactacttcggacggtgcaatgtggccgagcacgaaaagctgatcctgctggcccagctgaagcccgagaaggatagcgacgaagccgtgacatatagcctgggaaagtttgggcagagggccctggatttctacagcattcatgtgaccaaggagtccacccaccccgtgaagcccctggcccagatcgccggaaacagatacgcctccggacctgtgggaaaggccctgagcgacgcatgtatgggcacaatcgcctccttcctgtctaagtaccaggacatcatcatcgaacaccagaaggtggtgaagggcaaccagaagagactggagagcctgcgggagctggccggcaaggaaaacctggaataccctagcgtgaccctgccacctcagcctcacaccaaggagggcgttgatgcctacaacgaagtgatcgcccgggtgcgaatgtgggtgaacctgaacctgtggcagaagctgaagctaagcagagatgatgccaagcctctgctgagactgaagggattcccttcctttcctctggtcgagagacaggccaacgaagtggactggtgggacatggtgtgtaacgtgaagaagctgatcaacgagaaaaaggaggatggcaaggtgttttggcagaatctggctggctacaagagacaggaagccctgagaccatacctgagcagcgaggaagatcggaagaagggaaagaaattcgctcggtaccagctgggcgacctgctgctgcacctggaaaagaagcacggcgaggactggggaaaggtgtacgacgaggcctgggagcggattgacaagaaagtggaaggcctgagcaagcacatcaagctggaagaggaacggagaagcgaggacgcccagagcaaggccgccctgaccgactggctgcgggctaaggccagcttcgtgatcgagggcctgaaggaggccgacaaggacgagttctgcagatgcgagctgaagctgcagaagtggtacggggacctgcggggaaagcccttcgccatcgaagccgagaacagcatcctggacatcagcggcttcagcaagcagtacaactgtgccttcatctggcagaaggacggcgtgaagaagctgaacctgtacctgatcatcaactacttcaagggcggcaagctgcggttcaagaagatcaaacctgaagccttcgaagccaacagattctacaccgtgatcaacaaaaagagcggcgagatcgtgcccatggaggtgaacttcaacttcgacgaccccaacctgatcatcctgcctctggcctttggcaagagacagggcagagaattcatctggaacgacctgctgtccctggaaaccggcagcctgaagctggccaacggaagagtgatcgagaagacactgtacaacagaagaacccggcaggatgagcctgccctgttcgtggccctgaccttcgagcggcgggaggtcctggactcctccaatatcaaaccaatgaacctgatcggcgtggcaagaggcgaaaacatccccgccgtgatcgccctgaccgaccccgagggctgcccactgagccggtttaaggatagcctgggaaacccaacccacatcctgagaatcggcgagagctataaggagaagcagcggaccatccaggccaagaaggaggtggagcagcggagagccggcggctacagccggaagtacgccagcaaagccaagaatctggcagacgatatggtgagaaacaccgctagagatctgctgtactacgccgtgacccaggatgccatgctgatcttcgccaacctgagccggggcttcggccggcagggcaagcggaccttcatggccgagagacagtacacacggatggaggactggctgaccgccaagctggcctacgagggcctgagcaagacctacctgtccaagacactggcccagtacacctccaagacatgcagcaactgtgggtttaccatcaccagcgccgactacgacagggtgctggagaagctgaagaagacagcaacaggctggatgaccacaattaacggcaaggagctgaaggtggagggccagattacctactacaacagatacaagagacagaacgtagtcaaggacctgtccgtcgagctggatagactgagcgaagaatctgtgaacaacgacatctcctcctggacaaagggcagaagcggagaagctctgagcctcctgaagaaaagattctcccatagacccgtgcaggagaagttcgtgtgcctgaactgcggcttcgagacacacgcagccgagcaagccgccctgaacatcgccagatcctggctgttcctgcggagccaggagtacaagaaataccagacaaacaagacaaccggcaacaccgataagagagccttcgtcgagacctggcagtccttttaccggaagaagcttaaggaggtgtggaaacctgccgtgcggtctggcggatctggcggaggctccacaagcgcccacatgagcctgagcttcagggacgtggccatcgacctgagccaggaggagtgggagtgcctggaccccgtgcagagggccctgtacagggacgtgatgctggagaactacagcaacctggtgagcctgggctgcagcagccccaagcccgacgtgatcaccctgctggagcaggagagggagccctggaccgtgatgagggagggcaccaggagctggtacaccgacctggagagcaagaccagccccaagaaaaagagaaaagtctaagctgccttctgcggggcttgccttctggccatgcccttcttctctcccttgcacctgtacctcttggtctttgaataaagcctgagtaggaaggctagcaaaaaaaaaaaaaaaaaaaaaaaaaaaaaaaaaaaaaaaaaaaaaaaaaaaaaaaaaaaaaaaaaaaaaaaaaaaaaaaa

SEQ ID NO: 6709 - RNA, 5797 nt, synthetic construct
  source 1..5797: mol_type = other RNA
aggaaataagagagaaaagaagagtaagaagaaatataagagccaccatggcccctaagaagaagcgtaaagtgagccggatggaacgcctcgtctacgaggtgcggcagaagtgcagaaacatcgaggacatctgcatctcctgcggatctctgaacgtgaccctggagcacccactgttcatcggcggcatgtgccagaactgtaaaaactgttttctggagtgtgcctatcaatacgacgatgacggctaccagagctactgcaccatctgttgcggcggaagagaggtgctgatgtgtggaaataacaactgctgccggtgcttctgcgtggaatgcgtggacctgctggtgggccccggcgccgcccaggccgctattaaggaagatccttggaactgctacatgtgcggccacaagggcacatacggcctgctgagacggagagaggactggcctagcagactgcagatgttcttcgccaataaccacgaccaggagttcgacccccctaaggtgtaccctcccgtccccgccgagaagagaaagcccatccgggtcctgagcctgttcgatggcatcgccaccggtctgctggtgctgaaggacctgggcatccaggtggataggtacattgcctccgaggtgtgcgaggactccatcaccgtgggaatggtgcgtcatcagggcaagatcatgtacgtgggcgacgtgcggagcgtgacacagaagcatatccaggagtggggccctttcgacctggtgatcggcggcagcccttgcaatgacctgagcatcgtgaacccagcccggaagggcctgtacgagggaaccggcagactgttcttcgagttttacagactgctgcacgacgcccggcctaaggaaggcgacgaccggcccttcttttggctgttcgagaatgtggtggccatgggagtcagcgacaagcgggatattagccggttcctggagagcaaccccgtgatgatcgatgccaaggaagtgagcgccgcccaccgggccagatacttctggggcaatctgcctggcatgaacagacccctggccagcaccgtgaacgacaagctggagctgcaggagtgcctggagcacggccggatcgccaagttcagcaaggtgagaaccatcaccacccgaagcaacagcatcaaacaaggcaaggaccagcactttcctgtgttcatgaacgagaaggaggacatcctgtggtgtaccgagatggagagagtgttcgggttcccagtccactacacagatgtcagcaacatgtctagactggccagacagagactgctgggaagaagctggtccgtccctgtgatcagacacctgttcgcccctctgaaggagtacttcgcctgcgtgagcagcggcaacagcaacgccaacagccggggccccagcttctctagcggcctggtgccactgtccctgagagggagccacatgggccccatggagatctacaaaaccgtgagcgcctggaagcggcagcctgtgcgcgtgctgagcctgtttcggaatatcgataaagtcctgaaaagcctgggattcctggagagcggctctggctccggcggtggcaccctgaagtacgtggaggatgtgacaaacgtggtcagacgggatgtggagaagtggggccccttcgatctggtgtacggcagcacccaacccctgggcagctcttgtgaccggtgccctggctggtacatgtttcagttccaccggatcctgcagtacgccctgccgagacaggagtcccagcggccattcttttggattttcatggacaacttgctgctgaccgaggatgaccaggaaactaccactcggttcctgcagaccgaagccgtgaccctgcaggacgtgagaggccgggactaccagaacgccatgcgggtgtggtccaacatccctggactgaaaagcaagcacgcacctctgacccctaaagaagaggagtacctgcaggcccaggtgcggagcagaagcaagctggacgcccctaaggtggatctgctggtgaagaattgcctcctgcccctgagagagtacttcaagtatttcagccagaatagtctgcccctgggcggcccaagcagcggcgcccctcctcccagcggcggcagcccagccggctccccaacctctaccgaggagggcacctctgagtccgccacccccgagagcggccctggcacctccaccgagcccagcgagggcagcgcacccggcagccctgccggcagccccacctccacagaggagggaaccagcaccgagcccagcgaaggcagcgccccaggcaccagcaccgagcctagtgagggcggctctggcggcggcagcgcccaggagattaaacggatcaacaagatcagaagaagacttgtgaaagacagcaacaccaagaaggccggcaagacaggccccatgaaaaccctgctggttagagtgatgacacccgatctgagagagcggctggaaaacctgagaaagaagcctgaaaatatcccccagcccatcagcaatacatctagagccaacctgaataagctgctgaccgattacaccgaaatgaagaaggcgatcctgcatgtgtactgggaagagttccagaaggaccctgtgggcctgatgagccgggtggcccagcctgccagcaagaagatcgatcagaacaagctgaaacctgagatggacgagaagggcaacctgaccaccgccggctttgcctgctctcagtgtggccagcccctgttcgtgtacaagctggagcaggtgtctgagaagggcaaggcttacaccaactacttcggacggtgcaatgtggccgagcacgaaaagctgatcctgctggcccagctgaagcccgagaaggatagcgacgaagccgtgacatatagcctgggaaagtttgggcagagggccctggatttctacagcattcatgtgaccaaggagtccacccaccccgtgaagcccctggcccagatcgccggaaacagatacgcctccggacctgtgggaaaggccctgagcgacgcatgtatgggcacaatcgcctccttcctgtctaagtaccaggacatcatcatcgaacaccagaaggtggtgaagggcaaccagaagagactggagagcctgcgggagctggccggcaaggaaaacctggaataccctagcgtgaccctgccacctcagcctcacaccaaggagggcgttgatgcctacaacgaagtgatcgcccgggtgcgaatgtgggtgaacctgaacctgtggcagaagctgaagctaagcagagatgatgccaagcctctgctgagactgaagggattcccttcctttcctctggtcgagagacaggccaacgaagtggactggtgggacatggtgtgtaacgtgaagaagctgatcaacgagaaaaaggaggatggcaaggtgttttggcagaatctggctggctacaagagacaggaagccctgagaccatacctgagcagcgaggaagatcggaagaagggaaagaaattcgctcggtaccagctgggcgacctgctgctgcacctggaaaagaagcacggcgaggactggggaaaggtgtacgacgaggcctgggagcggattgacaagaaagtggaaggcctgagcaagcacatcaagctggaagaggaacggagaagcgaggacgcccagagcaaggccgccctgaccgactggctgcgggctaaggccagcttcgtgatcgagggcctgaaggaggccgacaaggacgagttctgcagatgcgagctgaagctgcagaagtggtacggggacctgcggggaaagcccttcgccatcgaagccgagaacagcatcctggacatcagcggcttcagcaagcagtacaactgtgccttcatctggcagaaggacggcgtgaagaagctgaacctgtacctgatcatcaactacttcaagggcggcaagctgcggttcaagaagatcaaacctgaagccttcgaagccaacagattctacaccgtgatcaacaaaaagagcggcgagatcgtgcccatggaggtgaacttcaacttcgacgaccccaacctgatcatcctgcctctggcctttggcaagagacagggcagagaattcatctggaacgacctgctgtccctggaaaccggcagcctgaagctggccaacggaagagtgatcgagaagacactgtacaacagaagaacccggcaggatgagcctgccctgttcgtggccctgaccttcgagcggcgggaggtcctggactcctccaatatcaaaccaatgaacctgatcggcgtggcaagaggcgaaaacatccccgccgtgatcgccctgaccgaccccgagggctgcccactgagccggtttaaggatagcctgggaaacccaacccacatcctgagaatcggcgagagctataaggagaagcagcggaccatccaggccaagaaggaggtggagcagcggagagccggcggctacagccggaagtacgccagcaaagccaagaatctggcagacgatatggtgagaaacaccgctagagatctgctgtactacgccgtgacccaggatgccatgctgatcttcgccaacctgagccggggcttcggccggcagggcaagcggaccttcatggccgagagacagtacacacggatggaggactggctgaccgccaagctggcctacgagggcctgagcaagacctacctgtccaagacactggcccagtacacctccaagacatgcagcaactgtgggtttaccatcaccagcgccgactacgacagggtgctggagaagctgaagaagacagcaacaggctggatgaccacaattaacggcaaggagctgaaggtggagggccagattacctactacaacagatacaagagacagaacgtagtcaaggacctgtccgtcgagctggatagactgagcgaagaatctgtgaacaacgacatctcctcctggacaaagggcagaagcggagaagctctgagcctcctgaagaaaagattctcccatagacccgtgcaggagaagttcgtgtgcctgaactgcggcttcgagacacacgcagccgagcaagccgccctgaacatcgccagatcctggctgttcctgcggagccaggagtacaagaaataccagacaaacaagacaaccggcaacaccgataagagagccttcgtcgagacctggcagtccttttaccggaagaagcttaaggaggtgtggaaacctgccgtgcggtctggcggatctggcggaggctccacaagccaccaggaggtggtgaccttcgaggacgtggccgtgtacttcacccagaccgagtgggccggcctgagccccgcccagagggccctgtacaggagcgtgatgctggagatctacggcaacctgaccagcctgggctaccccgtgcccaagcccgccctggtgagcctgctggagaggggcgacctgccctggggcctggagaccagggacgacccccccgcccagggcaccaaggacatctgcaccagccccaagaaaaagagaaaagtctaagctgccttctgcggggcttgccttctggccatgcccttcttctctcccttgcacctgtacctcttggtctttgaataaagcctgagtaggaaggctagcaaaaaaaaaaaaaaaaaaaaaaaaaaaaaaaaaaaaaaaaaaaaaaaaaaaaaaaaaaaaaaaaaaaaaaaaaaaaaaaa

SEQ ID NO: 6710 - RNA, 5797 nt, synthetic construct
  source 1..5797: mol_type = other RNA
aggaaataagagagaaaagaagagtaagaagaaatataagagccaccatggcccctaagaagaagcgtaaagtgagccggatggaacgcctcgtctacgaggtgcggcagaagtgcagaaacatcgaggacatctgcatctcctgcggatctctgaacgtgaccctggagcacccactgttcatcggcggcatgtgccagaactgtaaaaactgttttctggagtgtgcctatcaatacgacgatgacggctaccagagctactgcaccatctgttgcggcggaagagaggtgctgatgtgtggaaataacaactgctgccggtgcttctgcgtggaatgcgtggacctgctggtgggccccggcgccgcccaggccgctattaaggaagatccttggaactgctacatgtgcggccacaagggcacatacggcctgctgagacggagagaggactggcctagcagactgcagatgttcttcgccaataaccacgaccaggagttcgacccccctaaggtgtaccctcccgtccccgccgagaagagaaagcccatccgggtcctgagcctgttcgatggcatcgccaccggtctgctggtgctgaaggacctgggcatccaggtggataggtacattgcctccgaggtgtgcgaggactccatcaccgtgggaatggtgcgtcatcagggcaagatcatgtacgtgggcgacgtgcggagcgtgacacagaagcatatccaggagtggggccctttcgacctggtgatcggcggcagcccttgcaatgacctgagcatcgtgaacccagcccggaagggcctgtacgagggaaccggcagactgttcttcgagttttacagactgctgcacgacgcccggcctaaggaaggcgacgaccggcccttcttttggctgttcgagaatgtggtggccatgggagtcagcgacaagcgggatattagccggttcctggagagcaaccccgtgatgatcgatgccaaggaagtgagcgccgcccaccgggccagatacttctggggcaatctgcctggcatgaacagacccctggccagcaccgtgaacgacaagctggagctgcaggagtgcctggagcacggccggatcgccaagttcagcaaggtgagaaccatcaccacccgaagcaacagcatcaaacaaggcaaggaccagcactttcctgtgttcatgaacgagaaggaggacatcctgtggtgtaccgagatggagagagtgttcgggttcccagtccactacacagatgtcagcaacatgtctagactggccagacagagactgctgggaagaagctggtccgtccctgtgatcagacacctgttcgcccctctgaaggagtacttcgcctgcgtgagcagcggcaacagcaacgccaacagccggggccccagcttctctagcggcctggtgccactgtccctgagagggagccacatgggccccatggagatctacaaaaccgtgagcgcctggaagcggcagcctgtgcgcgtgctgagcctgtttcggaatatcgataaagtcctgaaaagcctgggattcctggagagcggctctggctccggcggtggcaccctgaagtacgtggaggatgtgacaaacgtggtcagacgggatgtggagaagtggggccccttcgatctggtgtacggcagcacccaacccctgggcagctcttgtgaccggtgccctggctggtacatgtttcagttccaccggatcctgcagtacgccctgccgagacaggagtcccagcggccattcttttggattttcatggacaacttgctgctgaccgaggatgaccaggaaactaccactcggttcctgcagaccgaagccgtgaccctgcaggacgtgagaggccgggactaccagaacgccatgcgggtgtggtccaacatccctggactgaaaagcaagcacgcacctctgacccctaaagaagaggagtacctgcaggcccaggtgcggagcagaagcaagctggacgcccctaaggtggatctgctggtgaagaattgcctcctgcccctgagagagtacttcaagtatttcagccagaatagtctgcccctgggcggcccaagcagcggcgcccctcctcccagcggcggcagcccagccggctccccaacctctaccgaggagggcacctctgagtccgccacccccgagagcggccctggcacctccaccgagcccagcgagggcagcgcacccggcagccctgccggcagccccacctccacagaggagggaaccagcaccgagcccagcgaaggcagcgccccaggcaccagcaccgagcctagtgagggcggctctggcggcggcagcgcccaggagattaaacggatcaacaagatcagaagaagacttgtgaaagacagcaacaccaagaaggccggcaagacaggccccatgaaaaccctgctggttagagtgatgacacccgatctgagagagcggctggaaaacctgagaaagaagcctgaaaatatcccccagcccatcagcaatacatctagagccaacctgaataagctgctgaccgattacaccgaaatgaagaaggcgatcctgcatgtgtactgggaagagttccagaaggaccctgtgggcctgatgagccgggtggcccagcctgccagcaagaagatcgatcagaacaagctgaaacctgagatggacgagaagggcaacctgaccaccgccggctttgcctgctctcagtgtggccagcccctgttcgtgtacaagctggagcaggtgtctgagaagggcaaggcttacaccaactacttcggacggtgcaatgtggccgagcacgaaaagctgatcctgctggcccagctgaagcccgagaaggatagcgacgaagccgtgacatatagcctgggaaagtttgggcagagggccctggatttctacagcattcatgtgaccaaggagtccacccaccccgtgaagcccctggcccagatcgccggaaacagatacgcctccggacctgtgggaaaggccctgagcgacgcatgtatgggcacaatcgcctccttcctgtctaagtaccaggacatcatcatcgaacaccagaaggtggtgaagggcaaccagaagagactggagagcctgcgggagctggccggcaaggaaaacctggaataccctagcgtgaccctgccacctcagcctcacaccaaggagggcgttgatgcctacaacgaagtgatcgcccgggtgcgaatgtgggtgaacctgaacctgtggcagaagctgaagctaagcagagatgatgccaagcctctgctgagactgaagggattcccttcctttcctctggtcgagagacaggccaacgaagtggactggtgggacatggtgtgtaacgtgaagaagctgatcaacgagaaaaaggaggatggcaaggtgttttggcagaatctggctggctacaagagacaggaagccctgagaccatacctgagcagcgaggaagatcggaagaagggaaagaaattcgctcggtaccagctgggcgacctgctgctgcacctggaaaagaagcacggcgaggactggggaaaggtgtacgacgaggcctgggagcggattgacaagaaagtggaaggcctgagcaagcacatcaagctggaagaggaacggagaagcgaggacgcccagagcaaggccgccctgaccgactggctgcgggctaaggccagcttcgtgatcgagggcctgaaggaggccgacaaggacgagttctgcagatgcgagctgaagctgcagaagtggtacggggacctgcggggaaagcccttcgccatcgaagccgagaacagcatcctggacatcagcggcttcagcaagcagtacaactgtgccttcatctggcagaaggacggcgtgaagaagctgaacctgtacctgatcatcaactacttcaagggcggcaagctgcggttcaagaagatcaaacctgaagccttcgaagccaacagattctacaccgtgatcaacaaaaagagcggcgagatcgtgcccatggaggtgaacttcaacttcgacgaccccaacctgatcatcctgcctctggcctttggcaagagacagggcagagaattcatctggaacgacctgctgtccctggaaaccggcagcctgaagctggccaacggaagagtgatcgagaagacactgtacaacagaagaacccggcaggatgagcctgccctgttcgtggccctgaccttcgagcggcgggaggtcctggactcctccaatatcaaaccaatgaacctgatcggcgtggcaagaggcgaaaacatccccgccgtgatcgccctgaccgaccccgagggctgcccactgagccggtttaaggatagcctgggaaacccaacccacatcctgagaatcggcgagagctataaggagaagcagcggaccatccaggccaagaaggaggtggagcagcggagagccggcggctacagccggaagtacgccagcaaagccaagaatctggcagacgatatggtgagaaacaccgctagagatctgctgtactacgccgtgacccaggatgccatgctgatcttcgccaacctgagccggggcttcggccggcagggcaagcggaccttcatggccgagagacagtacacacggatggaggactggctgaccgccaagctggcctacgagggcctgagcaagacctacctgtccaagacactggcccagtacacctccaagacatgcagcaactgtgggtttaccatcaccagcgccgactacgacagggtgctggagaagctgaagaagacagcaacaggctggatgaccacaattaacggcaaggagctgaaggtggagggccagattacctactacaacagatacaagagacagaacgtagtcaaggacctgtccgtcgagctggatagactgagcgaagaatctgtgaacaacgacatctcctcctggacaaagggcagaagcggagaagctctgagcctcctgaagaaaagattctcccatagacccgtgcaggagaagttcgtgtgcctgaactgcggcttcgagacacacgcagccgagcaagccgccctgaacatcgccagatcctggctgttcctgcggagccaggagtacaagaaataccagacaaacaagacaaccggcaacaccgataagagagccttcgtcgagacctggcagtccttttaccggaagaagcttaaggaggtgtggaaacctgccgtgcggtctggcggatctggcggaggctccacaagcgagcccggcgccgtgagcttcggcgacgtggccgtgtacttcagcagggaggagtggggctgcctgaggcccgcccagagggccctgtacagggacgtgatgagggagacctacagccacctgggcgccctgggcgtgggcggcagcaagcccgccctgatcagctggatggaggaggaggccgagctgtgggtgcccgccgcccaggaccccgaggtggccaagtgccccaccgaggccgacaccagccccaagaaaaagagaaaagtctaagctgccttctgcggggcttgccttctggccatgcccttcttctctcccttgcacctgtacctcttggtctttgaataaagcctgagtaggaaggctagcaaaaaaaaaaaaaaaaaaaaaaaaaaaaaaaaaaaaaaaaaaaaaaaaaaaaaaaaaaaaaaaaaaaaaaaaaaaaaaaa

SEQ ID NO: 6711 - RNA, 5797 nt, synthetic construct
  source 1..5797: mol_type = other RNA
aggaaataagagagaaaagaagagtaagaagaaatataagagccaccatggcccctaagaagaagcgtaaagtgagccggatggaacgcctcgtctacgaggtgcggcagaagtgcagaaacatcgaggacatctgcatctcctgcggatctctgaacgtgaccctggagcacccactgttcatcggcggcatgtgccagaactgtaaaaactgttttctggagtgtgcctatcaatacgacgatgacggctaccagagctactgcaccatctgttgcggcggaagagaggtgctgatgtgtggaaataacaactgctgccggtgcttctgcgtggaatgcgtggacctgctggtgggccccggcgccgcccaggccgctattaaggaagatccttggaactgctacatgtgcggccacaagggcacatacggcctgctgagacggagagaggactggcctagcagactgcagatgttcttcgccaataaccacgaccaggagttcgacccccctaaggtgtaccctcccgtccccgccgagaagagaaagcccatccgggtcctgagcctgttcgatggcatcgccaccggtctgctggtgctgaaggacctgggcatccaggtggataggtacattgcctccgaggtgtgcgaggactccatcaccgtgggaatggtgcgtcatcagggcaagatcatgtacgtgggcgacgtgcggagcgtgacacagaagcatatccaggagtggggccctttcgacctggtgatcggcggcagcccttgcaatgacctgagcatcgtgaacccagcccggaagggcctgtacgagggaaccggcagactgttcttcgagttttacagactgctgcacgacgcccggcctaaggaaggcgacgaccggcccttcttttggctgttcgagaatgtggtggccatgggagtcagcgacaagcgggatattagccggttcctggagagcaaccccgtgatgatcgatgccaaggaagtgagcgccgcccaccgggccagatacttctggggcaatctgcctggcatgaacagacccctggccagcaccgtgaacgacaagctggagctgcaggagtgcctggagcacggccggatcgccaagttcagcaaggtgagaaccatcaccacccgaagcaacagcatcaaacaaggcaaggaccagcactttcctgtgttcatgaacgagaaggaggacatcctgtggtgtaccgagatggagagagtgttcgggttcccagtccactacacagatgtcagcaacatgtctagactggccagacagagactgctgggaagaagctggtccgtccctgtgatcagacacctgttcgcccctctgaaggagtacttcgcctgcgtgagcagcggcaacagcaacgccaacagccggggccccagcttctctagcggcctggtgccactgtccctgagagggagccacatgggccccatggagatctacaaaaccgtgagcgcctggaagcggcagcctgtgcgcgtgctgagcctgtttcggaatatcgataaagtcctgaaaagcctgggattcctggagagcggctctggctccggcggtggcaccctgaagtacgtggaggatgtgacaaacgtggtcagacgggatgtggagaagtggggccccttcgatctggtgtacggcagcacccaacccctgggcagctcttgtgaccggtgccctggctggtacatgtttcagttccaccggatcctgcagtacgccctgccgagacaggagtcccagcggccattcttttggattttcatggacaacttgctgctgaccgaggatgaccaggaaactaccactcggttcctgcagaccgaagccgtgaccctgcaggacgtgagaggccgggactaccagaacgccatgcgggtgtggtccaacatccctggactgaaaagcaagcacgcacctctgacccctaaagaagaggagtacctgcaggcccaggtgcggagcagaagcaagctggacgcccctaaggtggatctgctggtgaagaattgcctcctgcccctgagagagtacttcaagtatttcagccagaatagtctgcccctgggcggcccaagcagcggcgcccctcctcccagcggcggcagcccagccggctccccaacctctaccgaggagggcacctctgagtccgccacccccgagagcggccctggcacctccaccgagcccagcgagggcagcgcacccggcagccctgccggcagccccacctccacagaggagggaaccagcaccgagcccagcgaaggcagcgccccaggcaccagcaccgagcctagtgagggcggctctggcggcggcagcgcccaggagattaaacggatcaacaagatcagaagaagacttgtgaaagacagcaacaccaagaaggccggcaagacaggccccatgaaaaccctgctggttagagtgatgacacccgatctgagagagcggctggaaaacctgagaaagaagcctgaaaatatcccccagcccatcagcaatacatctagagccaacctgaataagctgctgaccgattacaccgaaatgaagaaggcgatcctgcatgtgtactgggaagagttccagaaggaccctgtgggcctgatgagccgggtggcccagcctgccagcaagaagatcgatcagaacaagctgaaacctgagatggacgagaagggcaacctgaccaccgccggctttgcctgctctcagtgtggccagcccctgttcgtgtacaagctggagcaggtgtctgagaagggcaaggcttacaccaactacttcggacggtgcaatgtggccgagcacgaaaagctgatcctgctggcccagctgaagcccgagaaggatagcgacgaagccgtgacatatagcctgggaaagtttgggcagagggccctggatttctacagcattcatgtgaccaaggagtccacccaccccgtgaagcccctggcccagatcgccggaaacagatacgcctccggacctgtgggaaaggccctgagcgacgcatgtatgggcacaatcgcctccttcctgtctaagtaccaggacatcatcatcgaacaccagaaggtggtgaagggcaaccagaagagactggagagcctgcgggagctggccggcaaggaaaacctggaataccctagcgtgaccctgccacctcagcctcacaccaaggagggcgttgatgcctacaacgaagtgatcgcccgggtgcgaatgtgggtgaacctgaacctgtggcagaagctgaagctaagcagagatgatgccaagcctctgctgagactgaagggattcccttcctttcctctggtcgagagacaggccaacgaagtggactggtgggacatggtgtgtaacgtgaagaagctgatcaacgagaaaaaggaggatggcaaggtgttttggcagaatctggctggctacaagagacaggaagccctgagaccatacctgagcagcgaggaagatcggaagaagggaaagaaattcgctcggtaccagctgggcgacctgctgctgcacctggaaaagaagcacggcgaggactggggaaaggtgtacgacgaggcctgggagcggattgacaagaaagtggaaggcctgagcaagcacatcaagctggaagaggaacggagaagcgaggacgcccagagcaaggccgccctgaccgactggctgcgggctaaggccagcttcgtgatcgagggcctgaaggaggccgacaaggacgagttctgcagatgcgagctgaagctgcagaagtggtacggggacctgcggggaaagcccttcgccatcgaagccgagaacagcatcctggacatcagcggcttcagcaagcagtacaactgtgccttcatctggcagaaggacggcgtgaagaagctgaacctgtacctgatcatcaactacttcaagggcggcaagctgcggttcaagaagatcaaacctgaagccttcgaagccaacagattctacaccgtgatcaacaaaaagagcggcgagatcgtgcccatggaggtgaacttcaacttcgacgaccccaacctgatcatcctgcctctggcctttggcaagagacagggcagagaattcatctggaacgacctgctgtccctggaaaccggcagcctgaagctggccaacggaagagtgatcgagaagacactgtacaacagaagaacccggcaggatgagcctgccctgttcgtggccctgaccttcgagcggcgggaggtcctggactcctccaatatcaaaccaatgaacctgatcggcgtggcaagaggcgaaaacatccccgccgtgatcgccctgaccgaccccgagggctgcccactgagccggtttaaggatagcctgggaaacccaacccacatcctgagaatcggcgagagctataaggagaagcagcggaccatccaggccaagaaggaggtggagcagcggagagccggcggctacagccggaagtacgccagcaaagccaagaatctggcagacgatatggtgagaaacaccgctagagatctgctgtactacgccgtgacccaggatgccatgctgatcttcgccaacctgagccggggcttcggccggcagggcaagcggaccttcatggccgagagacagtacacacggatggaggactggctgaccgccaagctggcctacgagggcctgagcaagacctacctgtccaagacactggcccagtacacctccaagacatgcagcaactgtgggtttaccatcaccagcgccgactacgacagggtgctggagaagctgaagaagacagcaacaggctggatgaccacaattaacggcaaggagctgaaggtggagggccagattacctactacaacagatacaagagacagaacgtagtcaaggacctgtccgtcgagctggatagactgagcgaagaatctgtgaacaacgacatctcctcctggacaaagggcagaagcggagaagctctgagcctcctgaagaaaagattctcccatagacccgtgcaggagaagttcgtgtgcctgaactgcggcttcgagacacacgcagccgagcaagccgccctgaacatcgccagatcctggctgttcctgcggagccaggagtacaagaaataccagacaaacaagacaaccggcaacaccgataagagagccttcgtcgagacctggcagtccttttaccggaagaagcttaaggaggtgtggaaacctgccgtgcggtctggcggatctggcggaggctccacaagcgcccagggccccgtgaccttcgaggaggtggccgtgtacttcaccagggaggagggcgccctgctggaccccacccagagggccctgtacagggacgtgatgcaggagaactacgagaccgtggtgctgctgggcttccccgtgagcaagcccgacgtgatcagccagctggagcagggcgaggagccctggatccccgacctgcagggcagcgagaaggaggtgctgcccagggccgcctgcaccagccccaagaaaaagagaaaagtctaagctgccttctgcggggcttgccttctggccatgcccttcttctctcccttgcacctgtacctcttggtctttgaataaagcctgagtaggaaggctagcaaaaaaaaaaaaaaaaaaaaaaaaaaaaaaaaaaaaaaaaaaaaaaaaaaaaaaaaaaaaaaaaaaaaaaaaaaaaaaaa

SEQ ID NO: 6712 - RNA, 5797 nt, synthetic construct
  source 1..5797: mol_type = other RNA
aggaaataagagagaaaagaagagtaagaagaaatataagagccaccatggcccctaagaagaagcgtaaagtgagccggatggaacgcctcgtctacgaggtgcggcagaagtgcagaaacatcgaggacatctgcatctcctgcggatctctgaacgtgaccctggagcacccactgttcatcggcggcatgtgccagaactgtaaaaactgttttctggagtgtgcctatcaatacgacgatgacggctaccagagctactgcaccatctgttgcggcggaagagaggtgctgatgtgtggaaataacaactgctgccggtgcttctgcgtggaatgcgtggacctgctggtgggccccggcgccgcccaggccgctattaaggaagatccttggaactgctacatgtgcggccacaagggcacatacggcctgctgagacggagagaggactggcctagcagactgcagatgttcttcgccaataaccacgaccaggagttcgacccccctaaggtgtaccctcccgtccccgccgagaagagaaagcccatccgggtcctgagcctgttcgatggcatcgccaccggtctgctggtgctgaaggacctgggcatccaggtggataggtacattgcctccgaggtgtgcgaggactccatcaccgtgggaatggtgcgtcatcagggcaagatcatgtacgtgggcgacgtgcggagcgtgacacagaagcatatccaggagtggggccctttcgacctggtgatcggcggcagcccttgcaatgacctgagcatcgtgaacccagcccggaagggcctgtacgagggaaccggcagactgttcttcgagttttacagactgctgcacgacgcccggcctaaggaaggcgacgaccggcccttcttttggctgttcgagaatgtggtggccatgggagtcagcgacaagcgggatattagccggttcctggagagcaaccccgtgatgatcgatgccaaggaagtgagcgccgcccaccgggccagatacttctggggcaatctgcctggcatgaacagacccctggccagcaccgtgaacgacaagctggagctgcaggagtgcctggagcacggccggatcgccaagttcagcaaggtgagaaccatcaccacccgaagcaacagcatcaaacaaggcaaggaccagcactttcctgtgttcatgaacgagaaggaggacatcctgtggtgtaccgagatggagagagtgttcgggttcccagtccactacacagatgtcagcaacatgtctagactggccagacagagactgctgggaagaagctggtccgtccctgtgatcagacacctgttcgcccctctgaaggagtacttcgcctgcgtgagcagcggcaacagcaacgccaacagccggggccccagcttctctagcggcctggtgccactgtccctgagagggagccacatgggccccatggagatctacaaaaccgtgagcgcctggaagcggcagcctgtgcgcgtgctgagcctgtttcggaatatcgataaagtcctgaaaagcctgggattcctggagagcggctctggctccggcggtggcaccctgaagtacgtggaggatgtgacaaacgtggtcagacgggatgtggagaagtggggccccttcgatctggtgtacggcagcacccaacccctgggcagctcttgtgaccggtgccctggctggtacatgtttcagttccaccggatcctgcagtacgccctgccgagacaggagtcccagcggccattcttttggattttcatggacaacttgctgctgaccgaggatgaccaggaaactaccactcggttcctgcagaccgaagccgtgaccctgcaggacgtgagaggccgggactaccagaacgccatgcgggtgtggtccaacatccctggactgaaaagcaagcacgcacctctgacccctaaagaagaggagtacctgcaggcccaggtgcggagcagaagcaagctggacgcccctaaggtggatctgctggtgaagaattgcctcctgcccctgagagagtacttcaagtatttcagccagaatagtctgcccctgggcggcccaagcagcggcgcccctcctcccagcggcggcagcccagccggctccccaacctctaccgaggagggcacctctgagtccgccacccccgagagcggccctggcacctccaccgagcccagcgagggcagcgcacccggcagccctgccggcagccccacctccacagaggagggaaccagcaccgagcccagcgaaggcagcgccccaggcaccagcaccgagcctagtgagggcggctctggcggcggcagcgcccaggagattaaacggatcaacaagatcagaagaagacttgtgaaagacagcaacaccaagaaggccggcaagacaggccccatgaaaaccctgctggttagagtgatgacacccgatctgagagagcggctggaaaacctgagaaagaagcctgaaaatatcccccagcccatcagcaatacatctagagccaacctgaataagctgctgaccgattacaccgaaatgaagaaggcgatcctgcatgtgtactgggaagagttccagaaggaccctgtgggcctgatgagccgggtggcccagcctgccagcaagaagatcgatcagaacaagctgaaacctgagatggacgagaagggcaacctgaccaccgccggctttgcctgctctcagtgtggccagcccctgttcgtgtacaagctggagcaggtgtctgagaagggcaaggcttacaccaactacttcggacggtgcaatgtggccgagcacgaaaagctgatcctgctggcccagctgaagcccgagaaggatagcgacgaagccgtgacatatagcctgggaaagtttgggcagagggccctggatttctacagcattcatgtgaccaaggagtccacccaccccgtgaagcccctggcccagatcgccggaaacagatacgcctccggacctgtgggaaaggccctgagcgacgcatgtatgggcacaatcgcctccttcctgtctaagtaccaggacatcatcatcgaacaccagaaggtggtgaagggcaaccagaagagactggagagcctgcgggagctggccggcaaggaaaacctggaataccctagcgtgaccctgccacctcagcctcacaccaaggagggcgttgatgcctacaacgaagtgatcgcccgggtgcgaatgtgggtgaacctgaacctgtggcagaagctgaagctaagcagagatgatgccaagcctctgctgagactgaagggattcccttcctttcctctggtcgagagacaggccaacgaagtggactggtgggacatggtgtgtaacgtgaagaagctgatcaacgagaaaaaggaggatggcaaggtgttttggcagaatctggctggctacaagagacaggaagccctgagaccatacctgagcagcgaggaagatcggaagaagggaaagaaattcgctcggtaccagctgggcgacctgctgctgcacctggaaaagaagcacggcgaggactggggaaaggtgtacgacgaggcctgggagcggattgacaagaaagtggaaggcctgagcaagcacatcaagctggaagaggaacggagaagcgaggacgcccagagcaaggccgccctgaccgactggctgcgggctaaggccagcttcgtgatcgagggcctgaaggaggccgacaaggacgagttctgcagatgcgagctgaagctgcagaagtggtacggggacctgcggggaaagcccttcgccatcgaagccgagaacagcatcctggacatcagcggcttcagcaagcagtacaactgtgccttcatctggcagaaggacggcgtgaagaagctgaacctgtacctgatcatcaactacttcaagggcggcaagctgcggttcaagaagatcaaacctgaagccttcgaagccaacagattctacaccgtgatcaacaaaaagagcggcgagatcgtgcccatggaggtgaacttcaacttcgacgaccccaacctgatcatcctgcctctggcctttggcaagagacagggcagagaattcatctggaacgacctgctgtccctggaaaccggcagcctgaagctggccaacggaagagtgatcgagaagacactgtacaacagaagaacccggcaggatgagcctgccctgttcgtggccctgaccttcgagcggcgggaggtcctggactcctccaatatcaaaccaatgaacctgatcggcgtggcaagaggcgaaaacatccccgccgtgatcgccctgaccgaccccgagggctgcccactgagccggtttaaggatagcctgggaaacccaacccacatcctgagaatcggcgagagctataaggagaagcagcggaccatccaggccaagaaggaggtggagcagcggagagccggcggctacagccggaagtacgccagcaaagccaagaatctggcagacgatatggtgagaaacaccgctagagatctgctgtactacgccgtgacccaggatgccatgctgatcttcgccaacctgagccggggcttcggccggcagggcaagcggaccttcatggccgagagacagtacacacggatggaggactggctgaccgccaagctggcctacgagggcctgagcaagacctacctgtccaagacactggcccagtacacctccaagacatgcagcaactgtgggtttaccatcaccagcgccgactacgacagggtgctggagaagctgaagaagacagcaacaggctggatgaccacaattaacggcaaggagctgaaggtggagggccagattacctactacaacagatacaagagacagaacgtagtcaaggacctgtccgtcgagctggatagactgagcgaagaatctgtgaacaacgacatctcctcctggacaaagggcagaagcggagaagctctgagcctcctgaagaaaagattctcccatagacccgtgcaggagaagttcgtgtgcctgaactgcggcttcgagacacacgcagccgagcaagccgccctgaacatcgccagatcctggctgttcctgcggagccaggagtacaagaaataccagacaaacaagacaaccggcaacaccgataagagagccttcgtcgagacctggcagtccttttaccggaagaagcttaaggaggtgtggaaacctgccgtgcggtctggcggatctggcggaggctccacaagcatggccgagggcctgaagttcaaggacgtggccatctacttcagccagaacgagtgggagtgcctgcacagcgcccagaaggacctgtacagggacatcatgctggagaactacaacaacctgatcagcctgggcctgagcgagagcaagcccgacgtgatcagcctgctggagcagaggaaggagccctggatggtggagaggaaggagaccaaggagtggttccccgactgggagagcaggaccagccccaagaaaaagagaaaagtctaagctgccttctgcggggcttgccttctggccatgcccttcttctctcccttgcacctgtacctcttggtctttgaataaagcctgagtaggaaggctagcaaaaaaaaaaaaaaaaaaaaaaaaaaaaaaaaaaaaaaaaaaaaaaaaaaaaaaaaaaaaaaaaaaaaaaaaaaaaaaaa

SEQ ID NO: 6713 - RNA, 5797 nt, synthetic construct
  source 1..5797: mol_type = other RNA
aggaaataagagagaaaagaagagtaagaagaaatataagagccaccatggcccctaagaagaagcgtaaagtgagccggatggaacgcctcgtctacgaggtgcggcagaagtgcagaaacatcgaggacatctgcatctcctgcggatctctgaacgtgaccctggagcacccactgttcatcggcggcatgtgccagaactgtaaaaactgttttctggagtgtgcctatcaatacgacgatgacggctaccagagctactgcaccatctgttgcggcggaagagaggtgctgatgtgtggaaataacaactgctgccggtgcttctgcgtggaatgcgtggacctgctggtgggccccggcgccgcccaggccgctattaaggaagatccttggaactgctacatgtgcggccacaagggcacatacggcctgctgagacggagagaggactggcctagcagactgcagatgttcttcgccaataaccacgaccaggagttcgacccccctaaggtgtaccctcccgtccccgccgagaagagaaagcccatccgggtcctgagcctgttcgatggcatcgccaccggtctgctggtgctgaaggacctgggcatccaggtggataggtacattgcctccgaggtgtgcgaggactccatcaccgtgggaatggtgcgtcatcagggcaagatcatgtacgtgggcgacgtgcggagcgtgacacagaagcatatccaggagtggggccctttcgacctggtgatcggcggcagcccttgcaatgacctgagcatcgtgaacccagcccggaagggcctgtacgagggaaccggcagactgttcttcgagttttacagactgctgcacgacgcccggcctaaggaaggcgacgaccggcccttcttttggctgttcgagaatgtggtggccatgggagtcagcgacaagcgggatattagccggttcctggagagcaaccccgtgatgatcgatgccaaggaagtgagcgccgcccaccgggccagatacttctggggcaatctgcctggcatgaacagacccctggccagcaccgtgaacgacaagctggagctgcaggagtgcctggagcacggccggatcgccaagttcagcaaggtgagaaccatcaccacccgaagcaacagcatcaaacaaggcaaggaccagcactttcctgtgttcatgaacgagaaggaggacatcctgtggtgtaccgagatggagagagtgttcgggttcccagtccactacacagatgtcagcaacatgtctagactggccagacagagactgctgggaagaagctggtccgtccctgtgatcagacacctgttcgcccctctgaaggagtacttcgcctgcgtgagcagcggcaacagcaacgccaacagccggggccccagcttctctagcggcctggtgccactgtccctgagagggagccacatgggccccatggagatctacaaaaccgtgagcgcctggaagcggcagcctgtgcgcgtgctgagcctgtttcggaatatcgataaagtcctgaaaagcctgggattcctggagagcggctctggctccggcggtggcaccctgaagtacgtggaggatgtgacaaacgtggtcagacgggatgtggagaagtggggccccttcgatctggtgtacggcagcacccaacccctgggcagctcttgtgaccggtgccctggctggtacatgtttcagttccaccggatcctgcagtacgccctgccgagacaggagtcccagcggccattcttttggattttcatggacaacttgctgctgaccgaggatgaccaggaaactaccactcggttcctgcagaccgaagccgtgaccctgcaggacgtgagaggccgggactaccagaacgccatgcgggtgtggtccaacatccctggactgaaaagcaagcacgcacctctgacccctaaagaagaggagtacctgcaggcccaggtgcggagcagaagcaagctggacgcccctaaggtggatctgctggtgaagaattgcctcctgcccctgagagagtacttcaagtatttcagccagaatagtctgcccctgggcggcccaagcagcggcgcccctcctcccagcggcggcagcccagccggctccccaacctctaccgaggagggcacctctgagtccgccacccccgagagcggccctggcacctccaccgagcccagcgagggcagcgcacccggcagccctgccggcagccccacctccacagaggagggaaccagcaccgagcccagcgaaggcagcgccccaggcaccagcaccgagcctagtgagggcggctctggcggcggcagcgcccaggagattaaacggatcaacaagatcagaagaagacttgtgaaagacagcaacaccaagaaggccggcaagacaggccccatgaaaaccctgctggttagagtgatgacacccgatctgagagagcggctggaaaacctgagaaagaagcctgaaaatatcccccagcccatcagcaatacatctagagccaacctgaataagctgctgaccgattacaccgaaatgaagaaggcgatcctgcatgtgtactgggaagagttccagaaggaccctgtgggcctgatgagccgggtggcccagcctgccagcaagaagatcgatcagaacaagctgaaacctgagatggacgagaagggcaacctgaccaccgccggctttgcctgctctcagtgtggccagcccctgttcgtgtacaagctggagcaggtgtctgagaagggcaaggcttacaccaactacttcggacggtgcaatgtggccgagcacgaaaagctgatcctgctggcccagctgaagcccgagaaggatagcgacgaagccgtgacatatagcctgggaaagtttgggcagagggccctggatttctacagcattcatgtgaccaaggagtccacccaccccgtgaagcccctggcccagatcgccggaaacagatacgcctccggacctgtgggaaaggccctgagcgacgcatgtatgggcacaatcgcctccttcctgtctaagtaccaggacatcatcatcgaacaccagaaggtggtgaagggcaaccagaagagactggagagcctgcgggagctggccggcaaggaaaacctggaataccctagcgtgaccctgccacctcagcctcacaccaaggagggcgttgatgcctacaacgaagtgatcgcccgggtgcgaatgtgggtgaacctgaacctgtggcagaagctgaagctaagcagagatgatgccaagcctctgctgagactgaagggattcccttcctttcctctggtcgagagacaggccaacgaagtggactggtgggacatggtgtgtaacgtgaagaagctgatcaacgagaaaaaggaggatggcaaggtgttttggcagaatctggctggctacaagagacaggaagccctgagaccatacctgagcagcgaggaagatcggaagaagggaaagaaattcgctcggtaccagctgggcgacctgctgctgcacctggaaaagaagcacggcgaggactggggaaaggtgtacgacgaggcctgggagcggattgacaagaaagtggaaggcctgagcaagcacatcaagctggaagaggaacggagaagcgaggacgcccagagcaaggccgccctgaccgactggctgcgggctaaggccagcttcgtgatcgagggcctgaaggaggccgacaaggacgagttctgcagatgcgagctgaagctgcagaagtggtacggggacctgcggggaaagcccttcgccatcgaagccgagaacagcatcctggacatcagcggcttcagcaagcagtacaactgtgccttcatctggcagaaggacggcgtgaagaagctgaacctgtacctgatcatcaactacttcaagggcggcaagctgcggttcaagaagatcaaacctgaagccttcgaagccaacagattctacaccgtgatcaacaaaaagagcggcgagatcgtgcccatggaggtgaacttcaacttcgacgaccccaacctgatcatcctgcctctggcctttggcaagagacagggcagagaattcatctggaacgacctgctgtccctggaaaccggcagcctgaagctggccaacggaagagtgatcgagaagacactgtacaacagaagaacccggcaggatgagcctgccctgttcgtggccctgaccttcgagcggcgggaggtcctggactcctccaatatcaaaccaatgaacctgatcggcgtggcaagaggcgaaaacatccccgccgtgatcgccctgaccgaccccgagggctgcccactgagccggtttaaggatagcctgggaaacccaacccacatcctgagaatcggcgagagctataaggagaagcagcggaccatccaggccaagaaggaggtggagcagcggagagccggcggctacagccggaagtacgccagcaaagccaagaatctggcagacgatatggtgagaaacaccgctagagatctgctgtactacgccgtgacccaggatgccatgctgatcttcgccaacctgagccggggcttcggccggcagggcaagcggaccttcatggccgagagacagtacacacggatggaggactggctgaccgccaagctggcctacgagggcctgagcaagacctacctgtccaagacactggcccagtacacctccaagacatgcagcaactgtgggtttaccatcaccagcgccgactacgacagggtgctggagaagctgaagaagacagcaacaggctggatgaccacaattaacggcaaggagctgaaggtggagggccagattacctactacaacagatacaagagacagaacgtagtcaaggacctgtccgtcgagctggatagactgagcgaagaatctgtgaacaacgacatctcctcctggacaaagggcagaagcggagaagctctgagcctcctgaagaaaagattctcccatagacccgtgcaggagaagttcgtgtgcctgaactgcggcttcgagacacacgcagccgagcaagccgccctgaacatcgccagatcctggctgttcctgcggagccaggagtacaagaaataccagacaaacaagacaaccggcaacaccgataagagagccttcgtcgagacctggcagtccttttaccggaagaagcttaaggaggtgtggaaacctgccgtgcggtctggcggatctggcggaggctccacaagcaagcccggcaccgtgagcttcgccgacgtggccgtgtacttcagcagggaggagtggggctgcctgaggcccgcccagagggccctgtacagggacgtgatgagggagacctacggccacctgggcgccctgggcgtgggcggcagcaagcccgccctgatcagctgggtggaggaggccgccgagctgtgggaccccgccgccagggaccccgaggtgaccaagtgccccaccgagaccgacaccagccccaagaaaaagagaaaagtctaagctgccttctgcggggcttgccttctggccatgcccttcttctctcccttgcacctgtacctcttggtctttgaataaagcctgagtaggaaggctagcaaaaaaaaaaaaaaaaaaaaaaaaaaaaaaaaaaaaaaaaaaaaaaaaaaaaaaaaaaaaaaaaaaaaaaaaaaaaaaaa

SEQ ID NO: 6714 - RNA, 5797 nt, synthetic construct
  source 1..5797: mol_type = other RNA
aggaaataagagagaaaagaagagtaagaagaaatataagagccaccatggcccctaagaagaagcgtaaagtgagccggatggaacgcctcgtctacgaggtgcggcagaagtgcagaaacatcgaggacatctgcatctcctgcggatctctgaacgtgaccctggagcacccactgttcatcggcggcatgtgccagaactgtaaaaactgttttctggagtgtgcctatcaatacgacgatgacggctaccagagctactgcaccatctgttgcggcggaagagaggtgctgatgtgtggaaataacaactgctgccggtgcttctgcgtggaatgcgtggacctgctggtgggccccggcgccgcccaggccgctattaaggaagatccttggaactgctacatgtgcggccacaagggcacatacggcctgctgagacggagagaggactggcctagcagactgcagatgttcttcgccaataaccacgaccaggagttcgacccccctaaggtgtaccctcccgtccccgccgagaagagaaagcccatccgggtcctgagcctgttcgatggcatcgccaccggtctgctggtgctgaaggacctgggcatccaggtggataggtacattgcctccgaggtgtgcgaggactccatcaccgtgggaatggtgcgtcatcagggcaagatcatgtacgtgggcgacgtgcggagcgtgacacagaagcatatccaggagtggggccctttcgacctggtgatcggcggcagcccttgcaatgacctgagcatcgtgaacccagcccggaagggcctgtacgagggaaccggcagactgttcttcgagttttacagactgctgcacgacgcccggcctaaggaaggcgacgaccggcccttcttttggctgttcgagaatgtggtggccatgggagtcagcgacaagcgggatattagccggttcctggagagcaaccccgtgatgatcgatgccaaggaagtgagcgccgcccaccgggccagatacttctggggcaatctgcctggcatgaacagacccctggccagcaccgtgaacgacaagctggagctgcaggagtgcctggagcacggccggatcgccaagttcagcaaggtgagaaccatcaccacccgaagcaacagcatcaaacaaggcaaggaccagcactttcctgtgttcatgaacgagaaggaggacatcctgtggtgtaccgagatggagagagtgttcgggttcccagtccactacacagatgtcagcaacatgtctagactggccagacagagactgctgggaagaagctggtccgtccctgtgatcagacacctgttcgcccctctgaaggagtacttcgcctgcgtgagcagcggcaacagcaacgccaacagccggggccccagcttctctagcggcctggtgccactgtccctgagagggagccacatgggccccatggagatctacaaaaccgtgagcgcctggaagcggcagcctgtgcgcgtgctgagcctgtttcggaatatcgataaagtcctgaaaagcctgggattcctggagagcggctctggctccggcggtggcaccctgaagtacgtggaggatgtgacaaacgtggtcagacgggatgtggagaagtggggccccttcgatctggtgtacggcagcacccaacccctgggcagctcttgtgaccggtgccctggctggtacatgtttcagttccaccggatcctgcagtacgccctgccgagacaggagtcccagcggccattcttttggattttcatggacaacttgctgctgaccgaggatgaccaggaaactaccactcggttcctgcagaccgaagccgtgaccctgcaggacgtgagaggccgggactaccagaacgccatgcgggtgtggtccaacatccctggactgaaaagcaagcacgcacctctgacccctaaagaagaggagtacctgcaggcccaggtgcggagcagaagcaagctggacgcccctaaggtggatctgctggtgaagaattgcctcctgcccctgagagagtacttcaagtatttcagccagaatagtctgcccctgggcggcccaagcagcggcgcccctcctcccagcggcggcagcccagccggctccccaacctctaccgaggagggcacctctgagtccgccacccccgagagcggccctggcacctccaccgagcccagcgagggcagcgcacccggcagccctgccggcagccccacctccacagaggagggaaccagcaccgagcccagcgaaggcagcgccccaggcaccagcaccgagcctagtgagggcggctctggcggcggcagcgcccaggagattaaacggatcaacaagatcagaagaagacttgtgaaagacagcaacaccaagaaggccggcaagacaggccccatgaaaaccctgctggttagagtgatgacacccgatctgagagagcggctggaaaacctgagaaagaagcctgaaaatatcccccagcccatcagcaatacatctagagccaacctgaataagctgctgaccgattacaccgaaatgaagaaggcgatcctgcatgtgtactgggaagagttccagaaggaccctgtgggcctgatgagccgggtggcccagcctgccagcaagaagatcgatcagaacaagctgaaacctgagatggacgagaagggcaacctgaccaccgccggctttgcctgctctcagtgtggccagcccctgttcgtgtacaagctggagcaggtgtctgagaagggcaaggcttacaccaactacttcggacggtgcaatgtggccgagcacgaaaagctgatcctgctggcccagctgaagcccgagaaggatagcgacgaagccgtgacatatagcctgggaaagtttgggcagagggccctggatttctacagcattcatgtgaccaaggagtccacccaccccgtgaagcccctggcccagatcgccggaaacagatacgcctccggacctgtgggaaaggccctgagcgacgcatgtatgggcacaatcgcctccttcctgtctaagtaccaggacatcatcatcgaacaccagaaggtggtgaagggcaaccagaagagactggagagcctgcgggagctggccggcaaggaaaacctggaataccctagcgtgaccctgccacctcagcctcacaccaaggagggcgttgatgcctacaacgaagtgatcgcccgggtgcgaatgtgggtgaacctgaacctgtggcagaagctgaagctaagcagagatgatgccaagcctctgctgagactgaagggattcccttcctttcctctggtcgagagacaggccaacgaagtggactggtgggacatggtgtgtaacgtgaagaagctgatcaacgagaaaaaggaggatggcaaggtgttttggcagaatctggctggctacaagagacaggaagccctgagaccatacctgagcagcgaggaagatcggaagaagggaaagaaattcgctcggtaccagctgggcgacctgctgctgcacctggaaaagaagcacggcgaggactggggaaaggtgtacgacgaggcctgggagcggattgacaagaaagtggaaggcctgagcaagcacatcaagctggaagaggaacggagaagcgaggacgcccagagcaaggccgccctgaccgactggctgcgggctaaggccagcttcgtgatcgagggcctgaaggaggccgacaaggacgagttctgcagatgcgagctgaagctgcagaagtggtacggggacctgcggggaaagcccttcgccatcgaagccgagaacagcatcctggacatcagcggcttcagcaagcagtacaactgtgccttcatctggcagaaggacggcgtgaagaagctgaacctgtacctgatcatcaactacttcaagggcggcaagctgcggttcaagaagatcaaacctgaagccttcgaagccaacagattctacaccgtgatcaacaaaaagagcggcgagatcgtgcccatggaggtgaacttcaacttcgacgaccccaacctgatcatcctgcctctggcctttggcaagagacagggcagagaattcatctggaacgacctgctgtccctggaaaccggcagcctgaagctggccaacggaagagtgatcgagaagacactgtacaacagaagaacccggcaggatgagcctgccctgttcgtggccctgaccttcgagcggcgggaggtcctggactcctccaatatcaaaccaatgaacctgatcggcgtggcaagaggcgaaaacatccccgccgtgatcgccctgaccgaccccgagggctgcccactgagccggtttaaggatagcctgggaaacccaacccacatcctgagaatcggcgagagctataaggagaagcagcggaccatccaggccaagaaggaggtggagcagcggagagccggcggctacagccggaagtacgccagcaaagccaagaatctggcagacgatatggtgagaaacaccgctagagatctgctgtactacgccgtgacccaggatgccatgctgatcttcgccaacctgagccggggcttcggccggcagggcaagcggaccttcatggccgagagacagtacacacggatggaggactggctgaccgccaagctggcctacgagggcctgagcaagacctacctgtccaagacactggcccagtacacctccaagacatgcagcaactgtgggtttaccatcaccagcgccgactacgacagggtgctggagaagctgaagaagacagcaacaggctggatgaccacaattaacggcaaggagctgaaggtggagggccagattacctactacaacagatacaagagacagaacgtagtcaaggacctgtccgtcgagctggatagactgagcgaagaatctgtgaacaacgacatctcctcctggacaaagggcagaagcggagaagctctgagcctcctgaagaaaagattctcccatagacccgtgcaggagaagttcgtgtgcctgaactgcggcttcgagacacacgcagccgagcaagccgccctgaacatcgccagatcctggctgttcctgcggagccaggagtacaagaaataccagacaaacaagacaaccggcaacaccgataagagagccttcgtcgagacctggcagtccttttaccggaagaagcttaaggaggtgtggaaacctgccgtgcggtctggcggatctggcggaggctccacaagcttccaggagctggtggtgttcagggacgtggccgtggagttctgcaaggacgagtgggagtgcctgggccccgaccagaggagcctgtacagggacgtgatgctggagacctacagcaacttcgtgagcctgggcctggccgtgagcaagcccagcgtgatcagcctgctggagcagggcaaggagccctggatggtggagcaggccggctggtaccccgacctgctgagcgtgaacgagaccaccagccccaagaaaaagagaaaagtctaagctgccttctgcggggcttgccttctggccatgcccttcttctctcccttgcacctgtacctcttggtctttgaataaagcctgagtaggaaggctagcaaaaaaaaaaaaaaaaaaaaaaaaaaaaaaaaaaaaaaaaaaaaaaaaaaaaaaaaaaaaaaaaaaaaaaaaaaaaaaaa

SEQ ID NO: 6715 - RNA, 5797 nt, synthetic construct
  source 1..5797: mol_type = other RNA
aggaaataagagagaaaagaagagtaagaagaaatataagagccaccatggcccctaagaagaagcgtaaagtgagccggatggaacgcctcgtctacgaggtgcggcagaagtgcagaaacatcgaggacatctgcatctcctgcggatctctgaacgtgaccctggagcacccactgttcatcggcggcatgtgccagaactgtaaaaactgttttctggagtgtgcctatcaatacgacgatgacggctaccagagctactgcaccatctgttgcggcggaagagaggtgctgatgtgtggaaataacaactgctgccggtgcttctgcgtggaatgcgtggacctgctggtgggccccggcgccgcccaggccgctattaaggaagatccttggaactgctacatgtgcggccacaagggcacatacggcctgctgagacggagagaggactggcctagcagactgcagatgttcttcgccaataaccacgaccaggagttcgacccccctaaggtgtaccctcccgtccccgccgagaagagaaagcccatccgggtcctgagcctgttcgatggcatcgccaccggtctgctggtgctgaaggacctgggcatccaggtggataggtacattgcctccgaggtgtgcgaggactccatcaccgtgggaatggtgcgtcatcagggcaagatcatgtacgtgggcgacgtgcggagcgtgacacagaagcatatccaggagtggggccctttcgacctggtgatcggcggcagcccttgcaatgacctgagcatcgtgaacccagcccggaagggcctgtacgagggaaccggcagactgttcttcgagttttacagactgctgcacgacgcccggcctaaggaaggcgacgaccggcccttcttttggctgttcgagaatgtggtggccatgggagtcagcgacaagcgggatattagccggttcctggagagcaaccccgtgatgatcgatgccaaggaagtgagcgccgcccaccgggccagatacttctggggcaatctgcctggcatgaacagacccctggccagcaccgtgaacgacaagctggagctgcaggagtgcctggagcacggccggatcgccaagttcagcaaggtgagaaccatcaccacccgaagcaacagcatcaaacaaggcaaggaccagcactttcctgtgttcatgaacgagaaggaggacatcctgtggtgtaccgagatggagagagtgttcgggttcccagtccactacacagatgtcagcaacatgtctagactggccagacagagactgctgggaagaagctggtccgtccctgtgatcagacacctgttcgcccctctgaaggagtacttcgcctgcgtgagcagcggcaacagcaacgccaacagccggggccccagcttctctagcggcctggtgccactgtccctgagagggagccacatgggccccatggagatctacaaaaccgtgagcgcctggaagcggcagcctgtgcgcgtgctgagcctgtttcggaatatcgataaagtcctgaaaagcctgggattcctggagagcggctctggctccggcggtggcaccctgaagtacgtggaggatgtgacaaacgtggtcagacgggatgtggagaagtggggccccttcgatctggtgtacggcagcacccaacccctgggcagctcttgtgaccggtgccctggctggtacatgtttcagttccaccggatcctgcagtacgccctgccgagacaggagtcccagcggccattcttttggattttcatggacaacttgctgctgaccgaggatgaccaggaaactaccactcggttcctgcagaccgaagccgtgaccctgcaggacgtgagaggccgggactaccagaacgccatgcgggtgtggtccaacatccctggactgaaaagcaagcacgcacctctgacccctaaagaagaggagtacctgcaggcccaggtgcggagcagaagcaagctggacgcccctaaggtggatctgctggtgaagaattgcctcctgcccctgagagagtacttcaagtatttcagccagaatagtctgcccctgggcggcccaagcagcggcgcccctcctcccagcggcggcagcccagccggctccccaacctctaccgaggagggcacctctgagtccgccacccccgagagcggccctggcacctccaccgagcccagcgagggcagcgcacccggcagccctgccggcagccccacctccacagaggagggaaccagcaccgagcccagcgaaggcagcgccccaggcaccagcaccgagcctagtgagggcggctctggcggcggcagcgcccaggagattaaacggatcaacaagatcagaagaagacttgtgaaagacagcaacaccaagaaggccggcaagacaggccccatgaaaaccctgctggttagagtgatgacacccgatctgagagagcggctggaaaacctgagaaagaagcctgaaaatatcccccagcccatcagcaatacatctagagccaacctgaataagctgctgaccgattacaccgaaatgaagaaggcgatcctgcatgtgtactgggaagagttccagaaggaccctgtgggcctgatgagccgggtggcccagcctgccagcaagaagatcgatcagaacaagctgaaacctgagatggacgagaagggcaacctgaccaccgccggctttgcctgctctcagtgtggccagcccctgttcgtgtacaagctggagcaggtgtctgagaagggcaaggcttacaccaactacttcggacggtgcaatgtggccgagcacgaaaagctgatcctgctggcccagctgaagcccgagaaggatagcgacgaagccgtgacatatagcctgggaaagtttgggcagagggccctggatttctacagcattcatgtgaccaaggagtccacccaccccgtgaagcccctggcccagatcgccggaaacagatacgcctccggacctgtgggaaaggccctgagcgacgcatgtatgggcacaatcgcctccttcctgtctaagtaccaggacatcatcatcgaacaccagaaggtggtgaagggcaaccagaagagactggagagcctgcgggagctggccggcaaggaaaacctggaataccctagcgtgaccctgccacctcagcctcacaccaaggagggcgttgatgcctacaacgaagtgatcgcccgggtgcgaatgtgggtgaacctgaacctgtggcagaagctgaagctaagcagagatgatgccaagcctctgctgagactgaagggattcccttcctttcctctggtcgagagacaggccaacgaagtggactggtgggacatggtgtgtaacgtgaagaagctgatcaacgagaaaaaggaggatggcaaggtgttttggcagaatctggctggctacaagagacaggaagccctgagaccatacctgagcagcgaggaagatcggaagaagggaaagaaattcgctcggtaccagctgggcgacctgctgctgcacctggaaaagaagcacggcgaggactggggaaaggtgtacgacgaggcctgggagcggattgacaagaaagtggaaggcctgagcaagcacatcaagctggaagaggaacggagaagcgaggacgcccagagcaaggccgccctgaccgactggctgcgggctaaggccagcttcgtgatcgagggcctgaaggaggccgacaaggacgagttctgcagatgcgagctgaagctgcagaagtggtacggggacctgcggggaaagcccttcgccatcgaagccgagaacagcatcctggacatcagcggcttcagcaagcagtacaactgtgccttcatctggcagaaggacggcgtgaagaagctgaacctgtacctgatcatcaactacttcaagggcggcaagctgcggttcaagaagatcaaacctgaagccttcgaagccaacagattctacaccgtgatcaacaaaaagagcggcgagatcgtgcccatggaggtgaacttcaacttcgacgaccccaacctgatcatcctgcctctggcctttggcaagagacagggcagagaattcatctggaacgacctgctgtccctggaaaccggcagcctgaagctggccaacggaagagtgatcgagaagacactgtacaacagaagaacccggcaggatgagcctgccctgttcgtggccctgaccttcgagcggcgggaggtcctggactcctccaatatcaaaccaatgaacctgatcggcgtggcaagaggcgaaaacatccccgccgtgatcgccctgaccgaccccgagggctgcccactgagccggtttaaggatagcctgggaaacccaacccacatcctgagaatcggcgagagctataaggagaagcagcggaccatccaggccaagaaggaggtggagcagcggagagccggcggctacagccggaagtacgccagcaaagccaagaatctggcagacgatatggtgagaaacaccgctagagatctgctgtactacgccgtgacccaggatgccatgctgatcttcgccaacctgagccggggcttcggccggcagggcaagcggaccttcatggccgagagacagtacacacggatggaggactggctgaccgccaagctggcctacgagggcctgagcaagacctacctgtccaagacactggcccagtacacctccaagacatgcagcaactgtgggtttaccatcaccagcgccgactacgacagggtgctggagaagctgaagaagacagcaacaggctggatgaccacaattaacggcaaggagctgaaggtggagggccagattacctactacaacagatacaagagacagaacgtagtcaaggacctgtccgtcgagctggatagactgagcgaagaatctgtgaacaacgacatctcctcctggacaaagggcagaagcggagaagctctgagcctcctgaagaaaagattctcccatagacccgtgcaggagaagttcgtgtgcctgaactgcggcttcgagacacacgcagccgagcaagccgccctgaacatcgccagatcctggctgttcctgcggagccaggagtacaagaaataccagacaaacaagacaaccggcaacaccgataagagagccttcgtcgagacctggcagtccttttaccggaagaagcttaaggaggtgtggaaacctgccgtgcggtctggcggatctggcggaggctccacaagcttccaggagcccgtgaccttcgaggacgtggtggtgtacttcacccagaacgagtggaccagcctgcagcccagccagagggccctgtacagggaggtgatgctggagaactacgccaccgtgaccagcctgagcgccttccccttcagcaagcccgacctgatcttcaggctggagcagggcgaggccgcctggggcagcgacccctggaccctggccggcgaggaggcccccaggggcctgaccagccccaagaaaaagagaaaagtctaagctgccttctgcggggcttgccttctggccatgcccttcttctctcccttgcacctgtacctcttggtctttgaataaagcctgagtaggaaggctagcaaaaaaaaaaaaaaaaaaaaaaaaaaaaaaaaaaaaaaaaaaaaaaaaaaaaaaaaaaaaaaaaaaaaaaaaaaaaaaaa

SEQ ID NO: 6716 - RNA, 5797 nt, synthetic construct
  source 1..5797: mol_type = other RNA
aggaaataagagagaaaagaagagtaagaagaaatataagagccaccatggcccctaagaagaagcgtaaagtgagccggatggaacgcctcgtctacgaggtgcggcagaagtgcagaaacatcgaggacatctgcatctcctgcggatctctgaacgtgaccctggagcacccactgttcatcggcggcatgtgccagaactgtaaaaactgttttctggagtgtgcctatcaatacgacgatgacggctaccagagctactgcaccatctgttgcggcggaagagaggtgctgatgtgtggaaataacaactgctgccggtgcttctgcgtggaatgcgtggacctgctggtgggccccggcgccgcccaggccgctattaaggaagatccttggaactgctacatgtgcggccacaagggcacatacggcctgctgagacggagagaggactggcctagcagactgcagatgttcttcgccaataaccacgaccaggagttcgacccccctaaggtgtaccctcccgtccccgccgagaagagaaagcccatccgggtcctgagcctgttcgatggcatcgccaccggtctgctggtgctgaaggacctgggcatccaggtggataggtacattgcctccgaggtgtgcgaggactccatcaccgtgggaatggtgcgtcatcagggcaagatcatgtacgtgggcgacgtgcggagcgtgacacagaagcatatccaggagtggggccctttcgacctggtgatcggcggcagcccttgcaatgacctgagcatcgtgaacccagcccggaagggcctgtacgagggaaccggcagactgttcttcgagttttacagactgctgcacgacgcccggcctaaggaaggcgacgaccggcccttcttttggctgttcgagaatgtggtggccatgggagtcagcgacaagcgggatattagccggttcctggagagcaaccccgtgatgatcgatgccaaggaagtgagcgccgcccaccgggccagatacttctggggcaatctgcctggcatgaacagacccctggccagcaccgtgaacgacaagctggagctgcaggagtgcctggagcacggccggatcgccaagttcagcaaggtgagaaccatcaccacccgaagcaacagcatcaaacaaggcaaggaccagcactttcctgtgttcatgaacgagaaggaggacatcctgtggtgtaccgagatggagagagtgttcgggttcccagtccactacacagatgtcagcaacatgtctagactggccagacagagactgctgggaagaagctggtccgtccctgtgatcagacacctgttcgcccctctgaaggagtacttcgcctgcgtgagcagcggcaacagcaacgccaacagccggggccccagcttctctagcggcctggtgccactgtccctgagagggagccacatgggccccatggagatctacaaaaccgtgagcgcctggaagcggcagcctgtgcgcgtgctgagcctgtttcggaatatcgataaagtcctgaaaagcctgggattcctggagagcggctctggctccggcggtggcaccctgaagtacgtggaggatgtgacaaacgtggtcagacgggatgtggagaagtggggccccttcgatctggtgtacggcagcacccaacccctgggcagctcttgtgaccggtgccctggctggtacatgtttcagttccaccggatcctgcagtacgccctgccgagacaggagtcccagcggccattcttttggattttcatggacaacttgctgctgaccgaggatgaccaggaaactaccactcggttcctgcagaccgaagccgtgaccctgcaggacgtgagaggccgggactaccagaacgccatgcgggtgtggtccaacatccctggactgaaaagcaagcacgcacctctgacccctaaagaagaggagtacctgcaggcccaggtgcggagcagaagcaagctggacgcccctaaggtggatctgctggtgaagaattgcctcctgcccctgagagagtacttcaagtatttcagccagaatagtctgcccctgggcggcccaagcagcggcgcccctcctcccagcggcggcagcccagccggctccccaacctctaccgaggagggcacctctgagtccgccacccccgagagcggccctggcacctccaccgagcccagcgagggcagcgcacccggcagccctgccggcagccccacctccacagaggagggaaccagcaccgagcccagcgaaggcagcgccccaggcaccagcaccgagcctagtgagggcggctctggcggcggcagcgcccaggagattaaacggatcaacaagatcagaagaagacttgtgaaagacagcaacaccaagaaggccggcaagacaggccccatgaaaaccctgctggttagagtgatgacacccgatctgagagagcggctggaaaacctgagaaagaagcctgaaaatatcccccagcccatcagcaatacatctagagccaacctgaataagctgctgaccgattacaccgaaatgaagaaggcgatcctgcatgtgtactgggaagagttccagaaggaccctgtgggcctgatgagccgggtggcccagcctgccagcaagaagatcgatcagaacaagctgaaacctgagatggacgagaagggcaacctgaccaccgccggctttgcctgctctcagtgtggccagcccctgttcgtgtacaagctggagcaggtgtctgagaagggcaaggcttacaccaactacttcggacggtgcaatgtggccgagcacgaaaagctgatcctgctggcccagctgaagcccgagaaggatagcgacgaagccgtgacatatagcctgggaaagtttgggcagagggccctggatttctacagcattcatgtgaccaaggagtccacccaccccgtgaagcccctggcccagatcgccggaaacagatacgcctccggacctgtgggaaaggccctgagcgacgcatgtatgggcacaatcgcctccttcctgtctaagtaccaggacatcatcatcgaacaccagaaggtggtgaagggcaaccagaagagactggagagcctgcgggagctggccggcaaggaaaacctggaataccctagcgtgaccctgccacctcagcctcacaccaaggagggcgttgatgcctacaacgaagtgatcgcccgggtgcgaatgtgggtgaacctgaacctgtggcagaagctgaagctaagcagagatgatgccaagcctctgctgagactgaagggattcccttcctttcctctggtcgagagacaggccaacgaagtggactggtgggacatggtgtgtaacgtgaagaagctgatcaacgagaaaaaggaggatggcaaggtgttttggcagaatctggctggctacaagagacaggaagccctgagaccatacctgagcagcgaggaagatcggaagaagggaaagaaattcgctcggtaccagctgggcgacctgctgctgcacctggaaaagaagcacggcgaggactggggaaaggtgtacgacgaggcctgggagcggattgacaagaaagtggaaggcctgagcaagcacatcaagctggaagaggaacggagaagcgaggacgcccagagcaaggccgccctgaccgactggctgcgggctaaggccagcttcgtgatcgagggcctgaaggaggccgacaaggacgagttctgcagatgcgagctgaagctgcagaagtggtacggggacctgcggggaaagcccttcgccatcgaagccgagaacagcatcctggacatcagcggcttcagcaagcagtacaactgtgccttcatctggcagaaggacggcgtgaagaagctgaacctgtacctgatcatcaactacttcaagggcggcaagctgcggttcaagaagatcaaacctgaagccttcgaagccaacagattctacaccgtgatcaacaaaaagagcggcgagatcgtgcccatggaggtgaacttcaacttcgacgaccccaacctgatcatcctgcctctggcctttggcaagagacagggcagagaattcatctggaacgacctgctgtccctggaaaccggcagcctgaagctggccaacggaagagtgatcgagaagacactgtacaacagaagaacccggcaggatgagcctgccctgttcgtggccctgaccttcgagcggcgggaggtcctggactcctccaatatcaaaccaatgaacctgatcggcgtggcaagaggcgaaaacatccccgccgtgatcgccctgaccgaccccgagggctgcccactgagccggtttaaggatagcctgggaaacccaacccacatcctgagaatcggcgagagctataaggagaagcagcggaccatccaggccaagaaggaggtggagcagcggagagccggcggctacagccggaagtacgccagcaaagccaagaatctggcagacgatatggtgagaaacaccgctagagatctgctgtactacgccgtgacccaggatgccatgctgatcttcgccaacctgagccggggcttcggccggcagggcaagcggaccttcatggccgagagacagtacacacggatggaggactggctgaccgccaagctggcctacgagggcctgagcaagacctacctgtccaagacactggcccagtacacctccaagacatgcagcaactgtgggtttaccatcaccagcgccgactacgacagggtgctggagaagctgaagaagacagcaacaggctggatgaccacaattaacggcaaggagctgaaggtggagggccagattacctactacaacagatacaagagacagaacgtagtcaaggacctgtccgtcgagctggatagactgagcgaagaatctgtgaacaacgacatctcctcctggacaaagggcagaagcggagaagctctgagcctcctgaagaaaagattctcccatagacccgtgcaggagaagttcgtgtgcctgaactgcggcttcgagacacacgcagccgagcaagccgccctgaacatcgccagatcctggctgttcctgcggagccaggagtacaagaaataccagacaaacaagacaaccggcaacaccgataagagagccttcgtcgagacctggcagtccttttaccggaagaagcttaaggaggtgtggaaacctgccgtgcggtctggcggatctggcggaggctccacaagcatggccgccatccccctgaaggcccagtgccaggagaccgtgaccttcgaggacgtggccgtgcacttcaccaagaccgagtggaccggcctgagccccgcccagagggccctgtacaggagcgtgatgctggagaactacggcaacctgaccgccatgggctacctggtgcccaagcccgccctgatcagcctgctggagggcggcgacatggcctggggcctggaggcccaggacgaccccaccagccccaagaaaaagagaaaagtctaagctgccttctgcggggcttgccttctggccatgcccttcttctctcccttgcacctgtacctcttggtctttgaataaagcctgagtaggaaggctagcaaaaaaaaaaaaaaaaaaaaaaaaaaaaaaaaaaaaaaaaaaaaaaaaaaaaaaaaaaaaaaaaaaaaaaaaaaaaaaaa

SEQ ID NO: 6717 - RNA, 5797 nt, synthetic construct
  source 1..5797: mol_type = other RNA
aggaaataagagagaaaagaagagtaagaagaaatataagagccaccatggcccctaagaagaagcgtaaagtgagccggatggaacgcctcgtctacgaggtgcggcagaagtgcagaaacatcgaggacatctgcatctcctgcggatctctgaacgtgaccctggagcacccactgttcatcggcggcatgtgccagaactgtaaaaactgttttctggagtgtgcctatcaatacgacgatgacggctaccagagctactgcaccatctgttgcggcggaagagaggtgctgatgtgtggaaataacaactgctgccggtgcttctgcgtggaatgcgtggacctgctggtgggccccggcgccgcccaggccgctattaaggaagatccttggaactgctacatgtgcggccacaagggcacatacggcctgctgagacggagagaggactggcctagcagactgcagatgttcttcgccaataaccacgaccaggagttcgacccccctaaggtgtaccctcccgtccccgccgagaagagaaagcccatccgggtcctgagcctgttcgatggcatcgccaccggtctgctggtgctgaaggacctgggcatccaggtggataggtacattgcctccgaggtgtgcgaggactccatcaccgtgggaatggtgcgtcatcagggcaagatcatgtacgtgggcgacgtgcggagcgtgacacagaagcatatccaggagtggggccctttcgacctggtgatcggcggcagcccttgcaatgacctgagcatcgtgaacccagcccggaagggcctgtacgagggaaccggcagactgttcttcgagttttacagactgctgcacgacgcccggcctaaggaaggcgacgaccggcccttcttttggctgttcgagaatgtggtggccatgggagtcagcgacaagcgggatattagccggttcctggagagcaaccccgtgatgatcgatgccaaggaagtgagcgccgcccaccgggccagatacttctggggcaatctgcctggcatgaacagacccctggccagcaccgtgaacgacaagctggagctgcaggagtgcctggagcacggccggatcgccaagttcagcaaggtgagaaccatcaccacccgaagcaacagcatcaaacaaggcaaggaccagcactttcctgtgttcatgaacgagaaggaggacatcctgtggtgtaccgagatggagagagtgttcgggttcccagtccactacacagatgtcagcaacatgtctagactggccagacagagactgctgggaagaagctggtccgtccctgtgatcagacacctgttcgcccctctgaaggagtacttcgcctgcgtgagcagcggcaacagcaacgccaacagccggggccccagcttctctagcggcctggtgccactgtccctgagagggagccacatgggccccatggagatctacaaaaccgtgagcgcctggaagcggcagcctgtgcgcgtgctgagcctgtttcggaatatcgataaagtcctgaaaagcctgggattcctggagagcggctctggctccggcggtggcaccctgaagtacgtggaggatgtgacaaacgtggtcagacgggatgtggagaagtggggccccttcgatctggtgtacggcagcacccaacccctgggcagctcttgtgaccggtgccctggctggtacatgtttcagttccaccggatcctgcagtacgccctgccgagacaggagtcccagcggccattcttttggattttcatggacaacttgctgctgaccgaggatgaccaggaaactaccactcggttcctgcagaccgaagccgtgaccctgcaggacgtgagaggccgggactaccagaacgccatgcgggtgtggtccaacatccctggactgaaaagcaagcacgcacctctgacccctaaagaagaggagtacctgcaggcccaggtgcggagcagaagcaagctggacgcccctaaggtggatctgctggtgaagaattgcctcctgcccctgagagagtacttcaagtatttcagccagaatagtctgcccctgggcggcccaagcagcggcgcccctcctcccagcggcggcagcccagccggctccccaacctctaccgaggagggcacctctgagtccgccacccccgagagcggccctggcacctccaccgagcccagcgagggcagcgcacccggcagccctgccggcagccccacctccacagaggagggaaccagcaccgagcccagcgaaggcagcgccccaggcaccagcaccgagcctagtgagggcggctctggcggcggcagcgcccaggagattaaacggatcaacaagatcagaagaagacttgtgaaagacagcaacaccaagaaggccggcaagacaggccccatgaaaaccctgctggttagagtgatgacacccgatctgagagagcggctggaaaacctgagaaagaagcctgaaaatatcccccagcccatcagcaatacatctagagccaacctgaataagctgctgaccgattacaccgaaatgaagaaggcgatcctgcatgtgtactgggaagagttccagaaggaccctgtgggcctgatgagccgggtggcccagcctgccagcaagaagatcgatcagaacaagctgaaacctgagatggacgagaagggcaacctgaccaccgccggctttgcctgctctcagtgtggccagcccctgttcgtgtacaagctggagcaggtgtctgagaagggcaaggcttacaccaactacttcggacggtgcaatgtggccgagcacgaaaagctgatcctgctggcccagctgaagcccgagaaggatagcgacgaagccgtgacatatagcctgggaaagtttgggcagagggccctggatttctacagcattcatgtgaccaaggagtccacccaccccgtgaagcccctggcccagatcgccggaaacagatacgcctccggacctgtgggaaaggccctgagcgacgcatgtatgggcacaatcgcctccttcctgtctaagtaccaggacatcatcatcgaacaccagaaggtggtgaagggcaaccagaagagactggagagcctgcgggagctggccggcaaggaaaacctggaataccctagcgtgaccctgccacctcagcctcacaccaaggagggcgttgatgcctacaacgaagtgatcgcccgggtgcgaatgtgggtgaacctgaacctgtggcagaagctgaagctaagcagagatgatgccaagcctctgctgagactgaagggattcccttcctttcctctggtcgagagacaggccaacgaagtggactggtgggacatggtgtgtaacgtgaagaagctgatcaacgagaaaaaggaggatggcaaggtgttttggcagaatctggctggctacaagagacaggaagccctgagaccatacctgagcagcgaggaagatcggaagaagggaaagaaattcgctcggtaccagctgggcgacctgctgctgcacctggaaaagaagcacggcgaggactggggaaaggtgtacgacgaggcctgggagcggattgacaagaaagtggaaggcctgagcaagcacatcaagctggaagaggaacggagaagcgaggacgcccagagcaaggccgccctgaccgactggctgcgggctaaggccagcttcgtgatcgagggcctgaaggaggccgacaaggacgagttctgcagatgcgagctgaagctgcagaagtggtacggggacctgcggggaaagcccttcgccatcgaagccgagaacagcatcctggacatcagcggcttcagcaagcagtacaactgtgccttcatctggcagaaggacggcgtgaagaagctgaacctgtacctgatcatcaactacttcaagggcggcaagctgcggttcaagaagatcaaacctgaagccttcgaagccaacagattctacaccgtgatcaacaaaaagagcggcgagatcgtgcccatggaggtgaacttcaacttcgacgaccccaacctgatcatcctgcctctggcctttggcaagagacagggcagagaattcatctggaacgacctgctgtccctggaaaccggcagcctgaagctggccaacggaagagtgatcgagaagacactgtacaacagaagaacccggcaggatgagcctgccctgttcgtggccctgaccttcgagcggcgggaggtcctggactcctccaatatcaaaccaatgaacctgatcggcgtggcaagaggcgaaaacatccccgccgtgatcgccctgaccgaccccgagggctgcccactgagccggtttaaggatagcctgggaaacccaacccacatcctgagaatcggcgagagctataaggagaagcagcggaccatccaggccaagaaggaggtggagcagcggagagccggcggctacagccggaagtacgccagcaaagccaagaatctggcagacgatatggtgagaaacaccgctagagatctgctgtactacgccgtgacccaggatgccatgctgatcttcgccaacctgagccggggcttcggccggcagggcaagcggaccttcatggccgagagacagtacacacggatggaggactggctgaccgccaagctggcctacgagggcctgagcaagacctacctgtccaagacactggcccagtacacctccaagacatgcagcaactgtgggtttaccatcaccagcgccgactacgacagggtgctggagaagctgaagaagacagcaacaggctggatgaccacaattaacggcaaggagctgaaggtggagggccagattacctactacaacagatacaagagacagaacgtagtcaaggacctgtccgtcgagctggatagactgagcgaagaatctgtgaacaacgacatctcctcctggacaaagggcagaagcggagaagctctgagcctcctgaagaaaagattctcccatagacccgtgcaggagaagttcgtgtgcctgaactgcggcttcgagacacacgcagccgagcaagccgccctgaacatcgccagatcctggctgttcctgcggagccaggagtacaagaaataccagacaaacaagacaaccggcaacaccgataagagagccttcgtcgagacctggcagtccttttaccggaagaagcttaaggaggtgtggaaacctgccgtgcggtctggcggatctggcggaggctccacaagcgtgcagggcagcgtgagcttcgaggacgtggccgtgggcttcagccaggaggagtggcagatcctgggccccagccagaaggccctgtactgggacgtgatgctggagaactactgcaacctggtgagcgtgggctaccaggcccccacccccaacagcctgttccagctggagcagggcggccccccctggaccgtggagggcgccgccctgagcagcacctgcagcggctaccaggccaccaccagccccaagaaaaagagaaaagtctaagctgccttctgcggggcttgccttctggccatgcccttcttctctcccttgcacctgtacctcttggtctttgaataaagcctgagtaggaaggctagcaaaaaaaaaaaaaaaaaaaaaaaaaaaaaaaaaaaaaaaaaaaaaaaaaaaaaaaaaaaaaaaaaaaaaaaaaaaaaaaa

SEQ ID NO: 6718 - RNA, 5797 nt, synthetic construct
  source 1..5797: mol_type = other RNA
aggaaataagagagaaaagaagagtaagaagaaatataagagccaccatggcccctaagaagaagcgtaaagtgagccggatggaacgcctcgtctacgaggtgcggcagaagtgcagaaacatcgaggacatctgcatctcctgcggatctctgaacgtgaccctggagcacccactgttcatcggcggcatgtgccagaactgtaaaaactgttttctggagtgtgcctatcaatacgacgatgacggctaccagagctactgcaccatctgttgcggcggaagagaggtgctgatgtgtggaaataacaactgctgccggtgcttctgcgtggaatgcgtggacctgctggtgggccccggcgccgcccaggccgctattaaggaagatccttggaactgctacatgtgcggccacaagggcacatacggcctgctgagacggagagaggactggcctagcagactgcagatgttcttcgccaataaccacgaccaggagttcgacccccctaaggtgtaccctcccgtccccgccgagaagagaaagcccatccgggtcctgagcctgttcgatggcatcgccaccggtctgctggtgctgaaggacctgggcatccaggtggataggtacattgcctccgaggtgtgcgaggactccatcaccgtgggaatggtgcgtcatcagggcaagatcatgtacgtgggcgacgtgcggagcgtgacacagaagcatatccaggagtggggccctttcgacctggtgatcggcggcagcccttgcaatgacctgagcatcgtgaacccagcccggaagggcctgtacgagggaaccggcagactgttcttcgagttttacagactgctgcacgacgcccggcctaaggaaggcgacgaccggcccttcttttggctgttcgagaatgtggtggccatgggagtcagcgacaagcgggatattagccggttcctggagagcaaccccgtgatgatcgatgccaaggaagtgagcgccgcccaccgggccagatacttctggggcaatctgcctggcatgaacagacccctggccagcaccgtgaacgacaagctggagctgcaggagtgcctggagcacggccggatcgccaagttcagcaaggtgagaaccatcaccacccgaagcaacagcatcaaacaaggcaaggaccagcactttcctgtgttcatgaacgagaaggaggacatcctgtggtgtaccgagatggagagagtgttcgggttcccagtccactacacagatgtcagcaacatgtctagactggccagacagagactgctgggaagaagctggtccgtccctgtgatcagacacctgttcgcccctctgaaggagtacttcgcctgcgtgagcagcggcaacagcaacgccaacagccggggccccagcttctctagcggcctggtgccactgtccctgagagggagccacatgggccccatggagatctacaaaaccgtgagcgcctggaagcggcagcctgtgcgcgtgctgagcctgtttcggaatatcgataaagtcctgaaaagcctgggattcctggagagcggctctggctccggcggtggcaccctgaagtacgtggaggatgtgacaaacgtggtcagacgggatgtggagaagtggggccccttcgatctggtgtacggcagcacccaacccctgggcagctcttgtgaccggtgccctggctggtacatgtttcagttccaccggatcctgcagtacgccctgccgagacaggagtcccagcggccattcttttggattttcatggacaacttgctgctgaccgaggatgaccaggaaactaccactcggttcctgcagaccgaagccgtgaccctgcaggacgtgagaggccgggactaccagaacgccatgcgggtgtggtccaacatccctggactgaaaagcaagcacgcacctctgacccctaaagaagaggagtacctgcaggcccaggtgcggagcagaagcaagctggacgcccctaaggtggatctgctggtgaagaattgcctcctgcccctgagagagtacttcaagtatttcagccagaatagtctgcccctgggcggcccaagcagcggcgcccctcctcccagcggcggcagcccagccggctccccaacctctaccgaggagggcacctctgagtccgccacccccgagagcggccctggcacctccaccgagcccagcgagggcagcgcacccggcagccctgccggcagccccacctccacagaggagggaaccagcaccgagcccagcgaaggcagcgccccaggcaccagcaccgagcctagtgagggcggctctggcggcggcagcgcccaggagattaaacggatcaacaagatcagaagaagacttgtgaaagacagcaacaccaagaaggccggcaagacaggccccatgaaaaccctgctggttagagtgatgacacccgatctgagagagcggctggaaaacctgagaaagaagcctgaaaatatcccccagcccatcagcaatacatctagagccaacctgaataagctgctgaccgattacaccgaaatgaagaaggcgatcctgcatgtgtactgggaagagttccagaaggaccctgtgggcctgatgagccgggtggcccagcctgccagcaagaagatcgatcagaacaagctgaaacctgagatggacgagaagggcaacctgaccaccgccggctttgcctgctctcagtgtggccagcccctgttcgtgtacaagctggagcaggtgtctgagaagggcaaggcttacaccaactacttcggacggtgcaatgtggccgagcacgaaaagctgatcctgctggcccagctgaagcccgagaaggatagcgacgaagccgtgacatatagcctgggaaagtttgggcagagggccctggatttctacagcattcatgtgaccaaggagtccacccaccccgtgaagcccctggcccagatcgccggaaacagatacgcctccggacctgtgggaaaggccctgagcgacgcatgtatgggcacaatcgcctccttcctgtctaagtaccaggacatcatcatcgaacaccagaaggtggtgaagggcaaccagaagagactggagagcctgcgggagctggccggcaaggaaaacctggaataccctagcgtgaccctgccacctcagcctcacaccaaggagggcgttgatgcctacaacgaagtgatcgcccgggtgcgaatgtgggtgaacctgaacctgtggcagaagctgaagctaagcagagatgatgccaagcctctgctgagactgaagggattcccttcctttcctctggtcgagagacaggccaacgaagtggactggtgggacatggtgtgtaacgtgaagaagctgatcaacgagaaaaaggaggatggcaaggtgttttggcagaatctggctggctacaagagacaggaagccctgagaccatacctgagcagcgaggaagatcggaagaagggaaagaaattcgctcggtaccagctgggcgacctgctgctgcacctggaaaagaagcacggcgaggactggggaaaggtgtacgacgaggcctgggagcggattgacaagaaagtggaaggcctgagcaagcacatcaagctggaagaggaacggagaagcgaggacgcccagagcaaggccgccctgaccgactggctgcgggctaaggccagcttcgtgatcgagggcctgaaggaggccgacaaggacgagttctgcagatgcgagctgaagctgcagaagtggtacggggacctgcggggaaagcccttcgccatcgaagccgagaacagcatcctggacatcagcggcttcagcaagcagtacaactgtgccttcatctggcagaaggacggcgtgaagaagctgaacctgtacctgatcatcaactacttcaagggcggcaagctgcggttcaagaagatcaaacctgaagccttcgaagccaacagattctacaccgtgatcaacaaaaagagcggcgagatcgtgcccatggaggtgaacttcaacttcgacgaccccaacctgatcatcctgcctctggcctttggcaagagacagggcagagaattcatctggaacgacctgctgtccctggaaaccggcagcctgaagctggccaacggaagagtgatcgagaagacactgtacaacagaagaacccggcaggatgagcctgccctgttcgtggccctgaccttcgagcggcgggaggtcctggactcctccaatatcaaaccaatgaacctgatcggcgtggcaagaggcgaaaacatccccgccgtgatcgccctgaccgaccccgagggctgcccactgagccggtttaaggatagcctgggaaacccaacccacatcctgagaatcggcgagagctataaggagaagcagcggaccatccaggccaagaaggaggtggagcagcggagagccggcggctacagccggaagtacgccagcaaagccaagaatctggcagacgatatggtgagaaacaccgctagagatctgctgtactacgccgtgacccaggatgccatgctgatcttcgccaacctgagccggggcttcggccggcagggcaagcggaccttcatggccgagagacagtacacacggatggaggactggctgaccgccaagctggcctacgagggcctgagcaagacctacctgtccaagacactggcccagtacacctccaagacatgcagcaactgtgggtttaccatcaccagcgccgactacgacagggtgctggagaagctgaagaagacagcaacaggctggatgaccacaattaacggcaaggagctgaaggtggagggccagattacctactacaacagatacaagagacagaacgtagtcaaggacctgtccgtcgagctggatagactgagcgaagaatctgtgaacaacgacatctcctcctggacaaagggcagaagcggagaagctctgagcctcctgaagaaaagattctcccatagacccgtgcaggagaagttcgtgtgcctgaactgcggcttcgagacacacgcagccgagcaagccgccctgaacatcgccagatcctggctgttcctgcggagccaggagtacaagaaataccagacaaacaagacaaccggcaacaccgataagagagccttcgtcgagacctggcagtccttttaccggaagaagcttaaggaggtgtggaaacctgccgtgcggtctggcggatctggcggaggctccacaagcagctacggcagcctgagcttcgaggacgtgaccgtgggcttcagccaggaggagtggcagcacctggaccccgcccagaggaccctgtacagggacgtgatgctggagaactacagccacctggtggccgtgggctgctgcgtgcccaagcccgacgtgatcttcaggctggagcagggccagcagccctggatcgtggaggaggagagcctggaccagagctgccccgaggtgtgcaaggtgaccagccccaagaaaaagagaaaagtctaagctgccttctgcggggcttgccttctggccatgcccttcttctctcccttgcacctgtacctcttggtctttgaataaagcctgagtaggaaggctagcaaaaaaaaaaaaaaaaaaaaaaaaaaaaaaaaaaaaaaaaaaaaaaaaaaaaaaaaaaaaaaaaaaaaaaaaaaaaaaaa

SEQ ID NO: 6719 - RNA, 5797 nt, synthetic construct
  source 1..5797: mol_type = other RNA
aggaaataagagagaaaagaagagtaagaagaaatataagagccaccatggcccctaagaagaagcgtaaagtgagccggatggaacgcctcgtctacgaggtgcggcagaagtgcagaaacatcgaggacatctgcatctcctgcggatctctgaacgtgaccctggagcacccactgttcatcggcggcatgtgccagaactgtaaaaactgttttctggagtgtgcctatcaatacgacgatgacggctaccagagctactgcaccatctgttgcggcggaagagaggtgctgatgtgtggaaataacaactgctgccggtgcttctgcgtggaatgcgtggacctgctggtgggccccggcgccgcccaggccgctattaaggaagatccttggaactgctacatgtgcggccacaagggcacatacggcctgctgagacggagagaggactggcctagcagactgcagatgttcttcgccaataaccacgaccaggagttcgacccccctaaggtgtaccctcccgtccccgccgagaagagaaagcccatccgggtcctgagcctgttcgatggcatcgccaccggtctgctggtgctgaaggacctgggcatccaggtggataggtacattgcctccgaggtgtgcgaggactccatcaccgtgggaatggtgcgtcatcagggcaagatcatgtacgtgggcgacgtgcggagcgtgacacagaagcatatccaggagtggggccctttcgacctggtgatcggcggcagcccttgcaatgacctgagcatcgtgaacccagcccggaagggcctgtacgagggaaccggcagactgttcttcgagttttacagactgctgcacgacgcccggcctaaggaaggcgacgaccggcccttcttttggctgttcgagaatgtggtggccatgggagtcagcgacaagcgggatattagccggttcctggagagcaaccccgtgatgatcgatgccaaggaagtgagcgccgcccaccgggccagatacttctggggcaatctgcctggcatgaacagacccctggccagcaccgtgaacgacaagctggagctgcaggagtgcctggagcacggccggatcgccaagttcagcaaggtgagaaccatcaccacccgaagcaacagcatcaaacaaggcaaggaccagcactttcctgtgttcatgaacgagaaggaggacatcctgtggtgtaccgagatggagagagtgttcgggttcccagtccactacacagatgtcagcaacatgtctagactggccagacagagactgctgggaagaagctggtccgtccctgtgatcagacacctgttcgcccctctgaaggagtacttcgcctgcgtgagcagcggcaacagcaacgccaacagccggggccccagcttctctagcggcctggtgccactgtccctgagagggagccacatgggccccatggagatctacaaaaccgtgagcgcctggaagcggcagcctgtgcgcgtgctgagcctgtttcggaatatcgataaagtcctgaaaagcctgggattcctggagagcggctctggctccggcggtggcaccctgaagtacgtggaggatgtgacaaacgtggtcagacgggatgtggagaagtggggccccttcgatctggtgtacggcagcacccaacccctgggcagctcttgtgaccggtgccctggctggtacatgtttcagttccaccggatcctgcagtacgccctgccgagacaggagtcccagcggccattcttttggattttcatggacaacttgctgctgaccgaggatgaccaggaaactaccactcggttcctgcagaccgaagccgtgaccctgcaggacgtgagaggccgggactaccagaacgccatgcgggtgtggtccaacatccctggactgaaaagcaagcacgcacctctgacccctaaagaagaggagtacctgcaggcccaggtgcggagcagaagcaagctggacgcccctaaggtggatctgctggtgaagaattgcctcctgcccctgagagagtacttcaagtatttcagccagaatagtctgcccctgggcggcccaagcagcggcgcccctcctcccagcggcggcagcccagccggctccccaacctctaccgaggagggcacctctgagtccgccacccccgagagcggccctggcacctccaccgagcccagcgagggcagcgcacccggcagccctgccggcagccccacctccacagaggagggaaccagcaccgagcccagcgaaggcagcgccccaggcaccagcaccgagcctagtgagggcggctctggcggcggcagcgcccaggagattaaacggatcaacaagatcagaagaagacttgtgaaagacagcaacaccaagaaggccggcaagacaggccccatgaaaaccctgctggttagagtgatgacacccgatctgagagagcggctggaaaacctgagaaagaagcctgaaaatatcccccagcccatcagcaatacatctagagccaacctgaataagctgctgaccgattacaccgaaatgaagaaggcgatcctgcatgtgtactgggaagagttccagaaggaccctgtgggcctgatgagccgggtggcccagcctgccagcaagaagatcgatcagaacaagctgaaacctgagatggacgagaagggcaacctgaccaccgccggctttgcctgctctcagtgtggccagcccctgttcgtgtacaagctggagcaggtgtctgagaagggcaaggcttacaccaactacttcggacggtgcaatgtggccgagcacgaaaagctgatcctgctggcccagctgaagcccgagaaggatagcgacgaagccgtgacatatagcctgggaaagtttgggcagagggccctggatttctacagcattcatgtgaccaaggagtccacccaccccgtgaagcccctggcccagatcgccggaaacagatacgcctccggacctgtgggaaaggccctgagcgacgcatgtatgggcacaatcgcctccttcctgtctaagtaccaggacatcatcatcgaacaccagaaggtggtgaagggcaaccagaagagactggagagcctgcgggagctggccggcaaggaaaacctggaataccctagcgtgaccctgccacctcagcctcacaccaaggagggcgttgatgcctacaacgaagtgatcgcccgggtgcgaatgtgggtgaacctgaacctgtggcagaagctgaagctaagcagagatgatgccaagcctctgctgagactgaagggattcccttcctttcctctggtcgagagacaggccaacgaagtggactggtgggacatggtgtgtaacgtgaagaagctgatcaacgagaaaaaggaggatggcaaggtgttttggcagaatctggctggctacaagagacaggaagccctgagaccatacctgagcagcgaggaagatcggaagaagggaaagaaattcgctcggtaccagctgggcgacctgctgctgcacctggaaaagaagcacggcgaggactggggaaaggtgtacgacgaggcctgggagcggattgacaagaaagtggaaggcctgagcaagcacatcaagctggaagaggaacggagaagcgaggacgcccagagcaaggccgccctgaccgactggctgcgggctaaggccagcttcgtgatcgagggcctgaaggaggccgacaaggacgagttctgcagatgcgagctgaagctgcagaagtggtacggggacctgcggggaaagcccttcgccatcgaagccgagaacagcatcctggacatcagcggcttcagcaagcagtacaactgtgccttcatctggcagaaggacggcgtgaagaagctgaacctgtacctgatcatcaactacttcaagggcggcaagctgcggttcaagaagatcaaacctgaagccttcgaagccaacagattctacaccgtgatcaacaaaaagagcggcgagatcgtgcccatggaggtgaacttcaacttcgacgaccccaacctgatcatcctgcctctggcctttggcaagagacagggcagagaattcatctggaacgacctgctgtccctggaaaccggcagcctgaagctggccaacggaagagtgatcgagaagacactgtacaacagaagaacccggcaggatgagcctgccctgttcgtggccctgaccttcgagcggcgggaggtcctggactcctccaatatcaaaccaatgaacctgatcggcgtggcaagaggcgaaaacatccccgccgtgatcgccctgaccgaccccgagggctgcccactgagccggtttaaggatagcctgggaaacccaacccacatcctgagaatcggcgagagctataaggagaagcagcggaccatccaggccaagaaggaggtggagcagcggagagccggcggctacagccggaagtacgccagcaaagccaagaatctggcagacgatatggtgagaaacaccgctagagatctgctgtactacgccgtgacccaggatgccatgctgatcttcgccaacctgagccggggcttcggccggcagggcaagcggaccttcatggccgagagacagtacacacggatggaggactggctgaccgccaagctggcctacgagggcctgagcaagacctacctgtccaagacactggcccagtacacctccaagacatgcagcaactgtgggtttaccatcaccagcgccgactacgacagggtgctggagaagctgaagaagacagcaacaggctggatgaccacaattaacggcaaggagctgaaggtggagggccagattacctactacaacagatacaagagacagaacgtagtcaaggacctgtccgtcgagctggatagactgagcgaagaatctgtgaacaacgacatctcctcctggacaaagggcagaagcggagaagctctgagcctcctgaagaaaagattctcccatagacccgtgcaggagaagttcgtgtgcctgaactgcggcttcgagacacacgcagccgagcaagccgccctgaacatcgccagatcctggctgttcctgcggagccaggagtacaagaaataccagacaaacaagacaaccggcaacaccgataagagagccttcgtcgagacctggcagtccttttaccggaagaagcttaaggaggtgtggaaacctgccgtgcggtctggcggatctggcggaggctccacaagcgcccacggcagcgtgatgttcagcgacgtgagcatcgacttcagccaggaggagtgggagtacctgaacctggagcagagggacctgtacaggaacgtgatgctggagaactacagcaacctggtgagcctgggctgcttcatcagcaagcccgacgtgatcagcctgctggagcagggcaaggagccctggaaggtggtgaggaagggcaggaggccctacagcggcctggagaccaagaagaccagccccaagaaaaagagaaaagtctaagctgccttctgcggggcttgccttctggccatgcccttcttctctcccttgcacctgtacctcttggtctttgaataaagcctgagtaggaaggctagcaaaaaaaaaaaaaaaaaaaaaaaaaaaaaaaaaaaaaaaaaaaaaaaaaaaaaaaaaaaaaaaaaaaaaaaaaaaaaaaa

SEQ ID NO: 6720 - RNA, 5797 nt, synthetic construct
  source 1..5797: mol_type = other RNA
aggaaataagagagaaaagaagagtaagaagaaatataagagccaccatggcccctaagaagaagcgtaaagtgagccggatggaacgcctcgtctacgaggtgcggcagaagtgcagaaacatcgaggacatctgcatctcctgcggatctctgaacgtgaccctggagcacccactgttcatcggcggcatgtgccagaactgtaaaaactgttttctggagtgtgcctatcaatacgacgatgacggctaccagagctactgcaccatctgttgcggcggaagagaggtgctgatgtgtggaaataacaactgctgccggtgcttctgcgtggaatgcgtggacctgctggtgggccccggcgccgcccaggccgctattaaggaagatccttggaactgctacatgtgcggccacaagggcacatacggcctgctgagacggagagaggactggcctagcagactgcagatgttcttcgccaataaccacgaccaggagttcgacccccctaaggtgtaccctcccgtccccgccgagaagagaaagcccatccgggtcctgagcctgttcgatggcatcgccaccggtctgctggtgctgaaggacctgggcatccaggtggataggtacattgcctccgaggtgtgcgaggactccatcaccgtgggaatggtgcgtcatcagggcaagatcatgtacgtgggcgacgtgcggagcgtgacacagaagcatatccaggagtggggccctttcgacctggtgatcggcggcagcccttgcaatgacctgagcatcgtgaacccagcccggaagggcctgtacgagggaaccggcagactgttcttcgagttttacagactgctgcacgacgcccggcctaaggaaggcgacgaccggcccttcttttggctgttcgagaatgtggtggccatgggagtcagcgacaagcgggatattagccggttcctggagagcaaccccgtgatgatcgatgccaaggaagtgagcgccgcccaccgggccagatacttctggggcaatctgcctggcatgaacagacccctggccagcaccgtgaacgacaagctggagctgcaggagtgcctggagcacggccggatcgccaagttcagcaaggtgagaaccatcaccacccgaagcaacagcatcaaacaaggcaaggaccagcactttcctgtgttcatgaacgagaaggaggacatcctgtggtgtaccgagatggagagagtgttcgggttcccagtccactacacagatgtcagcaacatgtctagactggccagacagagactgctgggaagaagctggtccgtccctgtgatcagacacctgttcgcccctctgaaggagtacttcgcctgcgtgagcagcggcaacagcaacgccaacagccggggccccagcttctctagcggcctggtgccactgtccctgagagggagccacatgggccccatggagatctacaaaaccgtgagcgcctggaagcggcagcctgtgcgcgtgctgagcctgtttcggaatatcgataaagtcctgaaaagcctgggattcctggagagcggctctggctccggcggtggcaccctgaagtacgtggaggatgtgacaaacgtggtcagacgggatgtggagaagtggggccccttcgatctggtgtacggcagcacccaacccctgggcagctcttgtgaccggtgccctggctggtacatgtttcagttccaccggatcctgcagtacgccctgccgagacaggagtcccagcggccattcttttggattttcatggacaacttgctgctgaccgaggatgaccaggaaactaccactcggttcctgcagaccgaagccgtgaccctgcaggacgtgagaggccgggactaccagaacgccatgcgggtgtggtccaacatccctggactgaaaagcaagcacgcacctctgacccctaaagaagaggagtacctgcaggcccaggtgcggagcagaagcaagctggacgcccctaaggtggatctgctggtgaagaattgcctcctgcccctgagagagtacttcaagtatttcagccagaatagtctgcccctgggcggcccaagcagcggcgcccctcctcccagcggcggcagcccagccggctccccaacctctaccgaggagggcacctctgagtccgccacccccgagagcggccctggcacctccaccgagcccagcgagggcagcgcacccggcagccctgccggcagccccacctccacagaggagggaaccagcaccgagcccagcgaaggcagcgccccaggcaccagcaccgagcctagtgagggcggctctggcggcggcagcgcccaggagattaaacggatcaacaagatcagaagaagacttgtgaaagacagcaacaccaagaaggccggcaagacaggccccatgaaaaccctgctggttagagtgatgacacccgatctgagagagcggctggaaaacctgagaaagaagcctgaaaatatcccccagcccatcagcaatacatctagagccaacctgaataagctgctgaccgattacaccgaaatgaagaaggcgatcctgcatgtgtactgggaagagttccagaaggaccctgtgggcctgatgagccgggtggcccagcctgccagcaagaagatcgatcagaacaagctgaaacctgagatggacgagaagggcaacctgaccaccgccggctttgcctgctctcagtgtggccagcccctgttcgtgtacaagctggagcaggtgtctgagaagggcaaggcttacaccaactacttcggacggtgcaatgtggccgagcacgaaaagctgatcctgctggcccagctgaagcccgagaaggatagcgacgaagccgtgacatatagcctgggaaagtttgggcagagggccctggatttctacagcattcatgtgaccaaggagtccacccaccccgtgaagcccctggcccagatcgccggaaacagatacgcctccggacctgtgggaaaggccctgagcgacgcatgtatgggcacaatcgcctccttcctgtctaagtaccaggacatcatcatcgaacaccagaaggtggtgaagggcaaccagaagagactggagagcctgcgggagctggccggcaaggaaaacctggaataccctagcgtgaccctgccacctcagcctcacaccaaggagggcgttgatgcctacaacgaagtgatcgcccgggtgcgaatgtgggtgaacctgaacctgtggcagaagctgaagctaagcagagatgatgccaagcctctgctgagactgaagggattcccttcctttcctctggtcgagagacaggccaacgaagtggactggtgggacatggtgtgtaacgtgaagaagctgatcaacgagaaaaaggaggatggcaaggtgttttggcagaatctggctggctacaagagacaggaagccctgagaccatacctgagcagcgaggaagatcggaagaagggaaagaaattcgctcggtaccagctgggcgacctgctgctgcacctggaaaagaagcacggcgaggactggggaaaggtgtacgacgaggcctgggagcggattgacaagaaagtggaaggcctgagcaagcacatcaagctggaagaggaacggagaagcgaggacgcccagagcaaggccgccctgaccgactggctgcgggctaaggccagcttcgtgatcgagggcctgaaggaggccgacaaggacgagttctgcagatgcgagctgaagctgcagaagtggtacggggacctgcggggaaagcccttcgccatcgaagccgagaacagcatcctggacatcagcggcttcagcaagcagtacaactgtgccttcatctggcagaaggacggcgtgaagaagctgaacctgtacctgatcatcaactacttcaagggcggcaagctgcggttcaagaagatcaaacctgaagccttcgaagccaacagattctacaccgtgatcaacaaaaagagcggcgagatcgtgcccatggaggtgaacttcaacttcgacgaccccaacctgatcatcctgcctctggcctttggcaagagacagggcagagaattcatctggaacgacctgctgtccctggaaaccggcagcctgaagctggccaacggaagagtgatcgagaagacactgtacaacagaagaacccggcaggatgagcctgccctgttcgtggccctgaccttcgagcggcgggaggtcctggactcctccaatatcaaaccaatgaacctgatcggcgtggcaagaggcgaaaacatccccgccgtgatcgccctgaccgaccccgagggctgcccactgagccggtttaaggatagcctgggaaacccaacccacatcctgagaatcggcgagagctataaggagaagcagcggaccatccaggccaagaaggaggtggagcagcggagagccggcggctacagccggaagtacgccagcaaagccaagaatctggcagacgatatggtgagaaacaccgctagagatctgctgtactacgccgtgacccaggatgccatgctgatcttcgccaacctgagccggggcttcggccggcagggcaagcggaccttcatggccgagagacagtacacacggatggaggactggctgaccgccaagctggcctacgagggcctgagcaagacctacctgtccaagacactggcccagtacacctccaagacatgcagcaactgtgggtttaccatcaccagcgccgactacgacagggtgctggagaagctgaagaagacagcaacaggctggatgaccacaattaacggcaaggagctgaaggtggagggccagattacctactacaacagatacaagagacagaacgtagtcaaggacctgtccgtcgagctggatagactgagcgaagaatctgtgaacaacgacatctcctcctggacaaagggcagaagcggagaagctctgagcctcctgaagaaaagattctcccatagacccgtgcaggagaagttcgtgtgcctgaactgcggcttcgagacacacgcagccgagcaagccgccctgaacatcgccagatcctggctgttcctgcggagccaggagtacaagaaataccagacaaacaagacaaccggcaacaccgataagagagccttcgtcgagacctggcagtccttttaccggaagaagcttaaggaggtgtggaaacctgccgtgcggtctggcggatctggcggaggctccacaagcgaggagctgcccgtggtgttcgaggacgtggccgtgtacttcaccagggaggagtggggcatgctggacaagaggcagaaggagctgtacagggacgtgatgaggatgaactacgagctgctggccagcctgggccccgccgccgccaagcccgacctgatcagcaagctggagaggagggccgccccctggatcagggaccccaacggccccaagtggggcaagggcaggcccagcggcaacaccagccccaagaaaaagagaaaagtctaagctgccttctgcggggcttgccttctggccatgcccttcttctctcccttgcacctgtacctcttggtctttgaataaagcctgagtaggaaggctagcaaaaaaaaaaaaaaaaaaaaaaaaaaaaaaaaaaaaaaaaaaaaaaaaaaaaaaaaaaaaaaaaaaaaaaaaaaaaaaaa

SEQ ID NO: 6721 - RNA, 5797 nt, synthetic construct
  source 1..5797: mol_type = other RNA
aggaaataagagagaaaagaagagtaagaagaaatataagagccaccatggcccctaagaagaagcgtaaagtgagccggatggaacgcctcgtctacgaggtgcggcagaagtgcagaaacatcgaggacatctgcatctcctgcggatctctgaacgtgaccctggagcacccactgttcatcggcggcatgtgccagaactgtaaaaactgttttctggagtgtgcctatcaatacgacgatgacggctaccagagctactgcaccatctgttgcggcggaagagaggtgctgatgtgtggaaataacaactgctgccggtgcttctgcgtggaatgcgtggacctgctggtgggccccggcgccgcccaggccgctattaaggaagatccttggaactgctacatgtgcggccacaagggcacatacggcctgctgagacggagagaggactggcctagcagactgcagatgttcttcgccaataaccacgaccaggagttcgacccccctaaggtgtaccctcccgtccccgccgagaagagaaagcccatccgggtcctgagcctgttcgatggcatcgccaccggtctgctggtgctgaaggacctgggcatccaggtggataggtacattgcctccgaggtgtgcgaggactccatcaccgtgggaatggtgcgtcatcagggcaagatcatgtacgtgggcgacgtgcggagcgtgacacagaagcatatccaggagtggggccctttcgacctggtgatcggcggcagcccttgcaatgacctgagcatcgtgaacccagcccggaagggcctgtacgagggaaccggcagactgttcttcgagttttacagactgctgcacgacgcccggcctaaggaaggcgacgaccggcccttcttttggctgttcgagaatgtggtggccatgggagtcagcgacaagcgggatattagccggttcctggagagcaaccccgtgatgatcgatgccaaggaagtgagcgccgcccaccgggccagatacttctggggcaatctgcctggcatgaacagacccctggccagcaccgtgaacgacaagctggagctgcaggagtgcctggagcacggccggatcgccaagttcagcaaggtgagaaccatcaccacccgaagcaacagcatcaaacaaggcaaggaccagcactttcctgtgttcatgaacgagaaggaggacatcctgtggtgtaccgagatggagagagtgttcgggttcccagtccactacacagatgtcagcaacatgtctagactggccagacagagactgctgggaagaagctggtccgtccctgtgatcagacacctgttcgcccctctgaaggagtacttcgcctgcgtgagcagcggcaacagcaacgccaacagccggggccccagcttctctagcggcctggtgccactgtccctgagagggagccacatgggccccatggagatctacaaaaccgtgagcgcctggaagcggcagcctgtgcgcgtgctgagcctgtttcggaatatcgataaagtcctgaaaagcctgggattcctggagagcggctctggctccggcggtggcaccctgaagtacgtggaggatgtgacaaacgtggtcagacgggatgtggagaagtggggccccttcgatctggtgtacggcagcacccaacccctgggcagctcttgtgaccggtgccctggctggtacatgtttcagttccaccggatcctgcagtacgccctgccgagacaggagtcccagcggccattcttttggattttcatggacaacttgctgctgaccgaggatgaccaggaaactaccactcggttcctgcagaccgaagccgtgaccctgcaggacgtgagaggccgggactaccagaacgccatgcgggtgtggtccaacatccctggactgaaaagcaagcacgcacctctgacccctaaagaagaggagtacctgcaggcccaggtgcggagcagaagcaagctggacgcccctaaggtggatctgctggtgaagaattgcctcctgcccctgagagagtacttcaagtatttcagccagaatagtctgcccctgggcggcccaagcagcggcgcccctcctcccagcggcggcagcccagccggctccccaacctctaccgaggagggcacctctgagtccgccacccccgagagcggccctggcacctccaccgagcccagcgagggcagcgcacccggcagccctgccggcagccccacctccacagaggagggaaccagcaccgagcccagcgaaggcagcgccccaggcaccagcaccgagcctagtgagggcggctctggcggcggcagcgcccaggagattaaacggatcaacaagatcagaagaagacttgtgaaagacagcaacaccaagaaggccggcaagacaggccccatgaaaaccctgctggttagagtgatgacacccgatctgagagagcggctggaaaacctgagaaagaagcctgaaaatatcccccagcccatcagcaatacatctagagccaacctgaataagctgctgaccgattacaccgaaatgaagaaggcgatcctgcatgtgtactgggaagagttccagaaggaccctgtgggcctgatgagccgggtggcccagcctgccagcaagaagatcgatcagaacaagctgaaacctgagatggacgagaagggcaacctgaccaccgccggctttgcctgctctcagtgtggccagcccctgttcgtgtacaagctggagcaggtgtctgagaagggcaaggcttacaccaactacttcggacggtgcaatgtggccgagcacgaaaagctgatcctgctggcccagctgaagcccgagaaggatagcgacgaagccgtgacatatagcctgggaaagtttgggcagagggccctggatttctacagcattcatgtgaccaaggagtccacccaccccgtgaagcccctggcccagatcgccggaaacagatacgcctccggacctgtgggaaaggccctgagcgacgcatgtatgggcacaatcgcctccttcctgtctaagtaccaggacatcatcatcgaacaccagaaggtggtgaagggcaaccagaagagactggagagcctgcgggagctggccggcaaggaaaacctggaataccctagcgtgaccctgccacctcagcctcacaccaaggagggcgttgatgcctacaacgaagtgatcgcccgggtgcgaatgtgggtgaacctgaacctgtggcagaagctgaagctaagcagagatgatgccaagcctctgctgagactgaagggattcccttcctttcctctggtcgagagacaggccaacgaagtggactggtgggacatggtgtgtaacgtgaagaagctgatcaacgagaaaaaggaggatggcaaggtgttttggcagaatctggctggctacaagagacaggaagccctgagaccatacctgagcagcgaggaagatcggaagaagggaaagaaattcgctcggtaccagctgggcgacctgctgctgcacctggaaaagaagcacggcgaggactggggaaaggtgtacgacgaggcctgggagcggattgacaagaaagtggaaggcctgagcaagcacatcaagctggaagaggaacggagaagcgaggacgcccagagcaaggccgccctgaccgactggctgcgggctaaggccagcttcgtgatcgagggcctgaaggaggccgacaaggacgagttctgcagatgcgagctgaagctgcagaagtggtacggggacctgcggggaaagcccttcgccatcgaagccgagaacagcatcctggacatcagcggcttcagcaagcagtacaactgtgccttcatctggcagaaggacggcgtgaagaagctgaacctgtacctgatcatcaactacttcaagggcggcaagctgcggttcaagaagatcaaacctgaagccttcgaagccaacagattctacaccgtgatcaacaaaaagagcggcgagatcgtgcccatggaggtgaacttcaacttcgacgaccccaacctgatcatcctgcctctggcctttggcaagagacagggcagagaattcatctggaacgacctgctgtccctggaaaccggcagcctgaagctggccaacggaagagtgatcgagaagacactgtacaacagaagaacccggcaggatgagcctgccctgttcgtggccctgaccttcgagcggcgggaggtcctggactcctccaatatcaaaccaatgaacctgatcggcgtggcaagaggcgaaaacatccccgccgtgatcgccctgaccgaccccgagggctgcccactgagccggtttaaggatagcctgggaaacccaacccacatcctgagaatcggcgagagctataaggagaagcagcggaccatccaggccaagaaggaggtggagcagcggagagccggcggctacagccggaagtacgccagcaaagccaagaatctggcagacgatatggtgagaaacaccgctagagatctgctgtactacgccgtgacccaggatgccatgctgatcttcgccaacctgagccggggcttcggccggcagggcaagcggaccttcatggccgagagacagtacacacggatggaggactggctgaccgccaagctggcctacgagggcctgagcaagacctacctgtccaagacactggcccagtacacctccaagacatgcagcaactgtgggtttaccatcaccagcgccgactacgacagggtgctggagaagctgaagaagacagcaacaggctggatgaccacaattaacggcaaggagctgaaggtggagggccagattacctactacaacagatacaagagacagaacgtagtcaaggacctgtccgtcgagctggatagactgagcgaagaatctgtgaacaacgacatctcctcctggacaaagggcagaagcggagaagctctgagcctcctgaagaaaagattctcccatagacccgtgcaggagaagttcgtgtgcctgaactgcggcttcgagacacacgcagccgagcaagccgccctgaacatcgccagatcctggctgttcctgcggagccaggagtacaagaaataccagacaaacaagacaaccggcaacaccgataagagagccttcgtcgagacctggcagtccttttaccggaagaagcttaaggaggtgtggaaacctgccgtgcggtctggcggatctggcggaggctccacaagcaaggtgaagcagttcagcttccagagcctgctgaccttcaaggacctggccatcaacttcagcaaggaggagtgggagtacctgaacaccagccagaaggacctgtacaaggacgtgatgctggagaactacagcaacctggtgagcgtgggcctgagcgagagcaagcccgagctggtgacctgcctggagcagaacaaggagccctggatggtgcacatcgtggaggccgagggcctggagaccagccccaagaaaaagagaaaagtctaagctgccttctgcggggcttgccttctggccatgcccttcttctctcccttgcacctgtacctcttggtctttgaataaagcctgagtaggaaggctagcaaaaaaaaaaaaaaaaaaaaaaaaaaaaaaaaaaaaaaaaaaaaaaaaaaaaaaaaaaaaaaaaaaaaaaaaaaaaaaaa

SEQ ID NO: 6722 - RNA, 5797 nt, synthetic construct
  source 1..5797: mol_type = other RNA
aggaaataagagagaaaagaagagtaagaagaaatataagagccaccatggcccctaagaagaagcgtaaagtgagccggatggaacgcctcgtctacgaggtgcggcagaagtgcagaaacatcgaggacatctgcatctcctgcggatctctgaacgtgaccctggagcacccactgttcatcggcggcatgtgccagaactgtaaaaactgttttctggagtgtgcctatcaatacgacgatgacggctaccagagctactgcaccatctgttgcggcggaagagaggtgctgatgtgtggaaataacaactgctgccggtgcttctgcgtggaatgcgtggacctgctggtgggccccggcgccgcccaggccgctattaaggaagatccttggaactgctacatgtgcggccacaagggcacatacggcctgctgagacggagagaggactggcctagcagactgcagatgttcttcgccaataaccacgaccaggagttcgacccccctaaggtgtaccctcccgtccccgccgagaagagaaagcccatccgggtcctgagcctgttcgatggcatcgccaccggtctgctggtgctgaaggacctgggcatccaggtggataggtacattgcctccgaggtgtgcgaggactccatcaccgtgggaatggtgcgtcatcagggcaagatcatgtacgtgggcgacgtgcggagcgtgacacagaagcatatccaggagtggggccctttcgacctggtgatcggcggcagcccttgcaatgacctgagcatcgtgaacccagcccggaagggcctgtacgagggaaccggcagactgttcttcgagttttacagactgctgcacgacgcccggcctaaggaaggcgacgaccggcccttcttttggctgttcgagaatgtggtggccatgggagtcagcgacaagcgggatattagccggttcctggagagcaaccccgtgatgatcgatgccaaggaagtgagcgccgcccaccgggccagatacttctggggcaatctgcctggcatgaacagacccctggccagcaccgtgaacgacaagctggagctgcaggagtgcctggagcacggccggatcgccaagttcagcaaggtgagaaccatcaccacccgaagcaacagcatcaaacaaggcaaggaccagcactttcctgtgttcatgaacgagaaggaggacatcctgtggtgtaccgagatggagagagtgttcgggttcccagtccactacacagatgtcagcaacatgtctagactggccagacagagactgctgggaagaagctggtccgtccctgtgatcagacacctgttcgcccctctgaaggagtacttcgcctgcgtgagcagcggcaacagcaacgccaacagccggggccccagcttctctagcggcctggtgccactgtccctgagagggagccacatgggccccatggagatctacaaaaccgtgagcgcctggaagcggcagcctgtgcgcgtgctgagcctgtttcggaatatcgataaagtcctgaaaagcctgggattcctggagagcggctctggctccggcggtggcaccctgaagtacgtggaggatgtgacaaacgtggtcagacgggatgtggagaagtggggccccttcgatctggtgtacggcagcacccaacccctgggcagctcttgtgaccggtgccctggctggtacatgtttcagttccaccggatcctgcagtacgccctgccgagacaggagtcccagcggccattcttttggattttcatggacaacttgctgctgaccgaggatgaccaggaaactaccactcggttcctgcagaccgaagccgtgaccctgcaggacgtgagaggccgggactaccagaacgccatgcgggtgtggtccaacatccctggactgaaaagcaagcacgcacctctgacccctaaagaagaggagtacctgcaggcccaggtgcggagcagaagcaagctggacgcccctaaggtggatctgctggtgaagaattgcctcctgcccctgagagagtacttcaagtatttcagccagaatagtctgcccctgggcggcccaagcagcggcgcccctcctcccagcggcggcagcccagccggctccccaacctctaccgaggagggcacctctgagtccgccacccccgagagcggccctggcacctccaccgagcccagcgagggcagcgcacccggcagccctgccggcagccccacctccacagaggagggaaccagcaccgagcccagcgaaggcagcgccccaggcaccagcaccgagcctagtgagggcggctctggcggcggcagcgcccaggagattaaacggatcaacaagatcagaagaagacttgtgaaagacagcaacaccaagaaggccggcaagacaggccccatgaaaaccctgctggttagagtgatgacacccgatctgagagagcggctggaaaacctgagaaagaagcctgaaaatatcccccagcccatcagcaatacatctagagccaacctgaataagctgctgaccgattacaccgaaatgaagaaggcgatcctgcatgtgtactgggaagagttccagaaggaccctgtgggcctgatgagccgggtggcccagcctgccagcaagaagatcgatcagaacaagctgaaacctgagatggacgagaagggcaacctgaccaccgccggctttgcctgctctcagtgtggccagcccctgttcgtgtacaagctggagcaggtgtctgagaagggcaaggcttacaccaactacttcggacggtgcaatgtggccgagcacgaaaagctgatcctgctggcccagctgaagcccgagaaggatagcgacgaagccgtgacatatagcctgggaaagtttgggcagagggccctggatttctacagcattcatgtgaccaaggagtccacccaccccgtgaagcccctggcccagatcgccggaaacagatacgcctccggacctgtgggaaaggccctgagcgacgcatgtatgggcacaatcgcctccttcctgtctaagtaccaggacatcatcatcgaacaccagaaggtggtgaagggcaaccagaagagactggagagcctgcgggagctggccggcaaggaaaacctggaataccctagcgtgaccctgccacctcagcctcacaccaaggagggcgttgatgcctacaacgaagtgatcgcccgggtgcgaatgtgggtgaacctgaacctgtggcagaagctgaagctaagcagagatgatgccaagcctctgctgagactgaagggattcccttcctttcctctggtcgagagacaggccaacgaagtggactggtgggacatggtgtgtaacgtgaagaagctgatcaacgagaaaaaggaggatggcaaggtgttttggcagaatctggctggctacaagagacaggaagccctgagaccatacctgagcagcgaggaagatcggaagaagggaaagaaattcgctcggtaccagctgggcgacctgctgctgcacctggaaaagaagcacggcgaggactggggaaaggtgtacgacgaggcctgggagcggattgacaagaaagtggaaggcctgagcaagcacatcaagctggaagaggaacggagaagcgaggacgcccagagcaaggccgccctgaccgactggctgcgggctaaggccagcttcgtgatcgagggcctgaaggaggccgacaaggacgagttctgcagatgcgagctgaagctgcagaagtggtacggggacctgcggggaaagcccttcgccatcgaagccgagaacagcatcctggacatcagcggcttcagcaagcagtacaactgtgccttcatctggcagaaggacggcgtgaagaagctgaacctgtacctgatcatcaactacttcaagggcggcaagctgcggttcaagaagatcaaacctgaagccttcgaagccaacagattctacaccgtgatcaacaaaaagagcggcgagatcgtgcccatggaggtgaacttcaacttcgacgaccccaacctgatcatcctgcctctggcctttggcaagagacagggcagagaattcatctggaacgacctgctgtccctggaaaccggcagcctgaagctggccaacggaagagtgatcgagaagacactgtacaacagaagaacccggcaggatgagcctgccctgttcgtggccctgaccttcgagcggcgggaggtcctggactcctccaatatcaaaccaatgaacctgatcggcgtggcaagaggcgaaaacatccccgccgtgatcgccctgaccgaccccgagggctgcccactgagccggtttaaggatagcctgggaaacccaacccacatcctgagaatcggcgagagctataaggagaagcagcggaccatccaggccaagaaggaggtggagcagcggagagccggcggctacagccggaagtacgccagcaaagccaagaatctggcagacgatatggtgagaaacaccgctagagatctgctgtactacgccgtgacccaggatgccatgctgatcttcgccaacctgagccggggcttcggccggcagggcaagcggaccttcatggccgagagacagtacacacggatggaggactggctgaccgccaagctggcctacgagggcctgagcaagacctacctgtccaagacactggcccagtacacctccaagacatgcagcaactgtgggtttaccatcaccagcgccgactacgacagggtgctggagaagctgaagaagacagcaacaggctggatgaccacaattaacggcaaggagctgaaggtggagggccagattacctactacaacagatacaagagacagaacgtagtcaaggacctgtccgtcgagctggatagactgagcgaagaatctgtgaacaacgacatctcctcctggacaaagggcagaagcggagaagctctgagcctcctgaagaaaagattctcccatagacccgtgcaggagaagttcgtgtgcctgaactgcggcttcgagacacacgcagccgagcaagccgccctgaacatcgccagatcctggctgttcctgcggagccaggagtacaagaaataccagacaaacaagacaaccggcaacaccgataagagagccttcgtcgagacctggcagtccttttaccggaagaagcttaaggaggtgtggaaacctgccgtgcggtctggcggatctggcggaggctccacaagcttccaggacagcgtgaccttcgaggacgtggccgtgaggttcagcagcggcgagtggcagtgcctgaccagggcccagaggcacctgtacgccgacgtgatgctggagaactactggaacgtgatcagcgtgggcttcgccgtgcccaagccccccctgatcagccacctggagcagggcgccgagccctgcgtgcaggacctgcaggacggcggcttcctgagctgcagcttccccgtgagcaccagccccaagaaaaagagaaaagtctaagctgccttctgcggggcttgccttctggccatgcccttcttctctcccttgcacctgtacctcttggtctttgaataaagcctgagtaggaaggctagcaaaaaaaaaaaaaaaaaaaaaaaaaaaaaaaaaaaaaaaaaaaaaaaaaaaaaaaaaaaaaaaaaaaaaaaaaaaaaaaa

SEQ ID NO: 6723 - RNA, 5797 nt, synthetic construct
  source 1..5797: mol_type = other RNA
aggaaataagagagaaaagaagagtaagaagaaatataagagccaccatggcccctaagaagaagcgtaaagtgagccggatggaacgcctcgtctacgaggtgcggcagaagtgcagaaacatcgaggacatctgcatctcctgcggatctctgaacgtgaccctggagcacccactgttcatcggcggcatgtgccagaactgtaaaaactgttttctggagtgtgcctatcaatacgacgatgacggctaccagagctactgcaccatctgttgcggcggaagagaggtgctgatgtgtggaaataacaactgctgccggtgcttctgcgtggaatgcgtggacctgctggtgggccccggcgccgcccaggccgctattaaggaagatccttggaactgctacatgtgcggccacaagggcacatacggcctgctgagacggagagaggactggcctagcagactgcagatgttcttcgccaataaccacgaccaggagttcgacccccctaaggtgtaccctcccgtccccgccgagaagagaaagcccatccgggtcctgagcctgttcgatggcatcgccaccggtctgctggtgctgaaggacctgggcatccaggtggataggtacattgcctccgaggtgtgcgaggactccatcaccgtgggaatggtgcgtcatcagggcaagatcatgtacgtgggcgacgtgcggagcgtgacacagaagcatatccaggagtggggccctttcgacctggtgatcggcggcagcccttgcaatgacctgagcatcgtgaacccagcccggaagggcctgtacgagggaaccggcagactgttcttcgagttttacagactgctgcacgacgcccggcctaaggaaggcgacgaccggcccttcttttggctgttcgagaatgtggtggccatgggagtcagcgacaagcgggatattagccggttcctggagagcaaccccgtgatgatcgatgccaaggaagtgagcgccgcccaccgggccagatacttctggggcaatctgcctggcatgaacagacccctggccagcaccgtgaacgacaagctggagctgcaggagtgcctggagcacggccggatcgccaagttcagcaaggtgagaaccatcaccacccgaagcaacagcatcaaacaaggcaaggaccagcactttcctgtgttcatgaacgagaaggaggacatcctgtggtgtaccgagatggagagagtgttcgggttcccagtccactacacagatgtcagcaacatgtctagactggccagacagagactgctgggaagaagctggtccgtccctgtgatcagacacctgttcgcccctctgaaggagtacttcgcctgcgtgagcagcggcaacagcaacgccaacagccggggccccagcttctctagcggcctggtgccactgtccctgagagggagccacatgggccccatggagatctacaaaaccgtgagcgcctggaagcggcagcctgtgcgcgtgctgagcctgtttcggaatatcgataaagtcctgaaaagcctgggattcctggagagcggctctggctccggcggtggcaccctgaagtacgtggaggatgtgacaaacgtggtcagacgggatgtggagaagtggggccccttcgatctggtgtacggcagcacccaacccctgggcagctcttgtgaccggtgccctggctggtacatgtttcagttccaccggatcctgcagtacgccctgccgagacaggagtcccagcggccattcttttggattttcatggacaacttgctgctgaccgaggatgaccaggaaactaccactcggttcctgcagaccgaagccgtgaccctgcaggacgtgagaggccgggactaccagaacgccatgcgggtgtggtccaacatccctggactgaaaagcaagcacgcacctctgacccctaaagaagaggagtacctgcaggcccaggtgcggagcagaagcaagctggacgcccctaaggtggatctgctggtgaagaattgcctcctgcccctgagagagtacttcaagtatttcagccagaatagtctgcccctgggcggcccaagcagcggcgcccctcctcccagcggcggcagcccagccggctccccaacctctaccgaggagggcacctctgagtccgccacccccgagagcggccctggcacctccaccgagcccagcgagggcagcgcacccggcagccctgccggcagccccacctccacagaggagggaaccagcaccgagcccagcgaaggcagcgccccaggcaccagcaccgagcctagtgagggcggctctggcggcggcagcgcccaggagattaaacggatcaacaagatcagaagaagacttgtgaaagacagcaacaccaagaaggccggcaagacaggccccatgaaaaccctgctggttagagtgatgacacccgatctgagagagcggctggaaaacctgagaaagaagcctgaaaatatcccccagcccatcagcaatacatctagagccaacctgaataagctgctgaccgattacaccgaaatgaagaaggcgatcctgcatgtgtactgggaagagttccagaaggaccctgtgggcctgatgagccgggtggcccagcctgccagcaagaagatcgatcagaacaagctgaaacctgagatggacgagaagggcaacctgaccaccgccggctttgcctgctctcagtgtggccagcccctgttcgtgtacaagctggagcaggtgtctgagaagggcaaggcttacaccaactacttcggacggtgcaatgtggccgagcacgaaaagctgatcctgctggcccagctgaagcccgagaaggatagcgacgaagccgtgacatatagcctgggaaagtttgggcagagggccctggatttctacagcattcatgtgaccaaggagtccacccaccccgtgaagcccctggcccagatcgccggaaacagatacgcctccggacctgtgggaaaggccctgagcgacgcatgtatgggcacaatcgcctccttcctgtctaagtaccaggacatcatcatcgaacaccagaaggtggtgaagggcaaccagaagagactggagagcctgcgggagctggccggcaaggaaaacctggaataccctagcgtgaccctgccacctcagcctcacaccaaggagggcgttgatgcctacaacgaagtgatcgcccgggtgcgaatgtgggtgaacctgaacctgtggcagaagctgaagctaagcagagatgatgccaagcctctgctgagactgaagggattcccttcctttcctctggtcgagagacaggccaacgaagtggactggtgggacatggtgtgtaacgtgaagaagctgatcaacgagaaaaaggaggatggcaaggtgttttggcagaatctggctggctacaagagacaggaagccctgagaccatacctgagcagcgaggaagatcggaagaagggaaagaaattcgctcggtaccagctgggcgacctgctgctgcacctggaaaagaagcacggcgaggactggggaaaggtgtacgacgaggcctgggagcggattgacaagaaagtggaaggcctgagcaagcacatcaagctggaagaggaacggagaagcgaggacgcccagagcaaggccgccctgaccgactggctgcgggctaaggccagcttcgtgatcgagggcctgaaggaggccgacaaggacgagttctgcagatgcgagctgaagctgcagaagtggtacggggacctgcggggaaagcccttcgccatcgaagccgagaacagcatcctggacatcagcggcttcagcaagcagtacaactgtgccttcatctggcagaaggacggcgtgaagaagctgaacctgtacctgatcatcaactacttcaagggcggcaagctgcggttcaagaagatcaaacctgaagccttcgaagccaacagattctacaccgtgatcaacaaaaagagcggcgagatcgtgcccatggaggtgaacttcaacttcgacgaccccaacctgatcatcctgcctctggcctttggcaagagacagggcagagaattcatctggaacgacctgctgtccctggaaaccggcagcctgaagctggccaacggaagagtgatcgagaagacactgtacaacagaagaacccggcaggatgagcctgccctgttcgtggccctgaccttcgagcggcgggaggtcctggactcctccaatatcaaaccaatgaacctgatcggcgtggcaagaggcgaaaacatccccgccgtgatcgccctgaccgaccccgagggctgcccactgagccggtttaaggatagcctgggaaacccaacccacatcctgagaatcggcgagagctataaggagaagcagcggaccatccaggccaagaaggaggtggagcagcggagagccggcggctacagccggaagtacgccagcaaagccaagaatctggcagacgatatggtgagaaacaccgctagagatctgctgtactacgccgtgacccaggatgccatgctgatcttcgccaacctgagccggggcttcggccggcagggcaagcggaccttcatggccgagagacagtacacacggatggaggactggctgaccgccaagctggcctacgagggcctgagcaagacctacctgtccaagacactggcccagtacacctccaagacatgcagcaactgtgggtttaccatcaccagcgccgactacgacagggtgctggagaagctgaagaagacagcaacaggctggatgaccacaattaacggcaaggagctgaaggtggagggccagattacctactacaacagatacaagagacagaacgtagtcaaggacctgtccgtcgagctggatagactgagcgaagaatctgtgaacaacgacatctcctcctggacaaagggcagaagcggagaagctctgagcctcctgaagaaaagattctcccatagacccgtgcaggagaagttcgtgtgcctgaactgcggcttcgagacacacgcagccgagcaagccgccctgaacatcgccagatcctggctgttcctgcggagccaggagtacaagaaataccagacaaacaagacaaccggcaacaccgataagagagccttcgtcgagacctggcagtccttttaccggaagaagcttaaggaggtgtggaaacctgccgtgcggtctggcggatctggcggaggctccacaagcgcccaggcccccctgagcttcgaggacgtggccgtgggcttcagccccgaggagtggcagctgctggcccccgcccagaaggacctgtacagggacgtgatgctggagaactacaggaacctggtgagcctgggctaccaggccagcaagcccgacagcctgttccagctggagcacggcggccccccctgggccgtgggcggcgccgcccccaggcccccctgcgccgaggagatctgggagaccagccccaagaaaaagagaaaagtctaagctgccttctgcggggcttgccttctggccatgcccttcttctctcccttgcacctgtacctcttggtctttgaataaagcctgagtaggaaggctagcaaaaaaaaaaaaaaaaaaaaaaaaaaaaaaaaaaaaaaaaaaaaaaaaaaaaaaaaaaaaaaaaaaaaaaaaaaaaaaaa

SEQ ID NO: 6724 - RNA, 5797 nt, synthetic construct
  source 1..5797: mol_type = other RNA
aggaaataagagagaaaagaagagtaagaagaaatataagagccaccatggcccctaagaagaagcgtaaagtgagccggatggaacgcctcgtctacgaggtgcggcagaagtgcagaaacatcgaggacatctgcatctcctgcggatctctgaacgtgaccctggagcacccactgttcatcggcggcatgtgccagaactgtaaaaactgttttctggagtgtgcctatcaatacgacgatgacggctaccagagctactgcaccatctgttgcggcggaagagaggtgctgatgtgtggaaataacaactgctgccggtgcttctgcgtggaatgcgtggacctgctggtgggccccggcgccgcccaggccgctattaaggaagatccttggaactgctacatgtgcggccacaagggcacatacggcctgctgagacggagagaggactggcctagcagactgcagatgttcttcgccaataaccacgaccaggagttcgacccccctaaggtgtaccctcccgtccccgccgagaagagaaagcccatccgggtcctgagcctgttcgatggcatcgccaccggtctgctggtgctgaaggacctgggcatccaggtggataggtacattgcctccgaggtgtgcgaggactccatcaccgtgggaatggtgcgtcatcagggcaagatcatgtacgtgggcgacgtgcggagcgtgacacagaagcatatccaggagtggggccctttcgacctggtgatcggcggcagcccttgcaatgacctgagcatcgtgaacccagcccggaagggcctgtacgagggaaccggcagactgttcttcgagttttacagactgctgcacgacgcccggcctaaggaaggcgacgaccggcccttcttttggctgttcgagaatgtggtggccatgggagtcagcgacaagcgggatattagccggttcctggagagcaaccccgtgatgatcgatgccaaggaagtgagcgccgcccaccgggccagatacttctggggcaatctgcctggcatgaacagacccctggccagcaccgtgaacgacaagctggagctgcaggagtgcctggagcacggccggatcgccaagttcagcaaggtgagaaccatcaccacccgaagcaacagcatcaaacaaggcaaggaccagcactttcctgtgttcatgaacgagaaggaggacatcctgtggtgtaccgagatggagagagtgttcgggttcccagtccactacacagatgtcagcaacatgtctagactggccagacagagactgctgggaagaagctggtccgtccctgtgatcagacacctgttcgcccctctgaaggagtacttcgcctgcgtgagcagcggcaacagcaacgccaacagccggggccccagcttctctagcggcctggtgccactgtccctgagagggagccacatgggccccatggagatctacaaaaccgtgagcgcctggaagcggcagcctgtgcgcgtgctgagcctgtttcggaatatcgataaagtcctgaaaagcctgggattcctggagagcggctctggctccggcggtggcaccctgaagtacgtggaggatgtgacaaacgtggtcagacgggatgtggagaagtggggccccttcgatctggtgtacggcagcacccaacccctgggcagctcttgtgaccggtgccctggctggtacatgtttcagttccaccggatcctgcagtacgccctgccgagacaggagtcccagcggccattcttttggattttcatggacaacttgctgctgaccgaggatgaccaggaaactaccactcggttcctgcagaccgaagccgtgaccctgcaggacgtgagaggccgggactaccagaacgccatgcgggtgtggtccaacatccctggactgaaaagcaagcacgcacctctgacccctaaagaagaggagtacctgcaggcccaggtgcggagcagaagcaagctggacgcccctaaggtggatctgctggtgaagaattgcctcctgcccctgagagagtacttcaagtatttcagccagaatagtctgcccctgggcggcccaagcagcggcgcccctcctcccagcggcggcagcccagccggctccccaacctctaccgaggagggcacctctgagtccgccacccccgagagcggccctggcacctccaccgagcccagcgagggcagcgcacccggcagccctgccggcagccccacctccacagaggagggaaccagcaccgagcccagcgaaggcagcgccccaggcaccagcaccgagcctagtgagggcggctctggcggcggcagcgcccaggagattaaacggatcaacaagatcagaagaagacttgtgaaagacagcaacaccaagaaggccggcaagacaggccccatgaaaaccctgctggttagagtgatgacacccgatctgagagagcggctggaaaacctgagaaagaagcctgaaaatatcccccagcccatcagcaatacatctagagccaacctgaataagctgctgaccgattacaccgaaatgaagaaggcgatcctgcatgtgtactgggaagagttccagaaggaccctgtgggcctgatgagccgggtggcccagcctgccagcaagaagatcgatcagaacaagctgaaacctgagatggacgagaagggcaacctgaccaccgccggctttgcctgctctcagtgtggccagcccctgttcgtgtacaagctggagcaggtgtctgagaagggcaaggcttacaccaactacttcggacggtgcaatgtggccgagcacgaaaagctgatcctgctggcccagctgaagcccgagaaggatagcgacgaagccgtgacatatagcctgggaaagtttgggcagagggccctggatttctacagcattcatgtgaccaaggagtccacccaccccgtgaagcccctggcccagatcgccggaaacagatacgcctccggacctgtgggaaaggccctgagcgacgcatgtatgggcacaatcgcctccttcctgtctaagtaccaggacatcatcatcgaacaccagaaggtggtgaagggcaaccagaagagactggagagcctgcgggagctggccggcaaggaaaacctggaataccctagcgtgaccctgccacctcagcctcacaccaaggagggcgttgatgcctacaacgaagtgatcgcccgggtgcgaatgtgggtgaacctgaacctgtggcagaagctgaagctaagcagagatgatgccaagcctctgctgagactgaagggattcccttcctttcctctggtcgagagacaggccaacgaagtggactggtgggacatggtgtgtaacgtgaagaagctgatcaacgagaaaaaggaggatggcaaggtgttttggcagaatctggctggctacaagagacaggaagccctgagaccatacctgagcagcgaggaagatcggaagaagggaaagaaattcgctcggtaccagctgggcgacctgctgctgcacctggaaaagaagcacggcgaggactggggaaaggtgtacgacgaggcctgggagcggattgacaagaaagtggaaggcctgagcaagcacatcaagctggaagaggaacggagaagcgaggacgcccagagcaaggccgccctgaccgactggctgcgggctaaggccagcttcgtgatcgagggcctgaaggaggccgacaaggacgagttctgcagatgcgagctgaagctgcagaagtggtacggggacctgcggggaaagcccttcgccatcgaagccgagaacagcatcctggacatcagcggcttcagcaagcagtacaactgtgccttcatctggcagaaggacggcgtgaagaagctgaacctgtacctgatcatcaactacttcaagggcggcaagctgcggttcaagaagatcaaacctgaagccttcgaagccaacagattctacaccgtgatcaacaaaaagagcggcgagatcgtgcccatggaggtgaacttcaacttcgacgaccccaacctgatcatcctgcctctggcctttggcaagagacagggcagagaattcatctggaacgacctgctgtccctggaaaccggcagcctgaagctggccaacggaagagtgatcgagaagacactgtacaacagaagaacccggcaggatgagcctgccctgttcgtggccctgaccttcgagcggcgggaggtcctggactcctccaatatcaaaccaatgaacctgatcggcgtggcaagaggcgaaaacatccccgccgtgatcgccctgaccgaccccgagggctgcccactgagccggtttaaggatagcctgggaaacccaacccacatcctgagaatcggcgagagctataaggagaagcagcggaccatccaggccaagaaggaggtggagcagcggagagccggcggctacagccggaagtacgccagcaaagccaagaatctggcagacgatatggtgagaaacaccgctagagatctgctgtactacgccgtgacccaggatgccatgctgatcttcgccaacctgagccggggcttcggccggcagggcaagcggaccttcatggccgagagacagtacacacggatggaggactggctgaccgccaagctggcctacgagggcctgagcaagacctacctgtccaagacactggcccagtacacctccaagacatgcagcaactgtgggtttaccatcaccagcgccgactacgacagggtgctggagaagctgaagaagacagcaacaggctggatgaccacaattaacggcaaggagctgaaggtggagggccagattacctactacaacagatacaagagacagaacgtagtcaaggacctgtccgtcgagctggatagactgagcgaagaatctgtgaacaacgacatctcctcctggacaaagggcagaagcggagaagctctgagcctcctgaagaaaagattctcccatagacccgtgcaggagaagttcgtgtgcctgaactgcggcttcgagacacacgcagccgagcaagccgccctgaacatcgccagatcctggctgttcctgcggagccaggagtacaagaaataccagacaaacaagacaaccggcaacaccgataagagagccttcgtcgagacctggcagtccttttaccggaagaagcttaaggaggtgtggaaacctgccgtgcggtctggcggatctggcggaggctccacaagcgcccacaggagcctgatgttcagcgacgtgagcatcgtgttcagccaggaggagtgggagtacctggacctggagcagagggacctgtacagggacgtgatgctggagaactacagcaacctggtgagcctgggctgcttcatcagcaagcccgacgtgatcagcctgctggagcagggcaaggagccctggaaggtggtgagaaagggcaggaggaggtacgccgcccccatgagcatcgccaccagccccaagaaaaagagaaaagtctaagctgccttctgcggggcttgccttctggccatgcccttcttctctcccttgcacctgtacctcttggtctttgaataaagcctgagtaggaaggctagcaaaaaaaaaaaaaaaaaaaaaaaaaaaaaaaaaaaaaaaaaaaaaaaaaaaaaaaaaaaaaaaaaaaaaaaaaaaaaaaa

SEQ ID NO: 6725 - RNA, 5797 nt, synthetic construct
  source 1..5797: mol_type = other RNA
aggaaataagagagaaaagaagagtaagaagaaatataagagccaccatggcccctaagaagaagcgtaaagtgagccggatggaacgcctcgtctacgaggtgcggcagaagtgcagaaacatcgaggacatctgcatctcctgcggatctctgaacgtgaccctggagcacccactgttcatcggcggcatgtgccagaactgtaaaaactgttttctggagtgtgcctatcaatacgacgatgacggctaccagagctactgcaccatctgttgcggcggaagagaggtgctgatgtgtggaaataacaactgctgccggtgcttctgcgtggaatgcgtggacctgctggtgggccccggcgccgcccaggccgctattaaggaagatccttggaactgctacatgtgcggccacaagggcacatacggcctgctgagacggagagaggactggcctagcagactgcagatgttcttcgccaataaccacgaccaggagttcgacccccctaaggtgtaccctcccgtccccgccgagaagagaaagcccatccgggtcctgagcctgttcgatggcatcgccaccggtctgctggtgctgaaggacctgggcatccaggtggataggtacattgcctccgaggtgtgcgaggactccatcaccgtgggaatggtgcgtcatcagggcaagatcatgtacgtgggcgacgtgcggagcgtgacacagaagcatatccaggagtggggccctttcgacctggtgatcggcggcagcccttgcaatgacctgagcatcgtgaacccagcccggaagggcctgtacgagggaaccggcagactgttcttcgagttttacagactgctgcacgacgcccggcctaaggaaggcgacgaccggcccttcttttggctgttcgagaatgtggtggccatgggagtcagcgacaagcgggatattagccggttcctggagagcaaccccgtgatgatcgatgccaaggaagtgagcgccgcccaccgggccagatacttctggggcaatctgcctggcatgaacagacccctggccagcaccgtgaacgacaagctggagctgcaggagtgcctggagcacggccggatcgccaagttcagcaaggtgagaaccatcaccacccgaagcaacagcatcaaacaaggcaaggaccagcactttcctgtgttcatgaacgagaaggaggacatcctgtggtgtaccgagatggagagagtgttcgggttcccagtccactacacagatgtcagcaacatgtctagactggccagacagagactgctgggaagaagctggtccgtccctgtgatcagacacctgttcgcccctctgaaggagtacttcgcctgcgtgagcagcggcaacagcaacgccaacagccggggccccagcttctctagcggcctggtgccactgtccctgagagggagccacatgggccccatggagatctacaaaaccgtgagcgcctggaagcggcagcctgtgcgcgtgctgagcctgtttcggaatatcgataaagtcctgaaaagcctgggattcctggagagcggctctggctccggcggtggcaccctgaagtacgtggaggatgtgacaaacgtggtcagacgggatgtggagaagtggggccccttcgatctggtgtacggcagcacccaacccctgggcagctcttgtgaccggtgccctggctggtacatgtttcagttccaccggatcctgcagtacgccctgccgagacaggagtcccagcggccattcttttggattttcatggacaacttgctgctgaccgaggatgaccaggaaactaccactcggttcctgcagaccgaagccgtgaccctgcaggacgtgagaggccgggactaccagaacgccatgcgggtgtggtccaacatccctggactgaaaagcaagcacgcacctctgacccctaaagaagaggagtacctgcaggcccaggtgcggagcagaagcaagctggacgcccctaaggtggatctgctggtgaagaattgcctcctgcccctgagagagtacttcaagtatttcagccagaatagtctgcccctgggcggcccaagcagcggcgcccctcctcccagcggcggcagcccagccggctccccaacctctaccgaggagggcacctctgagtccgccacccccgagagcggccctggcacctccaccgagcccagcgagggcagcgcacccggcagccctgccggcagccccacctccacagaggagggaaccagcaccgagcccagcgaaggcagcgccccaggcaccagcaccgagcctagtgagggcggctctggcggcggcagcgcccaggagattaaacggatcaacaagatcagaagaagacttgtgaaagacagcaacaccaagaaggccggcaagacaggccccatgaaaaccctgctggttagagtgatgacacccgatctgagagagcggctggaaaacctgagaaagaagcctgaaaatatcccccagcccatcagcaatacatctagagccaacctgaataagctgctgaccgattacaccgaaatgaagaaggcgatcctgcatgtgtactgggaagagttccagaaggaccctgtgggcctgatgagccgggtggcccagcctgccagcaagaagatcgatcagaacaagctgaaacctgagatggacgagaagggcaacctgaccaccgccggctttgcctgctctcagtgtggccagcccctgttcgtgtacaagctggagcaggtgtctgagaagggcaaggcttacaccaactacttcggacggtgcaatgtggccgagcacgaaaagctgatcctgctggcccagctgaagcccgagaaggatagcgacgaagccgtgacatatagcctgggaaagtttgggcagagggccctggatttctacagcattcatgtgaccaaggagtccacccaccccgtgaagcccctggcccagatcgccggaaacagatacgcctccggacctgtgggaaaggccctgagcgacgcatgtatgggcacaatcgcctccttcctgtctaagtaccaggacatcatcatcgaacaccagaaggtggtgaagggcaaccagaagagactggagagcctgcgggagctggccggcaaggaaaacctggaataccctagcgtgaccctgccacctcagcctcacaccaaggagggcgttgatgcctacaacgaagtgatcgcccgggtgcgaatgtgggtgaacctgaacctgtggcagaagctgaagctaagcagagatgatgccaagcctctgctgagactgaagggattcccttcctttcctctggtcgagagacaggccaacgaagtggactggtgggacatggtgtgtaacgtgaagaagctgatcaacgagaaaaaggaggatggcaaggtgttttggcagaatctggctggctacaagagacaggaagccctgagaccatacctgagcagcgaggaagatcggaagaagggaaagaaattcgctcggtaccagctgggcgacctgctgctgcacctggaaaagaagcacggcgaggactggggaaaggtgtacgacgaggcctgggagcggattgacaagaaagtggaaggcctgagcaagcacatcaagctggaagaggaacggagaagcgaggacgcccagagcaaggccgccctgaccgactggctgcgggctaaggccagcttcgtgatcgagggcctgaaggaggccgacaaggacgagttctgcagatgcgagctgaagctgcagaagtggtacggggacctgcggggaaagcccttcgccatcgaagccgagaacagcatcctggacatcagcggcttcagcaagcagtacaactgtgccttcatctggcagaaggacggcgtgaagaagctgaacctgtacctgatcatcaactacttcaagggcggcaagctgcggttcaagaagatcaaacctgaagccttcgaagccaacagattctacaccgtgatcaacaaaaagagcggcgagatcgtgcccatggaggtgaacttcaacttcgacgaccccaacctgatcatcctgcctctggcctttggcaagagacagggcagagaattcatctggaacgacctgctgtccctggaaaccggcagcctgaagctggccaacggaagagtgatcgagaagacactgtacaacagaagaacccggcaggatgagcctgccctgttcgtggccctgaccttcgagcggcgggaggtcctggactcctccaatatcaaaccaatgaacctgatcggcgtggcaagaggcgaaaacatccccgccgtgatcgccctgaccgaccccgagggctgcccactgagccggtttaaggatagcctgggaaacccaacccacatcctgagaatcggcgagagctataaggagaagcagcggaccatccaggccaagaaggaggtggagcagcggagagccggcggctacagccggaagtacgccagcaaagccaagaatctggcagacgatatggtgagaaacaccgctagagatctgctgtactacgccgtgacccaggatgccatgctgatcttcgccaacctgagccggggcttcggccggcagggcaagcggaccttcatggccgagagacagtacacacggatggaggactggctgaccgccaagctggcctacgagggcctgagcaagacctacctgtccaagacactggcccagtacacctccaagacatgcagcaactgtgggtttaccatcaccagcgccgactacgacagggtgctggagaagctgaagaagacagcaacaggctggatgaccacaattaacggcaaggagctgaaggtggagggccagattacctactacaacagatacaagagacagaacgtagtcaaggacctgtccgtcgagctggatagactgagcgaagaatctgtgaacaacgacatctcctcctggacaaagggcagaagcggagaagctctgagcctcctgaagaaaagattctcccatagacccgtgcaggagaagttcgtgtgcctgaactgcggcttcgagacacacgcagccgagcaagccgccctgaacatcgccagatcctggctgttcctgcggagccaggagtacaagaaataccagacaaacaagacaaccggcaacaccgataagagagccttcgtcgagacctggcagtccttttaccggaagaagcttaaggaggtgtggaaacctgccgtgcggtctggcggatctggcggaggctccacaagcagcctgggccccctgagcttcaaggacgtggccgtggccttcagccaggaggagtggcagcagctggaccccgaggagaggaccacctacagggacgtgatgctggagacctacagcaacctggtgagcgtgggctacgacatcatcaagcccgacgtgatcatcaagctggagcagggcgaggagccctggatcgtggagggcgccttcagcccccagagctaccccgacgagatcaggcacaccagccccaagaaaaagagaaaagtctaagctgccttctgcggggcttgccttctggccatgcccttcttctctcccttgcacctgtacctcttggtctttgaataaagcctgagtaggaaggctagcaaaaaaaaaaaaaaaaaaaaaaaaaaaaaaaaaaaaaaaaaaaaaaaaaaaaaaaaaaaaaaaaaaaaaaaaaaaaaaaa

SEQ ID NO: 6726 - RNA, 5797 nt, synthetic construct
  source 1..5797: mol_type = other RNA
aggaaataagagagaaaagaagagtaagaagaaatataagagccaccatggcccctaagaagaagcgtaaagtgagccggatggaacgcctcgtctacgaggtgcggcagaagtgcagaaacatcgaggacatctgcatctcctgcggatctctgaacgtgaccctggagcacccactgttcatcggcggcatgtgccagaactgtaaaaactgttttctggagtgtgcctatcaatacgacgatgacggctaccagagctactgcaccatctgttgcggcggaagagaggtgctgatgtgtggaaataacaactgctgccggtgcttctgcgtggaatgcgtggacctgctggtgggccccggcgccgcccaggccgctattaaggaagatccttggaactgctacatgtgcggccacaagggcacatacggcctgctgagacggagagaggactggcctagcagactgcagatgttcttcgccaataaccacgaccaggagttcgacccccctaaggtgtaccctcccgtccccgccgagaagagaaagcccatccgggtcctgagcctgttcgatggcatcgccaccggtctgctggtgctgaaggacctgggcatccaggtggataggtacattgcctccgaggtgtgcgaggactccatcaccgtgggaatggtgcgtcatcagggcaagatcatgtacgtgggcgacgtgcggagcgtgacacagaagcatatccaggagtggggccctttcgacctggtgatcggcggcagcccttgcaatgacctgagcatcgtgaacccagcccggaagggcctgtacgagggaaccggcagactgttcttcgagttttacagactgctgcacgacgcccggcctaaggaaggcgacgaccggcccttcttttggctgttcgagaatgtggtggccatgggagtcagcgacaagcgggatattagccggttcctggagagcaaccccgtgatgatcgatgccaaggaagtgagcgccgcccaccgggccagatacttctggggcaatctgcctggcatgaacagacccctggccagcaccgtgaacgacaagctggagctgcaggagtgcctggagcacggccggatcgccaagttcagcaaggtgagaaccatcaccacccgaagcaacagcatcaaacaaggcaaggaccagcactttcctgtgttcatgaacgagaaggaggacatcctgtggtgtaccgagatggagagagtgttcgggttcccagtccactacacagatgtcagcaacatgtctagactggccagacagagactgctgggaagaagctggtccgtccctgtgatcagacacctgttcgcccctctgaaggagtacttcgcctgcgtgagcagcggcaacagcaacgccaacagccggggccccagcttctctagcggcctggtgccactgtccctgagagggagccacatgggccccatggagatctacaaaaccgtgagcgcctggaagcggcagcctgtgcgcgtgctgagcctgtttcggaatatcgataaagtcctgaaaagcctgggattcctggagagcggctctggctccggcggtggcaccctgaagtacgtggaggatgtgacaaacgtggtcagacgggatgtggagaagtggggccccttcgatctggtgtacggcagcacccaacccctgggcagctcttgtgaccggtgccctggctggtacatgtttcagttccaccggatcctgcagtacgccctgccgagacaggagtcccagcggccattcttttggattttcatggacaacttgctgctgaccgaggatgaccaggaaactaccactcggttcctgcagaccgaagccgtgaccctgcaggacgtgagaggccgggactaccagaacgccatgcgggtgtggtccaacatccctggactgaaaagcaagcacgcacctctgacccctaaagaagaggagtacctgcaggcccaggtgcggagcagaagcaagctggacgcccctaaggtggatctgctggtgaagaattgcctcctgcccctgagagagtacttcaagtatttcagccagaatagtctgcccctgggcggcccaagcagcggcgcccctcctcccagcggcggcagcccagccggctccccaacctctaccgaggagggcacctctgagtccgccacccccgagagcggccctggcacctccaccgagcccagcgagggcagcgcacccggcagccctgccggcagccccacctccacagaggagggaaccagcaccgagcccagcgaaggcagcgccccaggcaccagcaccgagcctagtgagggcggctctggcggcggcagcgcccaggagattaaacggatcaacaagatcagaagaagacttgtgaaagacagcaacaccaagaaggccggcaagacaggccccatgaaaaccctgctggttagagtgatgacacccgatctgagagagcggctggaaaacctgagaaagaagcctgaaaatatcccccagcccatcagcaatacatctagagccaacctgaataagctgctgaccgattacaccgaaatgaagaaggcgatcctgcatgtgtactgggaagagttccagaaggaccctgtgggcctgatgagccgggtggcccagcctgccagcaagaagatcgatcagaacaagctgaaacctgagatggacgagaagggcaacctgaccaccgccggctttgcctgctctcagtgtggccagcccctgttcgtgtacaagctggagcaggtgtctgagaagggcaaggcttacaccaactacttcggacggtgcaatgtggccgagcacgaaaagctgatcctgctggcccagctgaagcccgagaaggatagcgacgaagccgtgacatatagcctgggaaagtttgggcagagggccctggatttctacagcattcatgtgaccaaggagtccacccaccccgtgaagcccctggcccagatcgccggaaacagatacgcctccggacctgtgggaaaggccctgagcgacgcatgtatgggcacaatcgcctccttcctgtctaagtaccaggacatcatcatcgaacaccagaaggtggtgaagggcaaccagaagagactggagagcctgcgggagctggccggcaaggaaaacctggaataccctagcgtgaccctgccacctcagcctcacaccaaggagggcgttgatgcctacaacgaagtgatcgcccgggtgcgaatgtgggtgaacctgaacctgtggcagaagctgaagctaagcagagatgatgccaagcctctgctgagactgaagggattcccttcctttcctctggtcgagagacaggccaacgaagtggactggtgggacatggtgtgtaacgtgaagaagctgatcaacgagaaaaaggaggatggcaaggtgttttggcagaatctggctggctacaagagacaggaagccctgagaccatacctgagcagcgaggaagatcggaagaagggaaagaaattcgctcggtaccagctgggcgacctgctgctgcacctggaaaagaagcacggcgaggactggggaaaggtgtacgacgaggcctgggagcggattgacaagaaagtggaaggcctgagcaagcacatcaagctggaagaggaacggagaagcgaggacgcccagagcaaggccgccctgaccgactggctgcgggctaaggccagcttcgtgatcgagggcctgaaggaggccgacaaggacgagttctgcagatgcgagctgaagctgcagaagtggtacggggacctgcggggaaagcccttcgccatcgaagccgagaacagcatcctggacatcagcggcttcagcaagcagtacaactgtgccttcatctggcagaaggacggcgtgaagaagctgaacctgtacctgatcatcaactacttcaagggcggcaagctgcggttcaagaagatcaaacctgaagccttcgaagccaacagattctacaccgtgatcaacaaaaagagcggcgagatcgtgcccatggaggtgaacttcaacttcgacgaccccaacctgatcatcctgcctctggcctttggcaagagacagggcagagaattcatctggaacgacctgctgtccctggaaaccggcagcctgaagctggccaacggaagagtgatcgagaagacactgtacaacagaagaacccggcaggatgagcctgccctgttcgtggccctgaccttcgagcggcgggaggtcctggactcctccaatatcaaaccaatgaacctgatcggcgtggcaagaggcgaaaacatccccgccgtgatcgccctgaccgaccccgagggctgcccactgagccggtttaaggatagcctgggaaacccaacccacatcctgagaatcggcgagagctataaggagaagcagcggaccatccaggccaagaaggaggtggagcagcggagagccggcggctacagccggaagtacgccagcaaagccaagaatctggcagacgatatggtgagaaacaccgctagagatctgctgtactacgccgtgacccaggatgccatgctgatcttcgccaacctgagccggggcttcggccggcagggcaagcggaccttcatggccgagagacagtacacacggatggaggactggctgaccgccaagctggcctacgagggcctgagcaagacctacctgtccaagacactggcccagtacacctccaagacatgcagcaactgtgggtttaccatcaccagcgccgactacgacagggtgctggagaagctgaagaagacagcaacaggctggatgaccacaattaacggcaaggagctgaaggtggagggccagattacctactacaacagatacaagagacagaacgtagtcaaggacctgtccgtcgagctggatagactgagcgaagaatctgtgaacaacgacatctcctcctggacaaagggcagaagcggagaagctctgagcctcctgaagaaaagattctcccatagacccgtgcaggagaagttcgtgtgcctgaactgcggcttcgagacacacgcagccgagcaagccgccctgaacatcgccagatcctggctgttcctgcggagccaggagtacaagaaataccagacaaacaagacaaccggcaacaccgataagagagccttcgtcgagacctggcagtccttttaccggaagaagcttaaggaggtgtggaaacctgccgtgcggtctggcggatctggcggaggctccacaagcttccaggccagcgtggtgttcgaggacgtggccgtgaacttcacccccgaggagtgggccctgctgaacaggggccagaggaagctgtacagggacgtgatgctggagacctgcaggaacctgagcgccgtggagaagcagaagttccacagcagcggcgacctgaccaggatgcaggagggcctgctgaggagccccctggtggagagcgtgtgcgagaggatcgagggcgacccctgcggcaccagccccaagaaaaagagaaaagtctaagctgccttctgcggggcttgccttctggccatgcccttcttctctcccttgcacctgtacctcttggtctttgaataaagcctgagtaggaaggctagcaaaaaaaaaaaaaaaaaaaaaaaaaaaaaaaaaaaaaaaaaaaaaaaaaaaaaaaaaaaaaaaaaaaaaaaaaaaaaaaa

SEQ ID NO: 6727 - RNA, 5797 nt, synthetic construct
  source 1..5797: mol_type = other RNA
aggaaataagagagaaaagaagagtaagaagaaatataagagccaccatggcccctaagaagaagcgtaaagtgagccggatggaacgcctcgtctacgaggtgcggcagaagtgcagaaacatcgaggacatctgcatctcctgcggatctctgaacgtgaccctggagcacccactgttcatcggcggcatgtgccagaactgtaaaaactgttttctggagtgtgcctatcaatacgacgatgacggctaccagagctactgcaccatctgttgcggcggaagagaggtgctgatgtgtggaaataacaactgctgccggtgcttctgcgtggaatgcgtggacctgctggtgggccccggcgccgcccaggccgctattaaggaagatccttggaactgctacatgtgcggccacaagggcacatacggcctgctgagacggagagaggactggcctagcagactgcagatgttcttcgccaataaccacgaccaggagttcgacccccctaaggtgtaccctcccgtccccgccgagaagagaaagcccatccgggtcctgagcctgttcgatggcatcgccaccggtctgctggtgctgaaggacctgggcatccaggtggataggtacattgcctccgaggtgtgcgaggactccatcaccgtgggaatggtgcgtcatcagggcaagatcatgtacgtgggcgacgtgcggagcgtgacacagaagcatatccaggagtggggccctttcgacctggtgatcggcggcagcccttgcaatgacctgagcatcgtgaacccagcccggaagggcctgtacgagggaaccggcagactgttcttcgagttttacagactgctgcacgacgcccggcctaaggaaggcgacgaccggcccttcttttggctgttcgagaatgtggtggccatgggagtcagcgacaagcgggatattagccggttcctggagagcaaccccgtgatgatcgatgccaaggaagtgagcgccgcccaccgggccagatacttctggggcaatctgcctggcatgaacagacccctggccagcaccgtgaacgacaagctggagctgcaggagtgcctggagcacggccggatcgccaagttcagcaaggtgagaaccatcaccacccgaagcaacagcatcaaacaaggcaaggaccagcactttcctgtgttcatgaacgagaaggaggacatcctgtggtgtaccgagatggagagagtgttcgggttcccagtccactacacagatgtcagcaacatgtctagactggccagacagagactgctgggaagaagctggtccgtccctgtgatcagacacctgttcgcccctctgaaggagtacttcgcctgcgtgagcagcggcaacagcaacgccaacagccggggccccagcttctctagcggcctggtgccactgtccctgagagggagccacatgggccccatggagatctacaaaaccgtgagcgcctggaagcggcagcctgtgcgcgtgctgagcctgtttcggaatatcgataaagtcctgaaaagcctgggattcctggagagcggctctggctccggcggtggcaccctgaagtacgtggaggatgtgacaaacgtggtcagacgggatgtggagaagtggggccccttcgatctggtgtacggcagcacccaacccctgggcagctcttgtgaccggtgccctggctggtacatgtttcagttccaccggatcctgcagtacgccctgccgagacaggagtcccagcggccattcttttggattttcatggacaacttgctgctgaccgaggatgaccaggaaactaccactcggttcctgcagaccgaagccgtgaccctgcaggacgtgagaggccgggactaccagaacgccatgcgggtgtggtccaacatccctggactgaaaagcaagcacgcacctctgacccctaaagaagaggagtacctgcaggcccaggtgcggagcagaagcaagctggacgcccctaaggtggatctgctggtgaagaattgcctcctgcccctgagagagtacttcaagtatttcagccagaatagtctgcccctgggcggcccaagcagcggcgcccctcctcccagcggcggcagcccagccggctccccaacctctaccgaggagggcacctctgagtccgccacccccgagagcggccctggcacctccaccgagcccagcgagggcagcgcacccggcagccctgccggcagccccacctccacagaggagggaaccagcaccgagcccagcgaaggcagcgccccaggcaccagcaccgagcctagtgagggcggctctggcggcggcagcgcccaggagattaaacggatcaacaagatcagaagaagacttgtgaaagacagcaacaccaagaaggccggcaagacaggccccatgaaaaccctgctggttagagtgatgacacccgatctgagagagcggctggaaaacctgagaaagaagcctgaaaatatcccccagcccatcagcaatacatctagagccaacctgaataagctgctgaccgattacaccgaaatgaagaaggcgatcctgcatgtgtactgggaagagttccagaaggaccctgtgggcctgatgagccgggtggcccagcctgccagcaagaagatcgatcagaacaagctgaaacctgagatggacgagaagggcaacctgaccaccgccggctttgcctgctctcagtgtggccagcccctgttcgtgtacaagctggagcaggtgtctgagaagggcaaggcttacaccaactacttcggacggtgcaatgtggccgagcacgaaaagctgatcctgctggcccagctgaagcccgagaaggatagcgacgaagccgtgacatatagcctgggaaagtttgggcagagggccctggatttctacagcattcatgtgaccaaggagtccacccaccccgtgaagcccctggcccagatcgccggaaacagatacgcctccggacctgtgggaaaggccctgagcgacgcatgtatgggcacaatcgcctccttcctgtctaagtaccaggacatcatcatcgaacaccagaaggtggtgaagggcaaccagaagagactggagagcctgcgggagctggccggcaaggaaaacctggaataccctagcgtgaccctgccacctcagcctcacaccaaggagggcgttgatgcctacaacgaagtgatcgcccgggtgcgaatgtgggtgaacctgaacctgtggcagaagctgaagctaagcagagatgatgccaagcctctgctgagactgaagggattcccttcctttcctctggtcgagagacaggccaacgaagtggactggtgggacatggtgtgtaacgtgaagaagctgatcaacgagaaaaaggaggatggcaaggtgttttggcagaatctggctggctacaagagacaggaagccctgagaccatacctgagcagcgaggaagatcggaagaagggaaagaaattcgctcggtaccagctgggcgacctgctgctgcacctggaaaagaagcacggcgaggactggggaaaggtgtacgacgaggcctgggagcggattgacaagaaagtggaaggcctgagcaagcacatcaagctggaagaggaacggagaagcgaggacgcccagagcaaggccgccctgaccgactggctgcgggctaaggccagcttcgtgatcgagggcctgaaggaggccgacaaggacgagttctgcagatgcgagctgaagctgcagaagtggtacggggacctgcggggaaagcccttcgccatcgaagccgagaacagcatcctggacatcagcggcttcagcaagcagtacaactgtgccttcatctggcagaaggacggcgtgaagaagctgaacctgtacctgatcatcaactacttcaagggcggcaagctgcggttcaagaagatcaaacctgaagccttcgaagccaacagattctacaccgtgatcaacaaaaagagcggcgagatcgtgcccatggaggtgaacttcaacttcgacgaccccaacctgatcatcctgcctctggcctttggcaagagacagggcagagaattcatctggaacgacctgctgtccctggaaaccggcagcctgaagctggccaacggaagagtgatcgagaagacactgtacaacagaagaacccggcaggatgagcctgccctgttcgtggccctgaccttcgagcggcgggaggtcctggactcctccaatatcaaaccaatgaacctgatcggcgtggcaagaggcgaaaacatccccgccgtgatcgccctgaccgaccccgagggctgcccactgagccggtttaaggatagcctgggaaacccaacccacatcctgagaatcggcgagagctataaggagaagcagcggaccatccaggccaagaaggaggtggagcagcggagagccggcggctacagccggaagtacgccagcaaagccaagaatctggcagacgatatggtgagaaacaccgctagagatctgctgtactacgccgtgacccaggatgccatgctgatcttcgccaacctgagccggggcttcggccggcagggcaagcggaccttcatggccgagagacagtacacacggatggaggactggctgaccgccaagctggcctacgagggcctgagcaagacctacctgtccaagacactggcccagtacacctccaagacatgcagcaactgtgggtttaccatcaccagcgccgactacgacagggtgctggagaagctgaagaagacagcaacaggctggatgaccacaattaacggcaaggagctgaaggtggagggccagattacctactacaacagatacaagagacagaacgtagtcaaggacctgtccgtcgagctggatagactgagcgaagaatctgtgaacaacgacatctcctcctggacaaagggcagaagcggagaagctctgagcctcctgaagaaaagattctcccatagacccgtgcaggagaagttcgtgtgcctgaactgcggcttcgagacacacgcagccgagcaagccgccctgaacatcgccagatcctggctgttcctgcggagccaggagtacaagaaataccagacaaacaagacaaccggcaacaccgataagagagccttcgtcgagacctggcagtccttttaccggaagaagcttaaggaggtgtggaaacctgccgtgcggtctggcggatctggcggaggctccacaagccaggccgaggtgaccttcgaggacgtggccgtgctgctgagcagggaggagtggggcaggctgggccccgtgcagaagggcctgtacagggacgtgatgctggagacctacaggaacctggtgagcctgggcgccggccccgccggccccaagcccgaggtgatcacccagctggagaggggcgacgagccctgggtgcccgacgtgcagggcagggagaggcccaccatcgacggcagcgccaccagccccaagaaaaagagaaaagtctaagctgccttctgcggggcttgccttctggccatgcccttcttctctcccttgcacctgtacctcttggtctttgaataaagcctgagtaggaaggctagcaaaaaaaaaaaaaaaaaaaaaaaaaaaaaaaaaaaaaaaaaaaaaaaaaaaaaaaaaaaaaaaaaaaaaaaaaaaaaaaa

SEQ ID NO: 6728 - RNA, 5797 nt, synthetic construct
  source 1..5797: mol_type = other RNA
aggaaataagagagaaaagaagagtaagaagaaatataagagccaccatggcccctaagaagaagcgtaaagtgagccggatggaacgcctcgtctacgaggtgcggcagaagtgcagaaacatcgaggacatctgcatctcctgcggatctctgaacgtgaccctggagcacccactgttcatcggcggcatgtgccagaactgtaaaaactgttttctggagtgtgcctatcaatacgacgatgacggctaccagagctactgcaccatctgttgcggcggaagagaggtgctgatgtgtggaaataacaactgctgccggtgcttctgcgtggaatgcgtggacctgctggtgggccccggcgccgcccaggccgctattaaggaagatccttggaactgctacatgtgcggccacaagggcacatacggcctgctgagacggagagaggactggcctagcagactgcagatgttcttcgccaataaccacgaccaggagttcgacccccctaaggtgtaccctcccgtccccgccgagaagagaaagcccatccgggtcctgagcctgttcgatggcatcgccaccggtctgctggtgctgaaggacctgggcatccaggtggataggtacattgcctccgaggtgtgcgaggactccatcaccgtgggaatggtgcgtcatcagggcaagatcatgtacgtgggcgacgtgcggagcgtgacacagaagcatatccaggagtggggccctttcgacctggtgatcggcggcagcccttgcaatgacctgagcatcgtgaacccagcccggaagggcctgtacgagggaaccggcagactgttcttcgagttttacagactgctgcacgacgcccggcctaaggaaggcgacgaccggcccttcttttggctgttcgagaatgtggtggccatgggagtcagcgacaagcgggatattagccggttcctggagagcaaccccgtgatgatcgatgccaaggaagtgagcgccgcccaccgggccagatacttctggggcaatctgcctggcatgaacagacccctggccagcaccgtgaacgacaagctggagctgcaggagtgcctggagcacggccggatcgccaagttcagcaaggtgagaaccatcaccacccgaagcaacagcatcaaacaaggcaaggaccagcactttcctgtgttcatgaacgagaaggaggacatcctgtggtgtaccgagatggagagagtgttcgggttcccagtccactacacagatgtcagcaacatgtctagactggccagacagagactgctgggaagaagctggtccgtccctgtgatcagacacctgttcgcccctctgaaggagtacttcgcctgcgtgagcagcggcaacagcaacgccaacagccggggccccagcttctctagcggcctggtgccactgtccctgagagggagccacatgggccccatggagatctacaaaaccgtgagcgcctggaagcggcagcctgtgcgcgtgctgagcctgtttcggaatatcgataaagtcctgaaaagcctgggattcctggagagcggctctggctccggcggtggcaccctgaagtacgtggaggatgtgacaaacgtggtcagacgggatgtggagaagtggggccccttcgatctggtgtacggcagcacccaacccctgggcagctcttgtgaccggtgccctggctggtacatgtttcagttccaccggatcctgcagtacgccctgccgagacaggagtcccagcggccattcttttggattttcatggacaacttgctgctgaccgaggatgaccaggaaactaccactcggttcctgcagaccgaagccgtgaccctgcaggacgtgagaggccgggactaccagaacgccatgcgggtgtggtccaacatccctggactgaaaagcaagcacgcacctctgacccctaaagaagaggagtacctgcaggcccaggtgcggagcagaagcaagctggacgcccctaaggtggatctgctggtgaagaattgcctcctgcccctgagagagtacttcaagtatttcagccagaatagtctgcccctgggcggcccaagcagcggcgcccctcctcccagcggcggcagcccagccggctccccaacctctaccgaggagggcacctctgagtccgccacccccgagagcggccctggcacctccaccgagcccagcgagggcagcgcacccggcagccctgccggcagccccacctccacagaggagggaaccagcaccgagcccagcgaaggcagcgccccaggcaccagcaccgagcctagtgagggcggctctggcggcggcagcgcccaggagattaaacggatcaacaagatcagaagaagacttgtgaaagacagcaacaccaagaaggccggcaagacaggccccatgaaaaccctgctggttagagtgatgacacccgatctgagagagcggctggaaaacctgagaaagaagcctgaaaatatcccccagcccatcagcaatacatctagagccaacctgaataagctgctgaccgattacaccgaaatgaagaaggcgatcctgcatgtgtactgggaagagttccagaaggaccctgtgggcctgatgagccgggtggcccagcctgccagcaagaagatcgatcagaacaagctgaaacctgagatggacgagaagggcaacctgaccaccgccggctttgcctgctctcagtgtggccagcccctgttcgtgtacaagctggagcaggtgtctgagaagggcaaggcttacaccaactacttcggacggtgcaatgtggccgagcacgaaaagctgatcctgctggcccagctgaagcccgagaaggatagcgacgaagccgtgacatatagcctgggaaagtttgggcagagggccctggatttctacagcattcatgtgaccaaggagtccacccaccccgtgaagcccctggcccagatcgccggaaacagatacgcctccggacctgtgggaaaggccctgagcgacgcatgtatgggcacaatcgcctccttcctgtctaagtaccaggacatcatcatcgaacaccagaaggtggtgaagggcaaccagaagagactggagagcctgcgggagctggccggcaaggaaaacctggaataccctagcgtgaccctgccacctcagcctcacaccaaggagggcgttgatgcctacaacgaagtgatcgcccgggtgcgaatgtgggtgaacctgaacctgtggcagaagctgaagctaagcagagatgatgccaagcctctgctgagactgaagggattcccttcctttcctctggtcgagagacaggccaacgaagtggactggtgggacatggtgtgtaacgtgaagaagctgatcaacgagaaaaaggaggatggcaaggtgttttggcagaatctggctggctacaagagacaggaagccctgagaccatacctgagcagcgaggaagatcggaagaagggaaagaaattcgctcggtaccagctgggcgacctgctgctgcacctggaaaagaagcacggcgaggactggggaaaggtgtacgacgaggcctgggagcggattgacaagaaagtggaaggcctgagcaagcacatcaagctggaagaggaacggagaagcgaggacgcccagagcaaggccgccctgaccgactggctgcgggctaaggccagcttcgtgatcgagggcctgaaggaggccgacaaggacgagttctgcagatgcgagctgaagctgcagaagtggtacggggacctgcggggaaagcccttcgccatcgaagccgagaacagcatcctggacatcagcggcttcagcaagcagtacaactgtgccttcatctggcagaaggacggcgtgaagaagctgaacctgtacctgatcatcaactacttcaagggcggcaagctgcggttcaagaagatcaaacctgaagccttcgaagccaacagattctacaccgtgatcaacaaaaagagcggcgagatcgtgcccatggaggtgaacttcaacttcgacgaccccaacctgatcatcctgcctctggcctttggcaagagacagggcagagaattcatctggaacgacctgctgtccctggaaaccggcagcctgaagctggccaacggaagagtgatcgagaagacactgtacaacagaagaacccggcaggatgagcctgccctgttcgtggccctgaccttcgagcggcgggaggtcctggactcctccaatatcaaaccaatgaacctgatcggcgtggcaagaggcgaaaacatccccgccgtgatcgccctgaccgaccccgagggctgcccactgagccggtttaaggatagcctgggaaacccaacccacatcctgagaatcggcgagagctataaggagaagcagcggaccatccaggccaagaaggaggtggagcagcggagagccggcggctacagccggaagtacgccagcaaagccaagaatctggcagacgatatggtgagaaacaccgctagagatctgctgtactacgccgtgacccaggatgccatgctgatcttcgccaacctgagccggggcttcggccggcagggcaagcggaccttcatggccgagagacagtacacacggatggaggactggctgaccgccaagctggcctacgagggcctgagcaagacctacctgtccaagacactggcccagtacacctccaagacatgcagcaactgtgggtttaccatcaccagcgccgactacgacagggtgctggagaagctgaagaagacagcaacaggctggatgaccacaattaacggcaaggagctgaaggtggagggccagattacctactacaacagatacaagagacagaacgtagtcaaggacctgtccgtcgagctggatagactgagcgaagaatctgtgaacaacgacatctcctcctggacaaagggcagaagcggagaagctctgagcctcctgaagaaaagattctcccatagacccgtgcaggagaagttcgtgtgcctgaactgcggcttcgagacacacgcagccgagcaagccgccctgaacatcgccagatcctggctgttcctgcggagccaggagtacaagaaataccagacaaacaagacaaccggcaacaccgataagagagccttcgtcgagacctggcagtccttttaccggaagaagcttaaggaggtgtggaaacctgccgtgcggtctggcggatctggcggaggctccacaagcccccaggtgctggtgagcttcgaggaggtggccgtgctgctgagccaggaggagtggggcaggctgagccccgcccagaagggcctgtacagggacgtgatgatggagacctacggcaacctggtgagcctgggcctgcagggcagcaagcccgacgtgatcagcaagctggagcagggcaaggagccctgggccccccacagccccaggatcgagggcagctggatctggaggaggaggaggaccagccccaagaaaaagagaaaagtctaagctgccttctgcggggcttgccttctggccatgcccttcttctctcccttgcacctgtacctcttggtctttgaataaagcctgagtaggaaggctagcaaaaaaaaaaaaaaaaaaaaaaaaaaaaaaaaaaaaaaaaaaaaaaaaaaaaaaaaaaaaaaaaaaaaaaaaaaaaaaaa

SEQ ID NO: 6729 - RNA, 5797 nt, synthetic construct
  source 1..5797: mol_type = other RNA
aggaaataagagagaaaagaagagtaagaagaaatataagagccaccatggcccctaagaagaagcgtaaagtgagccggatggaacgcctcgtctacgaggtgcggcagaagtgcagaaacatcgaggacatctgcatctcctgcggatctctgaacgtgaccctggagcacccactgttcatcggcggcatgtgccagaactgtaaaaactgttttctggagtgtgcctatcaatacgacgatgacggctaccagagctactgcaccatctgttgcggcggaagagaggtgctgatgtgtggaaataacaactgctgccggtgcttctgcgtggaatgcgtggacctgctggtgggccccggcgccgcccaggccgctattaaggaagatccttggaactgctacatgtgcggccacaagggcacatacggcctgctgagacggagagaggactggcctagcagactgcagatgttcttcgccaataaccacgaccaggagttcgacccccctaaggtgtaccctcccgtccccgccgagaagagaaagcccatccgggtcctgagcctgttcgatggcatcgccaccggtctgctggtgctgaaggacctgggcatccaggtggataggtacattgcctccgaggtgtgcgaggactccatcaccgtgggaatggtgcgtcatcagggcaagatcatgtacgtgggcgacgtgcggagcgtgacacagaagcatatccaggagtggggccctttcgacctggtgatcggcggcagcccttgcaatgacctgagcatcgtgaacccagcccggaagggcctgtacgagggaaccggcagactgttcttcgagttttacagactgctgcacgacgcccggcctaaggaaggcgacgaccggcccttcttttggctgttcgagaatgtggtggccatgggagtcagcgacaagcgggatattagccggttcctggagagcaaccccgtgatgatcgatgccaaggaagtgagcgccgcccaccgggccagatacttctggggcaatctgcctggcatgaacagacccctggccagcaccgtgaacgacaagctggagctgcaggagtgcctggagcacggccggatcgccaagttcagcaaggtgagaaccatcaccacccgaagcaacagcatcaaacaaggcaaggaccagcactttcctgtgttcatgaacgagaaggaggacatcctgtggtgtaccgagatggagagagtgttcgggttcccagtccactacacagatgtcagcaacatgtctagactggccagacagagactgctgggaagaagctggtccgtccctgtgatcagacacctgttcgcccctctgaaggagtacttcgcctgcgtgagcagcggcaacagcaacgccaacagccggggccccagcttctctagcggcctggtgccactgtccctgagagggagccacatgggccccatggagatctacaaaaccgtgagcgcctggaagcggcagcctgtgcgcgtgctgagcctgtttcggaatatcgataaagtcctgaaaagcctgggattcctggagagcggctctggctccggcggtggcaccctgaagtacgtggaggatgtgacaaacgtggtcagacgggatgtggagaagtggggccccttcgatctggtgtacggcagcacccaacccctgggcagctcttgtgaccggtgccctggctggtacatgtttcagttccaccggatcctgcagtacgccctgccgagacaggagtcccagcggccattcttttggattttcatggacaacttgctgctgaccgaggatgaccaggaaactaccactcggttcctgcagaccgaagccgtgaccctgcaggacgtgagaggccgggactaccagaacgccatgcgggtgtggtccaacatccctggactgaaaagcaagcacgcacctctgacccctaaagaagaggagtacctgcaggcccaggtgcggagcagaagcaagctggacgcccctaaggtggatctgctggtgaagaattgcctcctgcccctgagagagtacttcaagtatttcagccagaatagtctgcccctgggcggcccaagcagcggcgcccctcctcccagcggcggcagcccagccggctccccaacctctaccgaggagggcacctctgagtccgccacccccgagagcggccctggcacctccaccgagcccagcgagggcagcgcacccggcagccctgccggcagccccacctccacagaggagggaaccagcaccgagcccagcgaaggcagcgccccaggcaccagcaccgagcctagtgagggcggctctggcggcggcagcgcccaggagattaaacggatcaacaagatcagaagaagacttgtgaaagacagcaacaccaagaaggccggcaagacaggccccatgaaaaccctgctggttagagtgatgacacccgatctgagagagcggctggaaaacctgagaaagaagcctgaaaatatcccccagcccatcagcaatacatctagagccaacctgaataagctgctgaccgattacaccgaaatgaagaaggcgatcctgcatgtgtactgggaagagttccagaaggaccctgtgggcctgatgagccgggtggcccagcctgccagcaagaagatcgatcagaacaagctgaaacctgagatggacgagaagggcaacctgaccaccgccggctttgcctgctctcagtgtggccagcccctgttcgtgtacaagctggagcaggtgtctgagaagggcaaggcttacaccaactacttcggacggtgcaatgtggccgagcacgaaaagctgatcctgctggcccagctgaagcccgagaaggatagcgacgaagccgtgacatatagcctgggaaagtttgggcagagggccctggatttctacagcattcatgtgaccaaggagtccacccaccccgtgaagcccctggcccagatcgccggaaacagatacgcctccggacctgtgggaaaggccctgagcgacgcatgtatgggcacaatcgcctccttcctgtctaagtaccaggacatcatcatcgaacaccagaaggtggtgaagggcaaccagaagagactggagagcctgcgggagctggccggcaaggaaaacctggaataccctagcgtgaccctgccacctcagcctcacaccaaggagggcgttgatgcctacaacgaagtgatcgcccgggtgcgaatgtgggtgaacctgaacctgtggcagaagctgaagctaagcagagatgatgccaagcctctgctgagactgaagggattcccttcctttcctctggtcgagagacaggccaacgaagtggactggtgggacatggtgtgtaacgtgaagaagctgatcaacgagaaaaaggaggatggcaaggtgttttggcagaatctggctggctacaagagacaggaagccctgagaccatacctgagcagcgaggaagatcggaagaagggaaagaaattcgctcggtaccagctgggcgacctgctgctgcacctggaaaagaagcacggcgaggactggggaaaggtgtacgacgaggcctgggagcggattgacaagaaagtggaaggcctgagcaagcacatcaagctggaagaggaacggagaagcgaggacgcccagagcaaggccgccctgaccgactggctgcgggctaaggccagcttcgtgatcgagggcctgaaggaggccgacaaggacgagttctgcagatgcgagctgaagctgcagaagtggtacggggacctgcggggaaagcccttcgccatcgaagccgagaacagcatcctggacatcagcggcttcagcaagcagtacaactgtgccttcatctggcagaaggacggcgtgaagaagctgaacctgtacctgatcatcaactacttcaagggcggcaagctgcggttcaagaagatcaaacctgaagccttcgaagccaacagattctacaccgtgatcaacaaaaagagcggcgagatcgtgcccatggaggtgaacttcaacttcgacgaccccaacctgatcatcctgcctctggcctttggcaagagacagggcagagaattcatctggaacgacctgctgtccctggaaaccggcagcctgaagctggccaacggaagagtgatcgagaagacactgtacaacagaagaacccggcaggatgagcctgccctgttcgtggccctgaccttcgagcggcgggaggtcctggactcctccaatatcaaaccaatgaacctgatcggcgtggcaagaggcgaaaacatccccgccgtgatcgccctgaccgaccccgagggctgcccactgagccggtttaaggatagcctgggaaacccaacccacatcctgagaatcggcgagagctataaggagaagcagcggaccatccaggccaagaaggaggtggagcagcggagagccggcggctacagccggaagtacgccagcaaagccaagaatctggcagacgatatggtgagaaacaccgctagagatctgctgtactacgccgtgacccaggatgccatgctgatcttcgccaacctgagccggggcttcggccggcagggcaagcggaccttcatggccgagagacagtacacacggatggaggactggctgaccgccaagctggcctacgagggcctgagcaagacctacctgtccaagacactggcccagtacacctccaagacatgcagcaactgtgggtttaccatcaccagcgccgactacgacagggtgctggagaagctgaagaagacagcaacaggctggatgaccacaattaacggcaaggagctgaaggtggagggccagattacctactacaacagatacaagagacagaacgtagtcaaggacctgtccgtcgagctggatagactgagcgaagaatctgtgaacaacgacatctcctcctggacaaagggcagaagcggagaagctctgagcctcctgaagaaaagattctcccatagacccgtgcaggagaagttcgtgtgcctgaactgcggcttcgagacacacgcagccgagcaagccgccctgaacatcgccagatcctggctgttcctgcggagccaggagtacaagaaataccagacaaacaagacaaccggcaacaccgataagagagccttcgtcgagacctggcagtccttttaccggaagaagcttaaggaggtgtggaaacctgccgtgcggtctggcggatctggcggaggctccacaagcatgatcgagtaccagatccccgtgagcttcaaggacgtggtggtgggcttcacccaggaggagtggcacaggctgagccccgcccagagggccctgtacagggacgtgatgctggagacctacagcaacctggtgagcgtgggctacgagggcaccaagcccgacgtgatcctgaggctggagcaggaggaggccccctggatcggcgaggccgcctgccccggctgccactgctggggcaagaccagccccaagaaaaagagaaaagtctaagctgccttctgcggggcttgccttctggccatgcccttcttctctcccttgcacctgtacctcttggtctttgaataaagcctgagtaggaaggctagcaaaaaaaaaaaaaaaaaaaaaaaaaaaaaaaaaaaaaaaaaaaaaaaaaaaaaaaaaaaaaaaaaaaaaaaaaaaaaaaa

SEQ ID NO: 6730 - RNA, 5797 nt, synthetic construct
  source 1..5797: mol_type = other RNA
aggaaataagagagaaaagaagagtaagaagaaatataagagccaccatggcccctaagaagaagcgtaaagtgagccggatggaacgcctcgtctacgaggtgcggcagaagtgcagaaacatcgaggacatctgcatctcctgcggatctctgaacgtgaccctggagcacccactgttcatcggcggcatgtgccagaactgtaaaaactgttttctggagtgtgcctatcaatacgacgatgacggctaccagagctactgcaccatctgttgcggcggaagagaggtgctgatgtgtggaaataacaactgctgccggtgcttctgcgtggaatgcgtggacctgctggtgggccccggcgccgcccaggccgctattaaggaagatccttggaactgctacatgtgcggccacaagggcacatacggcctgctgagacggagagaggactggcctagcagactgcagatgttcttcgccaataaccacgaccaggagttcgacccccctaaggtgtaccctcccgtccccgccgagaagagaaagcccatccgggtcctgagcctgttcgatggcatcgccaccggtctgctggtgctgaaggacctgggcatccaggtggataggtacattgcctccgaggtgtgcgaggactccatcaccgtgggaatggtgcgtcatcagggcaagatcatgtacgtgggcgacgtgcggagcgtgacacagaagcatatccaggagtggggccctttcgacctggtgatcggcggcagcccttgcaatgacctgagcatcgtgaacccagcccggaagggcctgtacgagggaaccggcagactgttcttcgagttttacagactgctgcacgacgcccggcctaaggaaggcgacgaccggcccttcttttggctgttcgagaatgtggtggccatgggagtcagcgacaagcgggatattagccggttcctggagagcaaccccgtgatgatcgatgccaaggaagtgagcgccgcccaccgggccagatacttctggggcaatctgcctggcatgaacagacccctggccagcaccgtgaacgacaagctggagctgcaggagtgcctggagcacggccggatcgccaagttcagcaaggtgagaaccatcaccacccgaagcaacagcatcaaacaaggcaaggaccagcactttcctgtgttcatgaacgagaaggaggacatcctgtggtgtaccgagatggagagagtgttcgggttcccagtccactacacagatgtcagcaacatgtctagactggccagacagagactgctgggaagaagctggtccgtccctgtgatcagacacctgttcgcccctctgaaggagtacttcgcctgcgtgagcagcggcaacagcaacgccaacagccggggccccagcttctctagcggcctggtgccactgtccctgagagggagccacatgggccccatggagatctacaaaaccgtgagcgcctggaagcggcagcctgtgcgcgtgctgagcctgtttcggaatatcgataaagtcctgaaaagcctgggattcctggagagcggctctggctccggcggtggcaccctgaagtacgtggaggatgtgacaaacgtggtcagacgggatgtggagaagtggggccccttcgatctggtgtacggcagcacccaacccctgggcagctcttgtgaccggtgccctggctggtacatgtttcagttccaccggatcctgcagtacgccctgccgagacaggagtcccagcggccattcttttggattttcatggacaacttgctgctgaccgaggatgaccaggaaactaccactcggttcctgcagaccgaagccgtgaccctgcaggacgtgagaggccgggactaccagaacgccatgcgggtgtggtccaacatccctggactgaaaagcaagcacgcacctctgacccctaaagaagaggagtacctgcaggcccaggtgcggagcagaagcaagctggacgcccctaaggtggatctgctggtgaagaattgcctcctgcccctgagagagtacttcaagtatttcagccagaatagtctgcccctgggcggcccaagcagcggcgcccctcctcccagcggcggcagcccagccggctccccaacctctaccgaggagggcacctctgagtccgccacccccgagagcggccctggcacctccaccgagcccagcgagggcagcgcacccggcagccctgccggcagccccacctccacagaggagggaaccagcaccgagcccagcgaaggcagcgccccaggcaccagcaccgagcctagtgagggcggctctggcggcggcagcgcccaggagattaaacggatcaacaagatcagaagaagacttgtgaaagacagcaacaccaagaaggccggcaagacaggccccatgaaaaccctgctggttagagtgatgacacccgatctgagagagcggctggaaaacctgagaaagaagcctgaaaatatcccccagcccatcagcaatacatctagagccaacctgaataagctgctgaccgattacaccgaaatgaagaaggcgatcctgcatgtgtactgggaagagttccagaaggaccctgtgggcctgatgagccgggtggcccagcctgccagcaagaagatcgatcagaacaagctgaaacctgagatggacgagaagggcaacctgaccaccgccggctttgcctgctctcagtgtggccagcccctgttcgtgtacaagctggagcaggtgtctgagaagggcaaggcttacaccaactacttcggacggtgcaatgtggccgagcacgaaaagctgatcctgctggcccagctgaagcccgagaaggatagcgacgaagccgtgacatatagcctgggaaagtttgggcagagggccctggatttctacagcattcatgtgaccaaggagtccacccaccccgtgaagcccctggcccagatcgccggaaacagatacgcctccggacctgtgggaaaggccctgagcgacgcatgtatgggcacaatcgcctccttcctgtctaagtaccaggacatcatcatcgaacaccagaaggtggtgaagggcaaccagaagagactggagagcctgcgggagctggccggcaaggaaaacctggaataccctagcgtgaccctgccacctcagcctcacaccaaggagggcgttgatgcctacaacgaagtgatcgcccgggtgcgaatgtgggtgaacctgaacctgtggcagaagctgaagctaagcagagatgatgccaagcctctgctgagactgaagggattcccttcctttcctctggtcgagagacaggccaacgaagtggactggtgggacatggtgtgtaacgtgaagaagctgatcaacgagaaaaaggaggatggcaaggtgttttggcagaatctggctggctacaagagacaggaagccctgagaccatacctgagcagcgaggaagatcggaagaagggaaagaaattcgctcggtaccagctgggcgacctgctgctgcacctggaaaagaagcacggcgaggactggggaaaggtgtacgacgaggcctgggagcggattgacaagaaagtggaaggcctgagcaagcacatcaagctggaagaggaacggagaagcgaggacgcccagagcaaggccgccctgaccgactggctgcgggctaaggccagcttcgtgatcgagggcctgaaggaggccgacaaggacgagttctgcagatgcgagctgaagctgcagaagtggtacggggacctgcggggaaagcccttcgccatcgaagccgagaacagcatcctggacatcagcggcttcagcaagcagtacaactgtgccttcatctggcagaaggacggcgtgaagaagctgaacctgtacctgatcatcaactacttcaagggcggcaagctgcggttcaagaagatcaaacctgaagccttcgaagccaacagattctacaccgtgatcaacaaaaagagcggcgagatcgtgcccatggaggtgaacttcaacttcgacgaccccaacctgatcatcctgcctctggcctttggcaagagacagggcagagaattcatctggaacgacctgctgtccctggaaaccggcagcctgaagctggccaacggaagagtgatcgagaagacactgtacaacagaagaacccggcaggatgagcctgccctgttcgtggccctgaccttcgagcggcgggaggtcctggactcctccaatatcaaaccaatgaacctgatcggcgtggcaagaggcgaaaacatccccgccgtgatcgccctgaccgaccccgagggctgcccactgagccggtttaaggatagcctgggaaacccaacccacatcctgagaatcggcgagagctataaggagaagcagcggaccatccaggccaagaaggaggtggagcagcggagagccggcggctacagccggaagtacgccagcaaagccaagaatctggcagacgatatggtgagaaacaccgctagagatctgctgtactacgccgtgacccaggatgccatgctgatcttcgccaacctgagccggggcttcggccggcagggcaagcggaccttcatggccgagagacagtacacacggatggaggactggctgaccgccaagctggcctacgagggcctgagcaagacctacctgtccaagacactggcccagtacacctccaagacatgcagcaactgtgggtttaccatcaccagcgccgactacgacagggtgctggagaagctgaagaagacagcaacaggctggatgaccacaattaacggcaaggagctgaaggtggagggccagattacctactacaacagatacaagagacagaacgtagtcaaggacctgtccgtcgagctggatagactgagcgaagaatctgtgaacaacgacatctcctcctggacaaagggcagaagcggagaagctctgagcctcctgaagaaaagattctcccatagacccgtgcaggagaagttcgtgtgcctgaactgcggcttcgagacacacgcagccgagcaagccgccctgaacatcgccagatcctggctgttcctgcggagccaggagtacaagaaataccagacaaacaagacaaccggcaacaccgataagagagccttcgtcgagacctggcagtccttttaccggaagaagcttaaggaggtgtggaaacctgccgtgcggtctggcggatctggcggaggctccacaagcctgcaggaggccgtgaccttcaacgacgtggccatcgacttcagccaggaggagtgggagtggctgaacagcgcccagaggagcctgtacaggaccgtggtgctggagaactacaggaacctggtgagcgtgggcgcctgcatcagcaagcccagcctgatcagcctgctggagcacggcaaggagccctgggaggtgaagggccaggtgaccggcagcagggtgcagggcggcgagagcgtgaccagccccaagaaaaagagaaaagtctaagctgccttctgcggggcttgccttctggccatgcccttcttctctcccttgcacctgtacctcttggtctttgaataaagcctgagtaggaaggctagcaaaaaaaaaaaaaaaaaaaaaaaaaaaaaaaaaaaaaaaaaaaaaaaaaaaaaaaaaaaaaaaaaaaaaaaaaaaaaaaa

SEQ ID NO: 6731 - RNA, 5797 nt, synthetic construct
  source 1..5797: mol_type = other RNA
aggaaataagagagaaaagaagagtaagaagaaatataagagccaccatggcccctaagaagaagcgtaaagtgagccggatggaacgcctcgtctacgaggtgcggcagaagtgcagaaacatcgaggacatctgcatctcctgcggatctctgaacgtgaccctggagcacccactgttcatcggcggcatgtgccagaactgtaaaaactgttttctggagtgtgcctatcaatacgacgatgacggctaccagagctactgcaccatctgttgcggcggaagagaggtgctgatgtgtggaaataacaactgctgccggtgcttctgcgtggaatgcgtggacctgctggtgggccccggcgccgcccaggccgctattaaggaagatccttggaactgctacatgtgcggccacaagggcacatacggcctgctgagacggagagaggactggcctagcagactgcagatgttcttcgccaataaccacgaccaggagttcgacccccctaaggtgtaccctcccgtccccgccgagaagagaaagcccatccgggtcctgagcctgttcgatggcatcgccaccggtctgctggtgctgaaggacctgggcatccaggtggataggtacattgcctccgaggtgtgcgaggactccatcaccgtgggaatggtgcgtcatcagggcaagatcatgtacgtgggcgacgtgcggagcgtgacacagaagcatatccaggagtggggccctttcgacctggtgatcggcggcagcccttgcaatgacctgagcatcgtgaacccagcccggaagggcctgtacgagggaaccggcagactgttcttcgagttttacagactgctgcacgacgcccggcctaaggaaggcgacgaccggcccttcttttggctgttcgagaatgtggtggccatgggagtcagcgacaagcgggatattagccggttcctggagagcaaccccgtgatgatcgatgccaaggaagtgagcgccgcccaccgggccagatacttctggggcaatctgcctggcatgaacagacccctggccagcaccgtgaacgacaagctggagctgcaggagtgcctggagcacggccggatcgccaagttcagcaaggtgagaaccatcaccacccgaagcaacagcatcaaacaaggcaaggaccagcactttcctgtgttcatgaacgagaaggaggacatcctgtggtgtaccgagatggagagagtgttcgggttcccagtccactacacagatgtcagcaacatgtctagactggccagacagagactgctgggaagaagctggtccgtccctgtgatcagacacctgttcgcccctctgaaggagtacttcgcctgcgtgagcagcggcaacagcaacgccaacagccggggccccagcttctctagcggcctggtgccactgtccctgagagggagccacatgggccccatggagatctacaaaaccgtgagcgcctggaagcggcagcctgtgcgcgtgctgagcctgtttcggaatatcgataaagtcctgaaaagcctgggattcctggagagcggctctggctccggcggtggcaccctgaagtacgtggaggatgtgacaaacgtggtcagacgggatgtggagaagtggggccccttcgatctggtgtacggcagcacccaacccctgggcagctcttgtgaccggtgccctggctggtacatgtttcagttccaccggatcctgcagtacgccctgccgagacaggagtcccagcggccattcttttggattttcatggacaacttgctgctgaccgaggatgaccaggaaactaccactcggttcctgcagaccgaagccgtgaccctgcaggacgtgagaggccgggactaccagaacgccatgcgggtgtggtccaacatccctggactgaaaagcaagcacgcacctctgacccctaaagaagaggagtacctgcaggcccaggtgcggagcagaagcaagctggacgcccctaaggtggatctgctggtgaagaattgcctcctgcccctgagagagtacttcaagtatttcagccagaatagtctgcccctgggcggcccaagcagcggcgcccctcctcccagcggcggcagcccagccggctccccaacctctaccgaggagggcacctctgagtccgccacccccgagagcggccctggcacctccaccgagcccagcgagggcagcgcacccggcagccctgccggcagccccacctccacagaggagggaaccagcaccgagcccagcgaaggcagcgccccaggcaccagcaccgagcctagtgagggcggctctggcggcggcagcgcccaggagattaaacggatcaacaagatcagaagaagacttgtgaaagacagcaacaccaagaaggccggcaagacaggccccatgaaaaccctgctggttagagtgatgacacccgatctgagagagcggctggaaaacctgagaaagaagcctgaaaatatcccccagcccatcagcaatacatctagagccaacctgaataagctgctgaccgattacaccgaaatgaagaaggcgatcctgcatgtgtactgggaagagttccagaaggaccctgtgggcctgatgagccgggtggcccagcctgccagcaagaagatcgatcagaacaagctgaaacctgagatggacgagaagggcaacctgaccaccgccggctttgcctgctctcagtgtggccagcccctgttcgtgtacaagctggagcaggtgtctgagaagggcaaggcttacaccaactacttcggacggtgcaatgtggccgagcacgaaaagctgatcctgctggcccagctgaagcccgagaaggatagcgacgaagccgtgacatatagcctgggaaagtttgggcagagggccctggatttctacagcattcatgtgaccaaggagtccacccaccccgtgaagcccctggcccagatcgccggaaacagatacgcctccggacctgtgggaaaggccctgagcgacgcatgtatgggcacaatcgcctccttcctgtctaagtaccaggacatcatcatcgaacaccagaaggtggtgaagggcaaccagaagagactggagagcctgcgggagctggccggcaaggaaaacctggaataccctagcgtgaccctgccacctcagcctcacaccaaggagggcgttgatgcctacaacgaagtgatcgcccgggtgcgaatgtgggtgaacctgaacctgtggcagaagctgaagctaagcagagatgatgccaagcctctgctgagactgaagggattcccttcctttcctctggtcgagagacaggccaacgaagtggactggtgggacatggtgtgtaacgtgaagaagctgatcaacgagaaaaaggaggatggcaaggtgttttggcagaatctggctggctacaagagacaggaagccctgagaccatacctgagcagcgaggaagatcggaagaagggaaagaaattcgctcggtaccagctgggcgacctgctgctgcacctggaaaagaagcacggcgaggactggggaaaggtgtacgacgaggcctgggagcggattgacaagaaagtggaaggcctgagcaagcacatcaagctggaagaggaacggagaagcgaggacgcccagagcaaggccgccctgaccgactggctgcgggctaaggccagcttcgtgatcgagggcctgaaggaggccgacaaggacgagttctgcagatgcgagctgaagctgcagaagtggtacggggacctgcggggaaagcccttcgccatcgaagccgagaacagcatcctggacatcagcggcttcagcaagcagtacaactgtgccttcatctggcagaaggacggcgtgaagaagctgaacctgtacctgatcatcaactacttcaagggcggcaagctgcggttcaagaagatcaaacctgaagccttcgaagccaacagattctacaccgtgatcaacaaaaagagcggcgagatcgtgcccatggaggtgaacttcaacttcgacgaccccaacctgatcatcctgcctctggcctttggcaagagacagggcagagaattcatctggaacgacctgctgtccctggaaaccggcagcctgaagctggccaacggaagagtgatcgagaagacactgtacaacagaagaacccggcaggatgagcctgccctgttcgtggccctgaccttcgagcggcgggaggtcctggactcctccaatatcaaaccaatgaacctgatcggcgtggcaagaggcgaaaacatccccgccgtgatcgccctgaccgaccccgagggctgcccactgagccggtttaaggatagcctgggaaacccaacccacatcctgagaatcggcgagagctataaggagaagcagcggaccatccaggccaagaaggaggtggagcagcggagagccggcggctacagccggaagtacgccagcaaagccaagaatctggcagacgatatggtgagaaacaccgctagagatctgctgtactacgccgtgacccaggatgccatgctgatcttcgccaacctgagccggggcttcggccggcagggcaagcggaccttcatggccgagagacagtacacacggatggaggactggctgaccgccaagctggcctacgagggcctgagcaagacctacctgtccaagacactggcccagtacacctccaagacatgcagcaactgtgggtttaccatcaccagcgccgactacgacagggtgctggagaagctgaagaagacagcaacaggctggatgaccacaattaacggcaaggagctgaaggtggagggccagattacctactacaacagatacaagagacagaacgtagtcaaggacctgtccgtcgagctggatagactgagcgaagaatctgtgaacaacgacatctcctcctggacaaagggcagaagcggagaagctctgagcctcctgaagaaaagattctcccatagacccgtgcaggagaagttcgtgtgcctgaactgcggcttcgagacacacgcagccgagcaagccgccctgaacatcgccagatcctggctgttcctgcggagccaggagtacaagaaataccagacaaacaagacaaccggcaacaccgataagagagccttcgtcgagacctggcagtccttttaccggaagaagcttaaggaggtgtggaaacctgccgtgcggtctggcggatctggcggaggctccacaagcatggccctgacccagggccaggtgaccttcagggacgtggccatcgagttcagccaggaggagtggacctgcctggaccccgcccagaggagcctgtacagggacgtgatgctggagaactacaggaacctggccagcctgggcatcagctgcttcgacctgagcatcatcagcatgctggagcagggcaagggccccttcgccctggagagccaggtgcagagggccggcaaccccgacggcaccagccccaagaaaaagagaaaagtctaagctgccttctgcggggcttgccttctggccatgcccttcttctctcccttgcacctgtacctcttggtctttgaataaagcctgagtaggaaggctagcaaaaaaaaaaaaaaaaaaaaaaaaaaaaaaaaaaaaaaaaaaaaaaaaaaaaaaaaaaaaaaaaaaaaaaaaaaaaaaaa

SEQ ID NO: 6732 - RNA, 5797 nt, synthetic construct
  source 1..5797: mol_type = other RNA
aggaaataagagagaaaagaagagtaagaagaaatataagagccaccatggcccctaagaagaagcgtaaagtgagccggatggaacgcctcgtctacgaggtgcggcagaagtgcagaaacatcgaggacatctgcatctcctgcggatctctgaacgtgaccctggagcacccactgttcatcggcggcatgtgccagaactgtaaaaactgttttctggagtgtgcctatcaatacgacgatgacggctaccagagctactgcaccatctgttgcggcggaagagaggtgctgatgtgtggaaataacaactgctgccggtgcttctgcgtggaatgcgtggacctgctggtgggccccggcgccgcccaggccgctattaaggaagatccttggaactgctacatgtgcggccacaagggcacatacggcctgctgagacggagagaggactggcctagcagactgcagatgttcttcgccaataaccacgaccaggagttcgacccccctaaggtgtaccctcccgtccccgccgagaagagaaagcccatccgggtcctgagcctgttcgatggcatcgccaccggtctgctggtgctgaaggacctgggcatccaggtggataggtacattgcctccgaggtgtgcgaggactccatcaccgtgggaatggtgcgtcatcagggcaagatcatgtacgtgggcgacgtgcggagcgtgacacagaagcatatccaggagtggggccctttcgacctggtgatcggcggcagcccttgcaatgacctgagcatcgtgaacccagcccggaagggcctgtacgagggaaccggcagactgttcttcgagttttacagactgctgcacgacgcccggcctaaggaaggcgacgaccggcccttcttttggctgttcgagaatgtggtggccatgggagtcagcgacaagcgggatattagccggttcctggagagcaaccccgtgatgatcgatgccaaggaagtgagcgccgcccaccgggccagatacttctggggcaatctgcctggcatgaacagacccctggccagcaccgtgaacgacaagctggagctgcaggagtgcctggagcacggccggatcgccaagttcagcaaggtgagaaccatcaccacccgaagcaacagcatcaaacaaggcaaggaccagcactttcctgtgttcatgaacgagaaggaggacatcctgtggtgtaccgagatggagagagtgttcgggttcccagtccactacacagatgtcagcaacatgtctagactggccagacagagactgctgggaagaagctggtccgtccctgtgatcagacacctgttcgcccctctgaaggagtacttcgcctgcgtgagcagcggcaacagcaacgccaacagccggggccccagcttctctagcggcctggtgccactgtccctgagagggagccacatgggccccatggagatctacaaaaccgtgagcgcctggaagcggcagcctgtgcgcgtgctgagcctgtttcggaatatcgataaagtcctgaaaagcctgggattcctggagagcggctctggctccggcggtggcaccctgaagtacgtggaggatgtgacaaacgtggtcagacgggatgtggagaagtggggccccttcgatctggtgtacggcagcacccaacccctgggcagctcttgtgaccggtgccctggctggtacatgtttcagttccaccggatcctgcagtacgccctgccgagacaggagtcccagcggccattcttttggattttcatggacaacttgctgctgaccgaggatgaccaggaaactaccactcggttcctgcagaccgaagccgtgaccctgcaggacgtgagaggccgggactaccagaacgccatgcgggtgtggtccaacatccctggactgaaaagcaagcacgcacctctgacccctaaagaagaggagtacctgcaggcccaggtgcggagcagaagcaagctggacgcccctaaggtggatctgctggtgaagaattgcctcctgcccctgagagagtacttcaagtatttcagccagaatagtctgcccctgggcggcccaagcagcggcgcccctcctcccagcggcggcagcccagccggctccccaacctctaccgaggagggcacctctgagtccgccacccccgagagcggccctggcacctccaccgagcccagcgagggcagcgcacccggcagccctgccggcagccccacctccacagaggagggaaccagcaccgagcccagcgaaggcagcgccccaggcaccagcaccgagcctagtgagggcggctctggcggcggcagcgcccaggagattaaacggatcaacaagatcagaagaagacttgtgaaagacagcaacaccaagaaggccggcaagacaggccccatgaaaaccctgctggttagagtgatgacacccgatctgagagagcggctggaaaacctgagaaagaagcctgaaaatatcccccagcccatcagcaatacatctagagccaacctgaataagctgctgaccgattacaccgaaatgaagaaggcgatcctgcatgtgtactgggaagagttccagaaggaccctgtgggcctgatgagccgggtggcccagcctgccagcaagaagatcgatcagaacaagctgaaacctgagatggacgagaagggcaacctgaccaccgccggctttgcctgctctcagtgtggccagcccctgttcgtgtacaagctggagcaggtgtctgagaagggcaaggcttacaccaactacttcggacggtgcaatgtggccgagcacgaaaagctgatcctgctggcccagctgaagcccgagaaggatagcgacgaagccgtgacatatagcctgggaaagtttgggcagagggccctggatttctacagcattcatgtgaccaaggagtccacccaccccgtgaagcccctggcccagatcgccggaaacagatacgcctccggacctgtgggaaaggccctgagcgacgcatgtatgggcacaatcgcctccttcctgtctaagtaccaggacatcatcatcgaacaccagaaggtggtgaagggcaaccagaagagactggagagcctgcgggagctggccggcaaggaaaacctggaataccctagcgtgaccctgccacctcagcctcacaccaaggagggcgttgatgcctacaacgaagtgatcgcccgggtgcgaatgtgggtgaacctgaacctgtggcagaagctgaagctaagcagagatgatgccaagcctctgctgagactgaagggattcccttcctttcctctggtcgagagacaggccaacgaagtggactggtgggacatggtgtgtaacgtgaagaagctgatcaacgagaaaaaggaggatggcaaggtgttttggcagaatctggctggctacaagagacaggaagccctgagaccatacctgagcagcgaggaagatcggaagaagggaaagaaattcgctcggtaccagctgggcgacctgctgctgcacctggaaaagaagcacggcgaggactggggaaaggtgtacgacgaggcctgggagcggattgacaagaaagtggaaggcctgagcaagcacatcaagctggaagaggaacggagaagcgaggacgcccagagcaaggccgccctgaccgactggctgcgggctaaggccagcttcgtgatcgagggcctgaaggaggccgacaaggacgagttctgcagatgcgagctgaagctgcagaagtggtacggggacctgcggggaaagcccttcgccatcgaagccgagaacagcatcctggacatcagcggcttcagcaagcagtacaactgtgccttcatctggcagaaggacggcgtgaagaagctgaacctgtacctgatcatcaactacttcaagggcggcaagctgcggttcaagaagatcaaacctgaagccttcgaagccaacagattctacaccgtgatcaacaaaaagagcggcgagatcgtgcccatggaggtgaacttcaacttcgacgaccccaacctgatcatcctgcctctggcctttggcaagagacagggcagagaattcatctggaacgacctgctgtccctggaaaccggcagcctgaagctggccaacggaagagtgatcgagaagacactgtacaacagaagaacccggcaggatgagcctgccctgttcgtggccctgaccttcgagcggcgggaggtcctggactcctccaatatcaaaccaatgaacctgatcggcgtggcaagaggcgaaaacatccccgccgtgatcgccctgaccgaccccgagggctgcccactgagccggtttaaggatagcctgggaaacccaacccacatcctgagaatcggcgagagctataaggagaagcagcggaccatccaggccaagaaggaggtggagcagcggagagccggcggctacagccggaagtacgccagcaaagccaagaatctggcagacgatatggtgagaaacaccgctagagatctgctgtactacgccgtgacccaggatgccatgctgatcttcgccaacctgagccggggcttcggccggcagggcaagcggaccttcatggccgagagacagtacacacggatggaggactggctgaccgccaagctggcctacgagggcctgagcaagacctacctgtccaagacactggcccagtacacctccaagacatgcagcaactgtgggtttaccatcaccagcgccgactacgacagggtgctggagaagctgaagaagacagcaacaggctggatgaccacaattaacggcaaggagctgaaggtggagggccagattacctactacaacagatacaagagacagaacgtagtcaaggacctgtccgtcgagctggatagactgagcgaagaatctgtgaacaacgacatctcctcctggacaaagggcagaagcggagaagctctgagcctcctgaagaaaagattctcccatagacccgtgcaggagaagttcgtgtgcctgaactgcggcttcgagacacacgcagccgagcaagccgccctgaacatcgccagatcctggctgttcctgcggagccaggagtacaagaaataccagacaaacaagacaaccggcaacaccgataagagagccttcgtcgagacctggcagtccttttaccggaagaagcttaaggaggtgtggaaacctgccgtgcggtctggcggatctggcggaggctccacaagcctggcccccgacgaccacggcagcagctacgagggcagcgtgagcttcagggacgtggccatcgacttcagcagggaggagtggaggcacctggaccccagccagaggaacctgtacagggacgtgatgctggagacctacagccacctgctgagcgtgggctaccaggtgcccgaggccgaggtggtgatgctggagcagggcaaggagccctgggccctgcagggcgagaggcccaggcacaccagccccaagaaaaagagaaaagtctaagctgccttctgcggggcttgccttctggccatgcccttcttctctcccttgcacctgtacctcttggtctttgaataaagcctgagtaggaaggctagcaaaaaaaaaaaaaaaaaaaaaaaaaaaaaaaaaaaaaaaaaaaaaaaaaaaaaaaaaaaaaaaaaaaaaaaaaaaaaaaa

SEQ ID NO: 6733 - RNA, 5797 nt, synthetic construct
  source 1..5797: mol_type = other RNA
aggaaataagagagaaaagaagagtaagaagaaatataagagccaccatggcccctaagaagaagcgtaaagtgagccggatggaacgcctcgtctacgaggtgcggcagaagtgcagaaacatcgaggacatctgcatctcctgcggatctctgaacgtgaccctggagcacccactgttcatcggcggcatgtgccagaactgtaaaaactgttttctggagtgtgcctatcaatacgacgatgacggctaccagagctactgcaccatctgttgcggcggaagagaggtgctgatgtgtggaaataacaactgctgccggtgcttctgcgtggaatgcgtggacctgctggtgggccccggcgccgcccaggccgctattaaggaagatccttggaactgctacatgtgcggccacaagggcacatacggcctgctgagacggagagaggactggcctagcagactgcagatgttcttcgccaataaccacgaccaggagttcgacccccctaaggtgtaccctcccgtccccgccgagaagagaaagcccatccgggtcctgagcctgttcgatggcatcgccaccggtctgctggtgctgaaggacctgggcatccaggtggataggtacattgcctccgaggtgtgcgaggactccatcaccgtgggaatggtgcgtcatcagggcaagatcatgtacgtgggcgacgtgcggagcgtgacacagaagcatatccaggagtggggccctttcgacctggtgatcggcggcagcccttgcaatgacctgagcatcgtgaacccagcccggaagggcctgtacgagggaaccggcagactgttcttcgagttttacagactgctgcacgacgcccggcctaaggaaggcgacgaccggcccttcttttggctgttcgagaatgtggtggccatgggagtcagcgacaagcgggatattagccggttcctggagagcaaccccgtgatgatcgatgccaaggaagtgagcgccgcccaccgggccagatacttctggggcaatctgcctggcatgaacagacccctggccagcaccgtgaacgacaagctggagctgcaggagtgcctggagcacggccggatcgccaagttcagcaaggtgagaaccatcaccacccgaagcaacagcatcaaacaaggcaaggaccagcactttcctgtgttcatgaacgagaaggaggacatcctgtggtgtaccgagatggagagagtgttcgggttcccagtccactacacagatgtcagcaacatgtctagactggccagacagagactgctgggaagaagctggtccgtccctgtgatcagacacctgttcgcccctctgaaggagtacttcgcctgcgtgagcagcggcaacagcaacgccaacagccggggccccagcttctctagcggcctggtgccactgtccctgagagggagccacatgggccccatggagatctacaaaaccgtgagcgcctggaagcggcagcctgtgcgcgtgctgagcctgtttcggaatatcgataaagtcctgaaaagcctgggattcctggagagcggctctggctccggcggtggcaccctgaagtacgtggaggatgtgacaaacgtggtcagacgggatgtggagaagtggggccccttcgatctggtgtacggcagcacccaacccctgggcagctcttgtgaccggtgccctggctggtacatgtttcagttccaccggatcctgcagtacgccctgccgagacaggagtcccagcggccattcttttggattttcatggacaacttgctgctgaccgaggatgaccaggaaactaccactcggttcctgcagaccgaagccgtgaccctgcaggacgtgagaggccgggactaccagaacgccatgcgggtgtggtccaacatccctggactgaaaagcaagcacgcacctctgacccctaaagaagaggagtacctgcaggcccaggtgcggagcagaagcaagctggacgcccctaaggtggatctgctggtgaagaattgcctcctgcccctgagagagtacttcaagtatttcagccagaatagtctgcccctgggcggcccaagcagcggcgcccctcctcccagcggcggcagcccagccggctccccaacctctaccgaggagggcacctctgagtccgccacccccgagagcggccctggcacctccaccgagcccagcgagggcagcgcacccggcagccctgccggcagccccacctccacagaggagggaaccagcaccgagcccagcgaaggcagcgccccaggcaccagcaccgagcctagtgagggcggctctggcggcggcagcgcccaggagattaaacggatcaacaagatcagaagaagacttgtgaaagacagcaacaccaagaaggccggcaagacaggccccatgaaaaccctgctggttagagtgatgacacccgatctgagagagcggctggaaaacctgagaaagaagcctgaaaatatcccccagcccatcagcaatacatctagagccaacctgaataagctgctgaccgattacaccgaaatgaagaaggcgatcctgcatgtgtactgggaagagttccagaaggaccctgtgggcctgatgagccgggtggcccagcctgccagcaagaagatcgatcagaacaagctgaaacctgagatggacgagaagggcaacctgaccaccgccggctttgcctgctctcagtgtggccagcccctgttcgtgtacaagctggagcaggtgtctgagaagggcaaggcttacaccaactacttcggacggtgcaatgtggccgagcacgaaaagctgatcctgctggcccagctgaagcccgagaaggatagcgacgaagccgtgacatatagcctgggaaagtttgggcagagggccctggatttctacagcattcatgtgaccaaggagtccacccaccccgtgaagcccctggcccagatcgccggaaacagatacgcctccggacctgtgggaaaggccctgagcgacgcatgtatgggcacaatcgcctccttcctgtctaagtaccaggacatcatcatcgaacaccagaaggtggtgaagggcaaccagaagagactggagagcctgcgggagctggccggcaaggaaaacctggaataccctagcgtgaccctgccacctcagcctcacaccaaggagggcgttgatgcctacaacgaagtgatcgcccgggtgcgaatgtgggtgaacctgaacctgtggcagaagctgaagctaagcagagatgatgccaagcctctgctgagactgaagggattcccttcctttcctctggtcgagagacaggccaacgaagtggactggtgggacatggtgtgtaacgtgaagaagctgatcaacgagaaaaaggaggatggcaaggtgttttggcagaatctggctggctacaagagacaggaagccctgagaccatacctgagcagcgaggaagatcggaagaagggaaagaaattcgctcggtaccagctgggcgacctgctgctgcacctggaaaagaagcacggcgaggactggggaaaggtgtacgacgaggcctgggagcggattgacaagaaagtggaaggcctgagcaagcacatcaagctggaagaggaacggagaagcgaggacgcccagagcaaggccgccctgaccgactggctgcgggctaaggccagcttcgtgatcgagggcctgaaggaggccgacaaggacgagttctgcagatgcgagctgaagctgcagaagtggtacggggacctgcggggaaagcccttcgccatcgaagccgagaacagcatcctggacatcagcggcttcagcaagcagtacaactgtgccttcatctggcagaaggacggcgtgaagaagctgaacctgtacctgatcatcaactacttcaagggcggcaagctgcggttcaagaagatcaaacctgaagccttcgaagccaacagattctacaccgtgatcaacaaaaagagcggcgagatcgtgcccatggaggtgaacttcaacttcgacgaccccaacctgatcatcctgcctctggcctttggcaagagacagggcagagaattcatctggaacgacctgctgtccctggaaaccggcagcctgaagctggccaacggaagagtgatcgagaagacactgtacaacagaagaacccggcaggatgagcctgccctgttcgtggccctgaccttcgagcggcgggaggtcctggactcctccaatatcaaaccaatgaacctgatcggcgtggcaagaggcgaaaacatccccgccgtgatcgccctgaccgaccccgagggctgcccactgagccggtttaaggatagcctgggaaacccaacccacatcctgagaatcggcgagagctataaggagaagcagcggaccatccaggccaagaaggaggtggagcagcggagagccggcggctacagccggaagtacgccagcaaagccaagaatctggcagacgatatggtgagaaacaccgctagagatctgctgtactacgccgtgacccaggatgccatgctgatcttcgccaacctgagccggggcttcggccggcagggcaagcggaccttcatggccgagagacagtacacacggatggaggactggctgaccgccaagctggcctacgagggcctgagcaagacctacctgtccaagacactggcccagtacacctccaagacatgcagcaactgtgggtttaccatcaccagcgccgactacgacagggtgctggagaagctgaagaagacagcaacaggctggatgaccacaattaacggcaaggagctgaaggtggagggccagattacctactacaacagatacaagagacagaacgtagtcaaggacctgtccgtcgagctggatagactgagcgaagaatctgtgaacaacgacatctcctcctggacaaagggcagaagcggagaagctctgagcctcctgaagaaaagattctcccatagacccgtgcaggagaagttcgtgtgcctgaactgcggcttcgagacacacgcagccgagcaagccgccctgaacatcgccagatcctggctgttcctgcggagccaggagtacaagaaataccagacaaacaagacaaccggcaacaccgataagagagccttcgtcgagacctggcagtccttttaccggaagaagcttaaggaggtgtggaaacctgccgtgcggtctggcggatctggcggaggctccacaagcatccaggagcccgtgaccttcaaggacgtggccgtggacttcacccaggaggagtggggcaggctggaccccgtgcagaggaccctgtacagggacgtgatgctggagacctacaggcacctgctgagcgtgggcaaccagatcgccaagcccgaggtgatcagcctgctggagcagggcgaggagccctggagcgtggagcaggcctacccccagagcacctgccccgccgtggacaccgagaccagccccaagaaaaagagaaaagtctaagctgccttctgcggggcttgccttctggccatgcccttcttctctcccttgcacctgtacctcttggtctttgaataaagcctgagtaggaaggctagcaaaaaaaaaaaaaaaaaaaaaaaaaaaaaaaaaaaaaaaaaaaaaaaaaaaaaaaaaaaaaaaaaaaaaaaaaaaaaaaa

SEQ ID NO: 6734 - RNA, 5803 nt, synthetic construct
  source 1..5803: mol_type = other RNA
aggaaataagagagaaaagaagagtaagaagaaatataagagccaccatggcccctaagaagaagcgtaaagtgagccggatggaacgcctcgtctacgaggtgcggcagaagtgcagaaacatcgaggacatctgcatctcctgcggatctctgaacgtgaccctggagcacccactgttcatcggcggcatgtgccagaactgtaaaaactgttttctggagtgtgcctatcaatacgacgatgacggctaccagagctactgcaccatctgttgcggcggaagagaggtgctgatgtgtggaaataacaactgctgccggtgcttctgcgtggaatgcgtggacctgctggtgggccccggcgccgcccaggccgctattaaggaagatccttggaactgctacatgtgcggccacaagggcacatacggcctgctgagacggagagaggactggcctagcagactgcagatgttcttcgccaataaccacgaccaggagttcgacccccctaaggtgtaccctcccgtccccgccgagaagagaaagcccatccgggtcctgagcctgttcgatggcatcgccaccggtctgctggtgctgaaggacctgggcatccaggtggataggtacattgcctccgaggtgtgcgaggactccatcaccgtgggaatggtgcgtcatcagggcaagatcatgtacgtgggcgacgtgcggagcgtgacacagaagcatatccaggagtggggccctttcgacctggtgatcggcggcagcccttgcaatgacctgagcatcgtgaacccagcccggaagggcctgtacgagggaaccggcagactgttcttcgagttttacagactgctgcacgacgcccggcctaaggaaggcgacgaccggcccttcttttggctgttcgagaatgtggtggccatgggagtcagcgacaagcgggatattagccggttcctggagagcaaccccgtgatgatcgatgccaaggaagtgagcgccgcccaccgggccagatacttctggggcaatctgcctggcatgaacagacccctggccagcaccgtgaacgacaagctggagctgcaggagtgcctggagcacggccggatcgccaagttcagcaaggtgagaaccatcaccacccgaagcaacagcatcaaacaaggcaaggaccagcactttcctgtgttcatgaacgagaaggaggacatcctgtggtgtaccgagatggagagagtgttcgggttcccagtccactacacagatgtcagcaacatgtctagactggccagacagagactgctgggaagaagctggtccgtccctgtgatcagacacctgttcgcccctctgaaggagtacttcgcctgcgtgagcagcggcaacagcaacgccaacagccggggccccagcttctctagcggcctggtgccactgtccctgagagggagccacatgggccccatggagatctacaaaaccgtgagcgcctggaagcggcagcctgtgcgcgtgctgagcctgtttcggaatatcgataaagtcctgaaaagcctgggattcctggagagcggctctggctccggcggtggcaccctgaagtacgtggaggatgtgacaaacgtggtcagacgggatgtggagaagtggggccccttcgatctggtgtacggcagcacccaacccctgggcagctcttgtgaccggtgccctggctggtacatgtttcagttccaccggatcctgcagtacgccctgccgagacaggagtcccagcggccattcttttggattttcatggacaacttgctgctgaccgaggatgaccaggaaactaccactcggttcctgcagaccgaagccgtgaccctgcaggacgtgagaggccgggactaccagaacgccatgcgggtgtggtccaacatccctggactgaaaagcaagcacgcacctctgacccctaaagaagaggagtacctgcaggcccaggtgcggagcagaagcaagctggacgcccctaaggtggatctgctggtgaagaattgcctcctgcccctgagagagtacttcaagtatttcagccagaatagtctgcccctgggcggcccaagcagcggcgcccctcctcccagcggcggcagcccagccggctccccaacctctaccgaggagggcacctctgagtccgccacccccgagagcggccctggcacctccaccgagcccagcgagggcagcgcacccggcagccctgccggcagccccacctccacagaggagggaaccagcaccgagcccagcgaaggcagcgccccaggcaccagcaccgagcctagtgagggcggctctggcggcggcagcgcccaggagattaaacggatcaacaagatcagaagaagacttgtgaaagacagcaacaccaagaaggccggcaagacaggccccatgaaaaccctgctggttagagtgatgacacccgatctgagagagcggctggaaaacctgagaaagaagcctgaaaatatcccccagcccatcagcaatacatctagagccaacctgaataagctgctgaccgattacaccgaaatgaagaaggcgatcctgcatgtgtactgggaagagttccagaaggaccctgtgggcctgatgagccgggtggcccagcctgccagcaagaagatcgatcagaacaagctgaaacctgagatggacgagaagggcaacctgaccaccgccggctttgcctgctctcagtgtggccagcccctgttcgtgtacaagctggagcaggtgtctgagaagggcaaggcttacaccaactacttcggacggtgcaatgtggccgagcacgaaaagctgatcctgctggcccagctgaagcccgagaaggatagcgacgaagccgtgacatatagcctgggaaagtttgggcagagggccctggatttctacagcattcatgtgaccaaggagtccacccaccccgtgaagcccctggcccagatcgccggaaacagatacgcctccggacctgtgggaaaggccctgagcgacgcatgtatgggcacaatcgcctccttcctgtctaagtaccaggacatcatcatcgaacaccagaaggtggtgaagggcaaccagaagagactggagagcctgcgggagctggccggcaaggaaaacctggaataccctagcgtgaccctgccacctcagcctcacaccaaggagggcgttgatgcctacaacgaagtgatcgcccgggtgcgaatgtgggtgaacctgaacctgtggcagaagctgaagctaagcagagatgatgccaagcctctgctgagactgaagggattcccttcctttcctctggtcgagagacaggccaacgaagtggactggtgggacatggtgtgtaacgtgaagaagctgatcaacgagaaaaaggaggatggcaaggtgttttggcagaatctggctggctacaagagacaggaagccctgagaccatacctgagcagcgaggaagatcggaagaagggaaagaaattcgctcggtaccagctgggcgacctgctgctgcacctggaaaagaagcacggcgaggactggggaaaggtgtacgacgaggcctgggagcggattgacaagaaagtggaaggcctgagcaagcacatcaagctggaagaggaacggagaagcgaggacgcccagagcaaggccgccctgaccgactggctgcgggctaaggccagcttcgtgatcgagggcctgaaggaggccgacaaggacgagttctgcagatgcgagctgaagctgcagaagtggtacggggacctgcggggaaagcccttcgccatcgaagccgagaacagcatcctggacatcagcggcttcagcaagcagtacaactgtgccttcatctggcagaaggacggcgtgaagaagctgaacctgtacctgatcatcaactacttcaagggcggcaagctgcggttcaagaagatcaaacctgaagccttcgaagccaacagattctacaccgtgatcaacaaaaagagcggcgagatcgtgcccatggaggtgaacttcaacttcgacgaccccaacctgatcatcctgcctctggcctttggcaagagacagggcagagaattcatctggaacgacctgctgtccctggaaaccggcagcctgaagctggccaacggaagagtgatcgagaagacactgtacaacagaagaacccggcaggatgagcctgccctgttcgtggccctgaccttcgagcggcgggaggtcctggactcctccaatatcaaaccaatgaacctgatcggcgtggcaagaggcgaaaacatccccgccgtgatcgccctgaccgaccccgagggctgcccactgagccggtttaaggatagcctgggaaacccaacccacatcctgagaatcggcgagagctataaggagaagcagcggaccatccaggccaagaaggaggtggagcagcggagagccggcggctacagccggaagtacgccagcaaagccaagaatctggcagacgatatggtgagaaacaccgctagagatctgctgtactacgccgtgacccaggatgccatgctgatcttcgccaacctgagccggggcttcggccggcagggcaagcggaccttcatggccgagagacagtacacacggatggaggactggctgaccgccaagctggcctacgagggcctgagcaagacctacctgtccaagacactggcccagtacacctccaagacatgcagcaactgtgggtttaccatcaccagcgccgactacgacagggtgctggagaagctgaagaagacagcaacaggctggatgaccacaattaacggcaaggagctgaaggtggagggccagattacctactacaacagatacaagagacagaacgtagtcaaggacctgtccgtcgagctggatagactgagcgaagaatctgtgaacaacgacatctcctcctggacaaagggcagaagcggagaagctctgagcctcctgaagaaaagattctcccatagacccgtgcaggagaagttcgtgtgcctgaactgcggcttcgagacacacgcagccgagcaagccgccctgaacatcgccagatcctggctgttcctgcggagccaggagtacaagaaataccagacaaacaagacaaccggcaacaccgataagagagccttcgtcgagacctggcagtccttttaccggaagaagcttaaggaggtgtggaaacctgccgtgcggtctggcggatctggcggaggctccacaagcgtgacctacgacgacgtgtgcatcgacttcacctgggaggagtggaccctgctggaccccagccagaagaagctgtacaaggacgtgatgctggagacctacaggaacctgaccgccatcggctacaactgggagaaccaccacgtggaggagtactaccagagcagcaggaggaacgccaggaacgagaagagccagaccgccgagaagcccagcgtgaacacccagtgcgtgaaggccttcacccacaccagccccaagaaaaagagaaaagtctaagctgccttctgcggggcttgccttctggccatgcccttcttctctcccttgcacctgtacctcttggtctttgaataaagcctgagtaggaaggctagcaaaaaaaaaaaaaaaaaaaaaaaaaaaaaaaaaaaaaaaaaaaaaaaaaaaaaaaaaaaaaaaaaaaaaaaaaaaaaaaa

SEQ ID NO: 6735 - RNA, 5797 nt, synthetic construct
  source 1..5797: mol_type = other RNA
aggaaataagagagaaaagaagagtaagaagaaatataagagccaccatggcccctaagaagaagcgtaaagtgagccggatggaacgcctcgtctacgaggtgcggcagaagtgcagaaacatcgaggacatctgcatctcctgcggatctctgaacgtgaccctggagcacccactgttcatcggcggcatgtgccagaactgtaaaaactgttttctggagtgtgcctatcaatacgacgatgacggctaccagagctactgcaccatctgttgcggcggaagagaggtgctgatgtgtggaaataacaactgctgccggtgcttctgcgtggaatgcgtggacctgctggtgggccccggcgccgcccaggccgctattaaggaagatccttggaactgctacatgtgcggccacaagggcacatacggcctgctgagacggagagaggactggcctagcagactgcagatgttcttcgccaataaccacgaccaggagttcgacccccctaaggtgtaccctcccgtccccgccgagaagagaaagcccatccgggtcctgagcctgttcgatggcatcgccaccggtctgctggtgctgaaggacctgggcatccaggtggataggtacattgcctccgaggtgtgcgaggactccatcaccgtgggaatggtgcgtcatcagggcaagatcatgtacgtgggcgacgtgcggagcgtgacacagaagcatatccaggagtggggccctttcgacctggtgatcggcggcagcccttgcaatgacctgagcatcgtgaacccagcccggaagggcctgtacgagggaaccggcagactgttcttcgagttttacagactgctgcacgacgcccggcctaaggaaggcgacgaccggcccttcttttggctgttcgagaatgtggtggccatgggagtcagcgacaagcgggatattagccggttcctggagagcaaccccgtgatgatcgatgccaaggaagtgagcgccgcccaccgggccagatacttctggggcaatctgcctggcatgaacagacccctggccagcaccgtgaacgacaagctggagctgcaggagtgcctggagcacggccggatcgccaagttcagcaaggtgagaaccatcaccacccgaagcaacagcatcaaacaaggcaaggaccagcactttcctgtgttcatgaacgagaaggaggacatcctgtggtgtaccgagatggagagagtgttcgggttcccagtccactacacagatgtcagcaacatgtctagactggccagacagagactgctgggaagaagctggtccgtccctgtgatcagacacctgttcgcccctctgaaggagtacttcgcctgcgtgagcagcggcaacagcaacgccaacagccggggccccagcttctctagcggcctggtgccactgtccctgagagggagccacatgggccccatggagatctacaaaaccgtgagcgcctggaagcggcagcctgtgcgcgtgctgagcctgtttcggaatatcgataaagtcctgaaaagcctgggattcctggagagcggctctggctccggcggtggcaccctgaagtacgtggaggatgtgacaaacgtggtcagacgggatgtggagaagtggggccccttcgatctggtgtacggcagcacccaacccctgggcagctcttgtgaccggtgccctggctggtacatgtttcagttccaccggatcctgcagtacgccctgccgagacaggagtcccagcggccattcttttggattttcatggacaacttgctgctgaccgaggatgaccaggaaactaccactcggttcctgcagaccgaagccgtgaccctgcaggacgtgagaggccgggactaccagaacgccatgcgggtgtggtccaacatccctggactgaaaagcaagcacgcacctctgacccctaaagaagaggagtacctgcaggcccaggtgcggagcagaagcaagctggacgcccctaaggtggatctgctggtgaagaattgcctcctgcccctgagagagtacttcaagtatttcagccagaatagtctgcccctgggcggcccaagcagcggcgcccctcctcccagcggcggcagcccagccggctccccaacctctaccgaggagggcacctctgagtccgccacccccgagagcggccctggcacctccaccgagcccagcgagggcagcgcacccggcagccctgccggcagccccacctccacagaggagggaaccagcaccgagcccagcgaaggcagcgccccaggcaccagcaccgagcctagtgagggcggctctggcggcggcagcgcccaggagattaaacggatcaacaagatcagaagaagacttgtgaaagacagcaacaccaagaaggccggcaagacaggccccatgaaaaccctgctggttagagtgatgacacccgatctgagagagcggctggaaaacctgagaaagaagcctgaaaatatcccccagcccatcagcaatacatctagagccaacctgaataagctgctgaccgattacaccgaaatgaagaaggcgatcctgcatgtgtactgggaagagttccagaaggaccctgtgggcctgatgagccgggtggcccagcctgccagcaagaagatcgatcagaacaagctgaaacctgagatggacgagaagggcaacctgaccaccgccggctttgcctgctctcagtgtggccagcccctgttcgtgtacaagctggagcaggtgtctgagaagggcaaggcttacaccaactacttcggacggtgcaatgtggccgagcacgaaaagctgatcctgctggcccagctgaagcccgagaaggatagcgacgaagccgtgacatatagcctgggaaagtttgggcagagggccctggatttctacagcattcatgtgaccaaggagtccacccaccccgtgaagcccctggcccagatcgccggaaacagatacgcctccggacctgtgggaaaggccctgagcgacgcatgtatgggcacaatcgcctccttcctgtctaagtaccaggacatcatcatcgaacaccagaaggtggtgaagggcaaccagaagagactggagagcctgcgggagctggccggcaaggaaaacctggaataccctagcgtgaccctgccacctcagcctcacaccaaggagggcgttgatgcctacaacgaagtgatcgcccgggtgcgaatgtgggtgaacctgaacctgtggcagaagctgaagctaagcagagatgatgccaagcctctgctgagactgaagggattcccttcctttcctctggtcgagagacaggccaacgaagtggactggtgggacatggtgtgtaacgtgaagaagctgatcaacgagaaaaaggaggatggcaaggtgttttggcagaatctggctggctacaagagacaggaagccctgagaccatacctgagcagcgaggaagatcggaagaagggaaagaaattcgctcggtaccagctgggcgacctgctgctgcacctggaaaagaagcacggcgaggactggggaaaggtgtacgacgaggcctgggagcggattgacaagaaagtggaaggcctgagcaagcacatcaagctggaagaggaacggagaagcgaggacgcccagagcaaggccgccctgaccgactggctgcgggctaaggccagcttcgtgatcgagggcctgaaggaggccgacaaggacgagttctgcagatgcgagctgaagctgcagaagtggtacggggacctgcggggaaagcccttcgccatcgaagccgagaacagcatcctggacatcagcggcttcagcaagcagtacaactgtgccttcatctggcagaaggacggcgtgaagaagctgaacctgtacctgatcatcaactacttcaagggcggcaagctgcggttcaagaagatcaaacctgaagccttcgaagccaacagattctacaccgtgatcaacaaaaagagcggcgagatcgtgcccatggaggtgaacttcaacttcgacgaccccaacctgatcatcctgcctctggcctttggcaagagacagggcagagaattcatctggaacgacctgctgtccctggaaaccggcagcctgaagctggccaacggaagagtgatcgagaagacactgtacaacagaagaacccggcaggatgagcctgccctgttcgtggccctgaccttcgagcggcgggaggtcctggactcctccaatatcaaaccaatgaacctgatcggcgtggcaagaggcgaaaacatccccgccgtgatcgccctgaccgaccccgagggctgcccactgagccggtttaaggatagcctgggaaacccaacccacatcctgagaatcggcgagagctataaggagaagcagcggaccatccaggccaagaaggaggtggagcagcggagagccggcggctacagccggaagtacgccagcaaagccaagaatctggcagacgatatggtgagaaacaccgctagagatctgctgtactacgccgtgacccaggatgccatgctgatcttcgccaacctgagccggggcttcggccggcagggcaagcggaccttcatggccgagagacagtacacacggatggaggactggctgaccgccaagctggcctacgagggcctgagcaagacctacctgtccaagacactggcccagtacacctccaagacatgcagcaactgtgggtttaccatcaccagcgccgactacgacagggtgctggagaagctgaagaagacagcaacaggctggatgaccacaattaacggcaaggagctgaaggtggagggccagattacctactacaacagatacaagagacagaacgtagtcaaggacctgtccgtcgagctggatagactgagcgaagaatctgtgaacaacgacatctcctcctggacaaagggcagaagcggagaagctctgagcctcctgaagaaaagattctcccatagacccgtgcaggagaagttcgtgtgcctgaactgcggcttcgagacacacgcagccgagcaagccgccctgaacatcgccagatcctggctgttcctgcggagccaggagtacaagaaataccagacaaacaagacaaccggcaacaccgataagagagccttcgtcgagacctggcagtccttttaccggaagaagcttaaggaggtgtggaaacctgccgtgcggtctggcggatctggcggaggctccacaagcatggagggcctggtgatgttcagggacgtggccgtggacttcagccaggaggagtgggcctgcctggaccccgcccagaggggcctgtacagggacgtgatgctggagaactaccaccacctggtgagcctgggcctgagcctgagcaagcccgacgtgatcagcctgctggagcagggcaaggagccctggatggtgagcaggaacatggccggcggctggtgccccgacaggctgaagaacaccagccccaagaaaaagagaaaagtctaagctgccttctgcggggcttgccttctggccatgcccttcttctctcccttgcacctgtacctcttggtctttgaataaagcctgagtaggaaggctagcaaaaaaaaaaaaaaaaaaaaaaaaaaaaaaaaaaaaaaaaaaaaaaaaaaaaaaaaaaaaaaaaaaaaaaaaaaaaaaaa

SEQ ID NO: 6736 - RNA, 5797 nt, synthetic construct
  source 1..5797: mol_type = other RNA
aggaaataagagagaaaagaagagtaagaagaaatataagagccaccatggcccctaagaagaagcgtaaagtgagccggatggaacgcctcgtctacgaggtgcggcagaagtgcagaaacatcgaggacatctgcatctcctgcggatctctgaacgtgaccctggagcacccactgttcatcggcggcatgtgccagaactgtaaaaactgttttctggagtgtgcctatcaatacgacgatgacggctaccagagctactgcaccatctgttgcggcggaagagaggtgctgatgtgtggaaataacaactgctgccggtgcttctgcgtggaatgcgtggacctgctggtgggccccggcgccgcccaggccgctattaaggaagatccttggaactgctacatgtgcggccacaagggcacatacggcctgctgagacggagagaggactggcctagcagactgcagatgttcttcgccaataaccacgaccaggagttcgacccccctaaggtgtaccctcccgtccccgccgagaagagaaagcccatccgggtcctgagcctgttcgatggcatcgccaccggtctgctggtgctgaaggacctgggcatccaggtggataggtacattgcctccgaggtgtgcgaggactccatcaccgtgggaatggtgcgtcatcagggcaagatcatgtacgtgggcgacgtgcggagcgtgacacagaagcatatccaggagtggggccctttcgacctggtgatcggcggcagcccttgcaatgacctgagcatcgtgaacccagcccggaagggcctgtacgagggaaccggcagactgttcttcgagttttacagactgctgcacgacgcccggcctaaggaaggcgacgaccggcccttcttttggctgttcgagaatgtggtggccatgggagtcagcgacaagcgggatattagccggttcctggagagcaaccccgtgatgatcgatgccaaggaagtgagcgccgcccaccgggccagatacttctggggcaatctgcctggcatgaacagacccctggccagcaccgtgaacgacaagctggagctgcaggagtgcctggagcacggccggatcgccaagttcagcaaggtgagaaccatcaccacccgaagcaacagcatcaaacaaggcaaggaccagcactttcctgtgttcatgaacgagaaggaggacatcctgtggtgtaccgagatggagagagtgttcgggttcccagtccactacacagatgtcagcaacatgtctagactggccagacagagactgctgggaagaagctggtccgtccctgtgatcagacacctgttcgcccctctgaaggagtacttcgcctgcgtgagcagcggcaacagcaacgccaacagccggggccccagcttctctagcggcctggtgccactgtccctgagagggagccacatgggccccatggagatctacaaaaccgtgagcgcctggaagcggcagcctgtgcgcgtgctgagcctgtttcggaatatcgataaagtcctgaaaagcctgggattcctggagagcggctctggctccggcggtggcaccctgaagtacgtggaggatgtgacaaacgtggtcagacgggatgtggagaagtggggccccttcgatctggtgtacggcagcacccaacccctgggcagctcttgtgaccggtgccctggctggtacatgtttcagttccaccggatcctgcagtacgccctgccgagacaggagtcccagcggccattcttttggattttcatggacaacttgctgctgaccgaggatgaccaggaaactaccactcggttcctgcagaccgaagccgtgaccctgcaggacgtgagaggccgggactaccagaacgccatgcgggtgtggtccaacatccctggactgaaaagcaagcacgcacctctgacccctaaagaagaggagtacctgcaggcccaggtgcggagcagaagcaagctggacgcccctaaggtggatctgctggtgaagaattgcctcctgcccctgagagagtacttcaagtatttcagccagaatagtctgcccctgggcggcccaagcagcggcgcccctcctcccagcggcggcagcccagccggctccccaacctctaccgaggagggcacctctgagtccgccacccccgagagcggccctggcacctccaccgagcccagcgagggcagcgcacccggcagccctgccggcagccccacctccacagaggagggaaccagcaccgagcccagcgaaggcagcgccccaggcaccagcaccgagcctagtgagggcggctctggcggcggcagcgcccaggagattaaacggatcaacaagatcagaagaagacttgtgaaagacagcaacaccaagaaggccggcaagacaggccccatgaaaaccctgctggttagagtgatgacacccgatctgagagagcggctggaaaacctgagaaagaagcctgaaaatatcccccagcccatcagcaatacatctagagccaacctgaataagctgctgaccgattacaccgaaatgaagaaggcgatcctgcatgtgtactgggaagagttccagaaggaccctgtgggcctgatgagccgggtggcccagcctgccagcaagaagatcgatcagaacaagctgaaacctgagatggacgagaagggcaacctgaccaccgccggctttgcctgctctcagtgtggccagcccctgttcgtgtacaagctggagcaggtgtctgagaagggcaaggcttacaccaactacttcggacggtgcaatgtggccgagcacgaaaagctgatcctgctggcccagctgaagcccgagaaggatagcgacgaagccgtgacatatagcctgggaaagtttgggcagagggccctggatttctacagcattcatgtgaccaaggagtccacccaccccgtgaagcccctggcccagatcgccggaaacagatacgcctccggacctgtgggaaaggccctgagcgacgcatgtatgggcacaatcgcctccttcctgtctaagtaccaggacatcatcatcgaacaccagaaggtggtgaagggcaaccagaagagactggagagcctgcgggagctggccggcaaggaaaacctggaataccctagcgtgaccctgccacctcagcctcacaccaaggagggcgttgatgcctacaacgaagtgatcgcccgggtgcgaatgtgggtgaacctgaacctgtggcagaagctgaagctaagcagagatgatgccaagcctctgctgagactgaagggattcccttcctttcctctggtcgagagacaggccaacgaagtggactggtgggacatggtgtgtaacgtgaagaagctgatcaacgagaaaaaggaggatggcaaggtgttttggcagaatctggctggctacaagagacaggaagccctgagaccatacctgagcagcgaggaagatcggaagaagggaaagaaattcgctcggtaccagctgggcgacctgctgctgcacctggaaaagaagcacggcgaggactggggaaaggtgtacgacgaggcctgggagcggattgacaagaaagtggaaggcctgagcaagcacatcaagctggaagaggaacggagaagcgaggacgcccagagcaaggccgccctgaccgactggctgcgggctaaggccagcttcgtgatcgagggcctgaaggaggccgacaaggacgagttctgcagatgcgagctgaagctgcagaagtggtacggggacctgcggggaaagcccttcgccatcgaagccgagaacagcatcctggacatcagcggcttcagcaagcagtacaactgtgccttcatctggcagaaggacggcgtgaagaagctgaacctgtacctgatcatcaactacttcaagggcggcaagctgcggttcaagaagatcaaacctgaagccttcgaagccaacagattctacaccgtgatcaacaaaaagagcggcgagatcgtgcccatggaggtgaacttcaacttcgacgaccccaacctgatcatcctgcctctggcctttggcaagagacagggcagagaattcatctggaacgacctgctgtccctggaaaccggcagcctgaagctggccaacggaagagtgatcgagaagacactgtacaacagaagaacccggcaggatgagcctgccctgttcgtggccctgaccttcgagcggcgggaggtcctggactcctccaatatcaaaccaatgaacctgatcggcgtggcaagaggcgaaaacatccccgccgtgatcgccctgaccgaccccgagggctgcccactgagccggtttaaggatagcctgggaaacccaacccacatcctgagaatcggcgagagctataaggagaagcagcggaccatccaggccaagaaggaggtggagcagcggagagccggcggctacagccggaagtacgccagcaaagccaagaatctggcagacgatatggtgagaaacaccgctagagatctgctgtactacgccgtgacccaggatgccatgctgatcttcgccaacctgagccggggcttcggccggcagggcaagcggaccttcatggccgagagacagtacacacggatggaggactggctgaccgccaagctggcctacgagggcctgagcaagacctacctgtccaagacactggcccagtacacctccaagacatgcagcaactgtgggtttaccatcaccagcgccgactacgacagggtgctggagaagctgaagaagacagcaacaggctggatgaccacaattaacggcaaggagctgaaggtggagggccagattacctactacaacagatacaagagacagaacgtagtcaaggacctgtccgtcgagctggatagactgagcgaagaatctgtgaacaacgacatctcctcctggacaaagggcagaagcggagaagctctgagcctcctgaagaaaagattctcccatagacccgtgcaggagaagttcgtgtgcctgaactgcggcttcgagacacacgcagccgagcaagccgccctgaacatcgccagatcctggctgttcctgcggagccaggagtacaagaaataccagacaaacaagacaaccggcaacaccgataagagagccttcgtcgagacctggcagtccttttaccggaagaagcttaaggaggtgtggaaacctgccgtgcggtctggcggatctggcggaggctccacaagcgccagggagcccgtgagcttcgtggaggtggccgtgtacttcagcagggaggagtgggccctgctggaccccgcccagagggccctgtacagggacgtgatgctggagacctacgagagcgtggccagcctgggccccttccccgcccccaagcccgtggtgatcagcctgctggagggcggcgacgacccctggatccccgacgtgcacagccccgaggccgtgagcggcgacttcagccccaccagccccaagaaaaagagaaaagtctaagctgccttctgcggggcttgccttctggccatgcccttcttctctcccttgcacctgtacctcttggtctttgaataaagcctgagtaggaaggctagcaaaaaaaaaaaaaaaaaaaaaaaaaaaaaaaaaaaaaaaaaaaaaaaaaaaaaaaaaaaaaaaaaaaaaaaaaaaaaaaa

SEQ ID NO: 6737 - RNA, 5797 nt, synthetic construct
  source 1..5797: mol_type = other RNA
aggaaataagagagaaaagaagagtaagaagaaatataagagccaccatggcccctaagaagaagcgtaaagtgagccggatggaacgcctcgtctacgaggtgcggcagaagtgcagaaacatcgaggacatctgcatctcctgcggatctctgaacgtgaccctggagcacccactgttcatcggcggcatgtgccagaactgtaaaaactgttttctggagtgtgcctatcaatacgacgatgacggctaccagagctactgcaccatctgttgcggcggaagagaggtgctgatgtgtggaaataacaactgctgccggtgcttctgcgtggaatgcgtggacctgctggtgggccccggcgccgcccaggccgctattaaggaagatccttggaactgctacatgtgcggccacaagggcacatacggcctgctgagacggagagaggactggcctagcagactgcagatgttcttcgccaataaccacgaccaggagttcgacccccctaaggtgtaccctcccgtccccgccgagaagagaaagcccatccgggtcctgagcctgttcgatggcatcgccaccggtctgctggtgctgaaggacctgggcatccaggtggataggtacattgcctccgaggtgtgcgaggactccatcaccgtgggaatggtgcgtcatcagggcaagatcatgtacgtgggcgacgtgcggagcgtgacacagaagcatatccaggagtggggccctttcgacctggtgatcggcggcagcccttgcaatgacctgagcatcgtgaacccagcccggaagggcctgtacgagggaaccggcagactgttcttcgagttttacagactgctgcacgacgcccggcctaaggaaggcgacgaccggcccttcttttggctgttcgagaatgtggtggccatgggagtcagcgacaagcgggatattagccggttcctggagagcaaccccgtgatgatcgatgccaaggaagtgagcgccgcccaccgggccagatacttctggggcaatctgcctggcatgaacagacccctggccagcaccgtgaacgacaagctggagctgcaggagtgcctggagcacggccggatcgccaagttcagcaaggtgagaaccatcaccacccgaagcaacagcatcaaacaaggcaaggaccagcactttcctgtgttcatgaacgagaaggaggacatcctgtggtgtaccgagatggagagagtgttcgggttcccagtccactacacagatgtcagcaacatgtctagactggccagacagagactgctgggaagaagctggtccgtccctgtgatcagacacctgttcgcccctctgaaggagtacttcgcctgcgtgagcagcggcaacagcaacgccaacagccggggccccagcttctctagcggcctggtgccactgtccctgagagggagccacatgggccccatggagatctacaaaaccgtgagcgcctggaagcggcagcctgtgcgcgtgctgagcctgtttcggaatatcgataaagtcctgaaaagcctgggattcctggagagcggctctggctccggcggtggcaccctgaagtacgtggaggatgtgacaaacgtggtcagacgggatgtggagaagtggggccccttcgatctggtgtacggcagcacccaacccctgggcagctcttgtgaccggtgccctggctggtacatgtttcagttccaccggatcctgcagtacgccctgccgagacaggagtcccagcggccattcttttggattttcatggacaacttgctgctgaccgaggatgaccaggaaactaccactcggttcctgcagaccgaagccgtgaccctgcaggacgtgagaggccgggactaccagaacgccatgcgggtgtggtccaacatccctggactgaaaagcaagcacgcacctctgacccctaaagaagaggagtacctgcaggcccaggtgcggagcagaagcaagctggacgcccctaaggtggatctgctggtgaagaattgcctcctgcccctgagagagtacttcaagtatttcagccagaatagtctgcccctgggcggcccaagcagcggcgcccctcctcccagcggcggcagcccagccggctccccaacctctaccgaggagggcacctctgagtccgccacccccgagagcggccctggcacctccaccgagcccagcgagggcagcgcacccggcagccctgccggcagccccacctccacagaggagggaaccagcaccgagcccagcgaaggcagcgccccaggcaccagcaccgagcctagtgagggcggctctggcggcggcagcgcccaggagattaaacggatcaacaagatcagaagaagacttgtgaaagacagcaacaccaagaaggccggcaagacaggccccatgaaaaccctgctggttagagtgatgacacccgatctgagagagcggctggaaaacctgagaaagaagcctgaaaatatcccccagcccatcagcaatacatctagagccaacctgaataagctgctgaccgattacaccgaaatgaagaaggcgatcctgcatgtgtactgggaagagttccagaaggaccctgtgggcctgatgagccgggtggcccagcctgccagcaagaagatcgatcagaacaagctgaaacctgagatggacgagaagggcaacctgaccaccgccggctttgcctgctctcagtgtggccagcccctgttcgtgtacaagctggagcaggtgtctgagaagggcaaggcttacaccaactacttcggacggtgcaatgtggccgagcacgaaaagctgatcctgctggcccagctgaagcccgagaaggatagcgacgaagccgtgacatatagcctgggaaagtttgggcagagggccctggatttctacagcattcatgtgaccaaggagtccacccaccccgtgaagcccctggcccagatcgccggaaacagatacgcctccggacctgtgggaaaggccctgagcgacgcatgtatgggcacaatcgcctccttcctgtctaagtaccaggacatcatcatcgaacaccagaaggtggtgaagggcaaccagaagagactggagagcctgcgggagctggccggcaaggaaaacctggaataccctagcgtgaccctgccacctcagcctcacaccaaggagggcgttgatgcctacaacgaagtgatcgcccgggtgcgaatgtgggtgaacctgaacctgtggcagaagctgaagctaagcagagatgatgccaagcctctgctgagactgaagggattcccttcctttcctctggtcgagagacaggccaacgaagtggactggtgggacatggtgtgtaacgtgaagaagctgatcaacgagaaaaaggaggatggcaaggtgttttggcagaatctggctggctacaagagacaggaagccctgagaccatacctgagcagcgaggaagatcggaagaagggaaagaaattcgctcggtaccagctgggcgacctgctgctgcacctggaaaagaagcacggcgaggactggggaaaggtgtacgacgaggcctgggagcggattgacaagaaagtggaaggcctgagcaagcacatcaagctggaagaggaacggagaagcgaggacgcccagagcaaggccgccctgaccgactggctgcgggctaaggccagcttcgtgatcgagggcctgaaggaggccgacaaggacgagttctgcagatgcgagctgaagctgcagaagtggtacggggacctgcggggaaagcccttcgccatcgaagccgagaacagcatcctggacatcagcggcttcagcaagcagtacaactgtgccttcatctggcagaaggacggcgtgaagaagctgaacctgtacctgatcatcaactacttcaagggcggcaagctgcggttcaagaagatcaaacctgaagccttcgaagccaacagattctacaccgtgatcaacaaaaagagcggcgagatcgtgcccatggaggtgaacttcaacttcgacgaccccaacctgatcatcctgcctctggcctttggcaagagacagggcagagaattcatctggaacgacctgctgtccctggaaaccggcagcctgaagctggccaacggaagagtgatcgagaagacactgtacaacagaagaacccggcaggatgagcctgccctgttcgtggccctgaccttcgagcggcgggaggtcctggactcctccaatatcaaaccaatgaacctgatcggcgtggcaagaggcgaaaacatccccgccgtgatcgccctgaccgaccccgagggctgcccactgagccggtttaaggatagcctgggaaacccaacccacatcctgagaatcggcgagagctataaggagaagcagcggaccatccaggccaagaaggaggtggagcagcggagagccggcggctacagccggaagtacgccagcaaagccaagaatctggcagacgatatggtgagaaacaccgctagagatctgctgtactacgccgtgacccaggatgccatgctgatcttcgccaacctgagccggggcttcggccggcagggcaagcggaccttcatggccgagagacagtacacacggatggaggactggctgaccgccaagctggcctacgagggcctgagcaagacctacctgtccaagacactggcccagtacacctccaagacatgcagcaactgtgggtttaccatcaccagcgccgactacgacagggtgctggagaagctgaagaagacagcaacaggctggatgaccacaattaacggcaaggagctgaaggtggagggccagattacctactacaacagatacaagagacagaacgtagtcaaggacctgtccgtcgagctggatagactgagcgaagaatctgtgaacaacgacatctcctcctggacaaagggcagaagcggagaagctctgagcctcctgaagaaaagattctcccatagacccgtgcaggagaagttcgtgtgcctgaactgcggcttcgagacacacgcagccgagcaagccgccctgaacatcgccagatcctggctgttcctgcggagccaggagtacaagaaataccagacaaacaagacaaccggcaacaccgataagagagccttcgtcgagacctggcagtccttttaccggaagaagcttaaggaggtgtggaaacctgccgtgcggtctggcggatctggcggaggctccacaagcgccagggccagcctgagcttcgaggacgtggccgtgggcttcagctgggaggagtggcagctgctggcccccagccagaaggacctgtacagggaggtgatgctggagaactacaggaacctggtgagcgtgggctaccaggccagcaagcccgacagcctgttccagctggagcagggcgagcccccctggaccgtggtgggcgccgcccagagccagacctgccaggaggagatctgggagaccagccccaagaaaaagagaaaagtctaagctgccttctgcggggcttgccttctggccatgcccttcttctctcccttgcacctgtacctcttggtctttgaataaagcctgagtaggaaggctagcaaaaaaaaaaaaaaaaaaaaaaaaaaaaaaaaaaaaaaaaaaaaaaaaaaaaaaaaaaaaaaaaaaaaaaaaaaaaaaaa

SEQ ID NO: 6738 - RNA, 5797 nt, synthetic construct
  source 1..5797: mol_type = other RNA
aggaaataagagagaaaagaagagtaagaagaaatataagagccaccatggcccctaagaagaagcgtaaagtgagccggatggaacgcctcgtctacgaggtgcggcagaagtgcagaaacatcgaggacatctgcatctcctgcggatctctgaacgtgaccctggagcacccactgttcatcggcggcatgtgccagaactgtaaaaactgttttctggagtgtgcctatcaatacgacgatgacggctaccagagctactgcaccatctgttgcggcggaagagaggtgctgatgtgtggaaataacaactgctgccggtgcttctgcgtggaatgcgtggacctgctggtgggccccggcgccgcccaggccgctattaaggaagatccttggaactgctacatgtgcggccacaagggcacatacggcctgctgagacggagagaggactggcctagcagactgcagatgttcttcgccaataaccacgaccaggagttcgacccccctaaggtgtaccctcccgtccccgccgagaagagaaagcccatccgggtcctgagcctgttcgatggcatcgccaccggtctgctggtgctgaaggacctgggcatccaggtggataggtacattgcctccgaggtgtgcgaggactccatcaccgtgggaatggtgcgtcatcagggcaagatcatgtacgtgggcgacgtgcggagcgtgacacagaagcatatccaggagtggggccctttcgacctggtgatcggcggcagcccttgcaatgacctgagcatcgtgaacccagcccggaagggcctgtacgagggaaccggcagactgttcttcgagttttacagactgctgcacgacgcccggcctaaggaaggcgacgaccggcccttcttttggctgttcgagaatgtggtggccatgggagtcagcgacaagcgggatattagccggttcctggagagcaaccccgtgatgatcgatgccaaggaagtgagcgccgcccaccgggccagatacttctggggcaatctgcctggcatgaacagacccctggccagcaccgtgaacgacaagctggagctgcaggagtgcctggagcacggccggatcgccaagttcagcaaggtgagaaccatcaccacccgaagcaacagcatcaaacaaggcaaggaccagcactttcctgtgttcatgaacgagaaggaggacatcctgtggtgtaccgagatggagagagtgttcgggttcccagtccactacacagatgtcagcaacatgtctagactggccagacagagactgctgggaagaagctggtccgtccctgtgatcagacacctgttcgcccctctgaaggagtacttcgcctgcgtgagcagcggcaacagcaacgccaacagccggggccccagcttctctagcggcctggtgccactgtccctgagagggagccacatgggccccatggagatctacaaaaccgtgagcgcctggaagcggcagcctgtgcgcgtgctgagcctgtttcggaatatcgataaagtcctgaaaagcctgggattcctggagagcggctctggctccggcggtggcaccctgaagtacgtggaggatgtgacaaacgtggtcagacgggatgtggagaagtggggccccttcgatctggtgtacggcagcacccaacccctgggcagctcttgtgaccggtgccctggctggtacatgtttcagttccaccggatcctgcagtacgccctgccgagacaggagtcccagcggccattcttttggattttcatggacaacttgctgctgaccgaggatgaccaggaaactaccactcggttcctgcagaccgaagccgtgaccctgcaggacgtgagaggccgggactaccagaacgccatgcgggtgtggtccaacatccctggactgaaaagcaagcacgcacctctgacccctaaagaagaggagtacctgcaggcccaggtgcggagcagaagcaagctggacgcccctaaggtggatctgctggtgaagaattgcctcctgcccctgagagagtacttcaagtatttcagccagaatagtctgcccctgggcggcccaagcagcggcgcccctcctcccagcggcggcagcccagccggctccccaacctctaccgaggagggcacctctgagtccgccacccccgagagcggccctggcacctccaccgagcccagcgagggcagcgcacccggcagccctgccggcagccccacctccacagaggagggaaccagcaccgagcccagcgaaggcagcgccccaggcaccagcaccgagcctagtgagggcggctctggcggcggcagcgcccaggagattaaacggatcaacaagatcagaagaagacttgtgaaagacagcaacaccaagaaggccggcaagacaggccccatgaaaaccctgctggttagagtgatgacacccgatctgagagagcggctggaaaacctgagaaagaagcctgaaaatatcccccagcccatcagcaatacatctagagccaacctgaataagctgctgaccgattacaccgaaatgaagaaggcgatcctgcatgtgtactgggaagagttccagaaggaccctgtgggcctgatgagccgggtggcccagcctgccagcaagaagatcgatcagaacaagctgaaacctgagatggacgagaagggcaacctgaccaccgccggctttgcctgctctcagtgtggccagcccctgttcgtgtacaagctggagcaggtgtctgagaagggcaaggcttacaccaactacttcggacggtgcaatgtggccgagcacgaaaagctgatcctgctggcccagctgaagcccgagaaggatagcgacgaagccgtgacatatagcctgggaaagtttgggcagagggccctggatttctacagcattcatgtgaccaaggagtccacccaccccgtgaagcccctggcccagatcgccggaaacagatacgcctccggacctgtgggaaaggccctgagcgacgcatgtatgggcacaatcgcctccttcctgtctaagtaccaggacatcatcatcgaacaccagaaggtggtgaagggcaaccagaagagactggagagcctgcgggagctggccggcaaggaaaacctggaataccctagcgtgaccctgccacctcagcctcacaccaaggagggcgttgatgcctacaacgaagtgatcgcccgggtgcgaatgtgggtgaacctgaacctgtggcagaagctgaagctaagcagagatgatgccaagcctctgctgagactgaagggattcccttcctttcctctggtcgagagacaggccaacgaagtggactggtgggacatggtgtgtaacgtgaagaagctgatcaacgagaaaaaggaggatggcaaggtgttttggcagaatctggctggctacaagagacaggaagccctgagaccatacctgagcagcgaggaagatcggaagaagggaaagaaattcgctcggtaccagctgggcgacctgctgctgcacctggaaaagaagcacggcgaggactggggaaaggtgtacgacgaggcctgggagcggattgacaagaaagtggaaggcctgagcaagcacatcaagctggaagaggaacggagaagcgaggacgcccagagcaaggccgccctgaccgactggctgcgggctaaggccagcttcgtgatcgagggcctgaaggaggccgacaaggacgagttctgcagatgcgagctgaagctgcagaagtggtacggggacctgcggggaaagcccttcgccatcgaagccgagaacagcatcctggacatcagcggcttcagcaagcagtacaactgtgccttcatctggcagaaggacggcgtgaagaagctgaacctgtacctgatcatcaactacttcaagggcggcaagctgcggttcaagaagatcaaacctgaagccttcgaagccaacagattctacaccgtgatcaacaaaaagagcggcgagatcgtgcccatggaggtgaacttcaacttcgacgaccccaacctgatcatcctgcctctggcctttggcaagagacagggcagagaattcatctggaacgacctgctgtccctggaaaccggcagcctgaagctggccaacggaagagtgatcgagaagacactgtacaacagaagaacccggcaggatgagcctgccctgttcgtggccctgaccttcgagcggcgggaggtcctggactcctccaatatcaaaccaatgaacctgatcggcgtggcaagaggcgaaaacatccccgccgtgatcgccctgaccgaccccgagggctgcccactgagccggtttaaggatagcctgggaaacccaacccacatcctgagaatcggcgagagctataaggagaagcagcggaccatccaggccaagaaggaggtggagcagcggagagccggcggctacagccggaagtacgccagcaaagccaagaatctggcagacgatatggtgagaaacaccgctagagatctgctgtactacgccgtgacccaggatgccatgctgatcttcgccaacctgagccggggcttcggccggcagggcaagcggaccttcatggccgagagacagtacacacggatggaggactggctgaccgccaagctggcctacgagggcctgagcaagacctacctgtccaagacactggcccagtacacctccaagacatgcagcaactgtgggtttaccatcaccagcgccgactacgacagggtgctggagaagctgaagaagacagcaacaggctggatgaccacaattaacggcaaggagctgaaggtggagggccagattacctactacaacagatacaagagacagaacgtagtcaaggacctgtccgtcgagctggatagactgagcgaagaatctgtgaacaacgacatctcctcctggacaaagggcagaagcggagaagctctgagcctcctgaagaaaagattctcccatagacccgtgcaggagaagttcgtgtgcctgaactgcggcttcgagacacacgcagccgagcaagccgccctgaacatcgccagatcctggctgttcctgcggagccaggagtacaagaaataccagacaaacaagacaaccggcaacaccgataagagagccttcgtcgagacctggcagtccttttaccggaagaagcttaaggaggtgtggaaacctgccgtgcggtctggcggatctggcggaggctccacaagcagccagggcctggtgaccttcgaggacgtggccgtgtacttcagcctggaggagtgggagaggctgaacgtggagcagagggccctgtaccaggaggtgatgcagggcaactacggcatcctggtgagcctgggctaccccatccccaagcccgacctgatcttcaggctggagcagggcgaggagccctgggtgcccgacagcccccaccccgaggagggcgacatcgtgaccggcgtgtacaccagccccaagaaaaagagaaaagtctaagctgccttctgcggggcttgccttctggccatgcccttcttctctcccttgcacctgtacctcttggtctttgaataaagcctgagtaggaaggctagcaaaaaaaaaaaaaaaaaaaaaaaaaaaaaaaaaaaaaaaaaaaaaaaaaaaaaaaaaaaaaaaaaaaaaaaaaaaaaaaa

SEQ ID NO: 6739 - RNA, 5797 nt, synthetic construct
  source 1..5797: mol_type = other RNA
aggaaataagagagaaaagaagagtaagaagaaatataagagccaccatggcccctaagaagaagcgtaaagtgagccggatggaacgcctcgtctacgaggtgcggcagaagtgcagaaacatcgaggacatctgcatctcctgcggatctctgaacgtgaccctggagcacccactgttcatcggcggcatgtgccagaactgtaaaaactgttttctggagtgtgcctatcaatacgacgatgacggctaccagagctactgcaccatctgttgcggcggaagagaggtgctgatgtgtggaaataacaactgctgccggtgcttctgcgtggaatgcgtggacctgctggtgggccccggcgccgcccaggccgctattaaggaagatccttggaactgctacatgtgcggccacaagggcacatacggcctgctgagacggagagaggactggcctagcagactgcagatgttcttcgccaataaccacgaccaggagttcgacccccctaaggtgtaccctcccgtccccgccgagaagagaaagcccatccgggtcctgagcctgttcgatggcatcgccaccggtctgctggtgctgaaggacctgggcatccaggtggataggtacattgcctccgaggtgtgcgaggactccatcaccgtgggaatggtgcgtcatcagggcaagatcatgtacgtgggcgacgtgcggagcgtgacacagaagcatatccaggagtggggccctttcgacctggtgatcggcggcagcccttgcaatgacctgagcatcgtgaacccagcccggaagggcctgtacgagggaaccggcagactgttcttcgagttttacagactgctgcacgacgcccggcctaaggaaggcgacgaccggcccttcttttggctgttcgagaatgtggtggccatgggagtcagcgacaagcgggatattagccggttcctggagagcaaccccgtgatgatcgatgccaaggaagtgagcgccgcccaccgggccagatacttctggggcaatctgcctggcatgaacagacccctggccagcaccgtgaacgacaagctggagctgcaggagtgcctggagcacggccggatcgccaagttcagcaaggtgagaaccatcaccacccgaagcaacagcatcaaacaaggcaaggaccagcactttcctgtgttcatgaacgagaaggaggacatcctgtggtgtaccgagatggagagagtgttcgggttcccagtccactacacagatgtcagcaacatgtctagactggccagacagagactgctgggaagaagctggtccgtccctgtgatcagacacctgttcgcccctctgaaggagtacttcgcctgcgtgagcagcggcaacagcaacgccaacagccggggccccagcttctctagcggcctggtgccactgtccctgagagggagccacatgggccccatggagatctacaaaaccgtgagcgcctggaagcggcagcctgtgcgcgtgctgagcctgtttcggaatatcgataaagtcctgaaaagcctgggattcctggagagcggctctggctccggcggtggcaccctgaagtacgtggaggatgtgacaaacgtggtcagacgggatgtggagaagtggggccccttcgatctggtgtacggcagcacccaacccctgggcagctcttgtgaccggtgccctggctggtacatgtttcagttccaccggatcctgcagtacgccctgccgagacaggagtcccagcggccattcttttggattttcatggacaacttgctgctgaccgaggatgaccaggaaactaccactcggttcctgcagaccgaagccgtgaccctgcaggacgtgagaggccgggactaccagaacgccatgcgggtgtggtccaacatccctggactgaaaagcaagcacgcacctctgacccctaaagaagaggagtacctgcaggcccaggtgcggagcagaagcaagctggacgcccctaaggtggatctgctggtgaagaattgcctcctgcccctgagagagtacttcaagtatttcagccagaatagtctgcccctgggcggcccaagcagcggcgcccctcctcccagcggcggcagcccagccggctccccaacctctaccgaggagggcacctctgagtccgccacccccgagagcggccctggcacctccaccgagcccagcgagggcagcgcacccggcagccctgccggcagccccacctccacagaggagggaaccagcaccgagcccagcgaaggcagcgccccaggcaccagcaccgagcctagtgagggcggctctggcggcggcagcgcccaggagattaaacggatcaacaagatcagaagaagacttgtgaaagacagcaacaccaagaaggccggcaagacaggccccatgaaaaccctgctggttagagtgatgacacccgatctgagagagcggctggaaaacctgagaaagaagcctgaaaatatcccccagcccatcagcaatacatctagagccaacctgaataagctgctgaccgattacaccgaaatgaagaaggcgatcctgcatgtgtactgggaagagttccagaaggaccctgtgggcctgatgagccgggtggcccagcctgccagcaagaagatcgatcagaacaagctgaaacctgagatggacgagaagggcaacctgaccaccgccggctttgcctgctctcagtgtggccagcccctgttcgtgtacaagctggagcaggtgtctgagaagggcaaggcttacaccaactacttcggacggtgcaatgtggccgagcacgaaaagctgatcctgctggcccagctgaagcccgagaaggatagcgacgaagccgtgacatatagcctgggaaagtttgggcagagggccctggatttctacagcattcatgtgaccaaggagtccacccaccccgtgaagcccctggcccagatcgccggaaacagatacgcctccggacctgtgggaaaggccctgagcgacgcatgtatgggcacaatcgcctccttcctgtctaagtaccaggacatcatcatcgaacaccagaaggtggtgaagggcaaccagaagagactggagagcctgcgggagctggccggcaaggaaaacctggaataccctagcgtgaccctgccacctcagcctcacaccaaggagggcgttgatgcctacaacgaagtgatcgcccgggtgcgaatgtgggtgaacctgaacctgtggcagaagctgaagctaagcagagatgatgccaagcctctgctgagactgaagggattcccttcctttcctctggtcgagagacaggccaacgaagtggactggtgggacatggtgtgtaacgtgaagaagctgatcaacgagaaaaaggaggatggcaaggtgttttggcagaatctggctggctacaagagacaggaagccctgagaccatacctgagcagcgaggaagatcggaagaagggaaagaaattcgctcggtaccagctgggcgacctgctgctgcacctggaaaagaagcacggcgaggactggggaaaggtgtacgacgaggcctgggagcggattgacaagaaagtggaaggcctgagcaagcacatcaagctggaagaggaacggagaagcgaggacgcccagagcaaggccgccctgaccgactggctgcgggctaaggccagcttcgtgatcgagggcctgaaggaggccgacaaggacgagttctgcagatgcgagctgaagctgcagaagtggtacggggacctgcggggaaagcccttcgccatcgaagccgagaacagcatcctggacatcagcggcttcagcaagcagtacaactgtgccttcatctggcagaaggacggcgtgaagaagctgaacctgtacctgatcatcaactacttcaagggcggcaagctgcggttcaagaagatcaaacctgaagccttcgaagccaacagattctacaccgtgatcaacaaaaagagcggcgagatcgtgcccatggaggtgaacttcaacttcgacgaccccaacctgatcatcctgcctctggcctttggcaagagacagggcagagaattcatctggaacgacctgctgtccctggaaaccggcagcctgaagctggccaacggaagagtgatcgagaagacactgtacaacagaagaacccggcaggatgagcctgccctgttcgtggccctgaccttcgagcggcgggaggtcctggactcctccaatatcaaaccaatgaacctgatcggcgtggcaagaggcgaaaacatccccgccgtgatcgccctgaccgaccccgagggctgcccactgagccggtttaaggatagcctgggaaacccaacccacatcctgagaatcggcgagagctataaggagaagcagcggaccatccaggccaagaaggaggtggagcagcggagagccggcggctacagccggaagtacgccagcaaagccaagaatctggcagacgatatggtgagaaacaccgctagagatctgctgtactacgccgtgacccaggatgccatgctgatcttcgccaacctgagccggggcttcggccggcagggcaagcggaccttcatggccgagagacagtacacacggatggaggactggctgaccgccaagctggcctacgagggcctgagcaagacctacctgtccaagacactggcccagtacacctccaagacatgcagcaactgtgggtttaccatcaccagcgccgactacgacagggtgctggagaagctgaagaagacagcaacaggctggatgaccacaattaacggcaaggagctgaaggtggagggccagattacctactacaacagatacaagagacagaacgtagtcaaggacctgtccgtcgagctggatagactgagcgaagaatctgtgaacaacgacatctcctcctggacaaagggcagaagcggagaagctctgagcctcctgaagaaaagattctcccatagacccgtgcaggagaagttcgtgtgcctgaactgcggcttcgagacacacgcagccgagcaagccgccctgaacatcgccagatcctggctgttcctgcggagccaggagtacaagaaataccagacaaacaagacaaccggcaacaccgataagagagccttcgtcgagacctggcagtccttttaccggaagaagcttaaggaggtgtggaaacctgccgtgcggtctggcggatctggcggaggctccacaagcccccagaagagcgtgaccttcgaggacgtggccgtgtacttcacccagaccgagtgggacggcctgagccccgcccagagggccctgtacagggacgtgatgctggagaactacggcaacgtggccagcctgggcttcagcctgctgaagcccgccgtgatcagccagctggagggcgccgacgagctggagggccccagccccctggtggccggcaccgagatcggcccccagggcctgtggaccagccccaagaaaaagagaaaagtctaagctgccttctgcggggcttgccttctggccatgcccttcttctctcccttgcacctgtacctcttggtctttgaataaagcctgagtaggaaggctagcaaaaaaaaaaaaaaaaaaaaaaaaaaaaaaaaaaaaaaaaaaaaaaaaaaaaaaaaaaaaaaaaaaaaaaaaaaaaaaaa

SEQ ID NO: 6740 - RNA, 5797 nt, synthetic construct
  source 1..5797: mol_type = other RNA
aggaaataagagagaaaagaagagtaagaagaaatataagagccaccatggcccctaagaagaagcgtaaagtgagccggatggaacgcctcgtctacgaggtgcggcagaagtgcagaaacatcgaggacatctgcatctcctgcggatctctgaacgtgaccctggagcacccactgttcatcggcggcatgtgccagaactgtaaaaactgttttctggagtgtgcctatcaatacgacgatgacggctaccagagctactgcaccatctgttgcggcggaagagaggtgctgatgtgtggaaataacaactgctgccggtgcttctgcgtggaatgcgtggacctgctggtgggccccggcgccgcccaggccgctattaaggaagatccttggaactgctacatgtgcggccacaagggcacatacggcctgctgagacggagagaggactggcctagcagactgcagatgttcttcgccaataaccacgaccaggagttcgacccccctaaggtgtaccctcccgtccccgccgagaagagaaagcccatccgggtcctgagcctgttcgatggcatcgccaccggtctgctggtgctgaaggacctgggcatccaggtggataggtacattgcctccgaggtgtgcgaggactccatcaccgtgggaatggtgcgtcatcagggcaagatcatgtacgtgggcgacgtgcggagcgtgacacagaagcatatccaggagtggggccctttcgacctggtgatcggcggcagcccttgcaatgacctgagcatcgtgaacccagcccggaagggcctgtacgagggaaccggcagactgttcttcgagttttacagactgctgcacgacgcccggcctaaggaaggcgacgaccggcccttcttttggctgttcgagaatgtggtggccatgggagtcagcgacaagcgggatattagccggttcctggagagcaaccccgtgatgatcgatgccaaggaagtgagcgccgcccaccgggccagatacttctggggcaatctgcctggcatgaacagacccctggccagcaccgtgaacgacaagctggagctgcaggagtgcctggagcacggccggatcgccaagttcagcaaggtgagaaccatcaccacccgaagcaacagcatcaaacaaggcaaggaccagcactttcctgtgttcatgaacgagaaggaggacatcctgtggtgtaccgagatggagagagtgttcgggttcccagtccactacacagatgtcagcaacatgtctagactggccagacagagactgctgggaagaagctggtccgtccctgtgatcagacacctgttcgcccctctgaaggagtacttcgcctgcgtgagcagcggcaacagcaacgccaacagccggggccccagcttctctagcggcctggtgccactgtccctgagagggagccacatgggccccatggagatctacaaaaccgtgagcgcctggaagcggcagcctgtgcgcgtgctgagcctgtttcggaatatcgataaagtcctgaaaagcctgggattcctggagagcggctctggctccggcggtggcaccctgaagtacgtggaggatgtgacaaacgtggtcagacgggatgtggagaagtggggccccttcgatctggtgtacggcagcacccaacccctgggcagctcttgtgaccggtgccctggctggtacatgtttcagttccaccggatcctgcagtacgccctgccgagacaggagtcccagcggccattcttttggattttcatggacaacttgctgctgaccgaggatgaccaggaaactaccactcggttcctgcagaccgaagccgtgaccctgcaggacgtgagaggccgggactaccagaacgccatgcgggtgtggtccaacatccctggactgaaaagcaagcacgcacctctgacccctaaagaagaggagtacctgcaggcccaggtgcggagcagaagcaagctggacgcccctaaggtggatctgctggtgaagaattgcctcctgcccctgagagagtacttcaagtatttcagccagaatagtctgcccctgggcggcccaagcagcggcgcccctcctcccagcggcggcagcccagccggctccccaacctctaccgaggagggcacctctgagtccgccacccccgagagcggccctggcacctccaccgagcccagcgagggcagcgcacccggcagccctgccggcagccccacctccacagaggagggaaccagcaccgagcccagcgaaggcagcgccccaggcaccagcaccgagcctagtgagggcggctctggcggcggcagcgcccaggagattaaacggatcaacaagatcagaagaagacttgtgaaagacagcaacaccaagaaggccggcaagacaggccccatgaaaaccctgctggttagagtgatgacacccgatctgagagagcggctggaaaacctgagaaagaagcctgaaaatatcccccagcccatcagcaatacatctagagccaacctgaataagctgctgaccgattacaccgaaatgaagaaggcgatcctgcatgtgtactgggaagagttccagaaggaccctgtgggcctgatgagccgggtggcccagcctgccagcaagaagatcgatcagaacaagctgaaacctgagatggacgagaagggcaacctgaccaccgccggctttgcctgctctcagtgtggccagcccctgttcgtgtacaagctggagcaggtgtctgagaagggcaaggcttacaccaactacttcggacggtgcaatgtggccgagcacgaaaagctgatcctgctggcccagctgaagcccgagaaggatagcgacgaagccgtgacatatagcctgggaaagtttgggcagagggccctggatttctacagcattcatgtgaccaaggagtccacccaccccgtgaagcccctggcccagatcgccggaaacagatacgcctccggacctgtgggaaaggccctgagcgacgcatgtatgggcacaatcgcctccttcctgtctaagtaccaggacatcatcatcgaacaccagaaggtggtgaagggcaaccagaagagactggagagcctgcgggagctggccggcaaggaaaacctggaataccctagcgtgaccctgccacctcagcctcacaccaaggagggcgttgatgcctacaacgaagtgatcgcccgggtgcgaatgtgggtgaacctgaacctgtggcagaagctgaagctaagcagagatgatgccaagcctctgctgagactgaagggattcccttcctttcctctggtcgagagacaggccaacgaagtggactggtgggacatggtgtgtaacgtgaagaagctgatcaacgagaaaaaggaggatggcaaggtgttttggcagaatctggctggctacaagagacaggaagccctgagaccatacctgagcagcgaggaagatcggaagaagggaaagaaattcgctcggtaccagctgggcgacctgctgctgcacctggaaaagaagcacggcgaggactggggaaaggtgtacgacgaggcctgggagcggattgacaagaaagtggaaggcctgagcaagcacatcaagctggaagaggaacggagaagcgaggacgcccagagcaaggccgccctgaccgactggctgcgggctaaggccagcttcgtgatcgagggcctgaaggaggccgacaaggacgagttctgcagatgcgagctgaagctgcagaagtggtacggggacctgcggggaaagcccttcgccatcgaagccgagaacagcatcctggacatcagcggcttcagcaagcagtacaactgtgccttcatctggcagaaggacggcgtgaagaagctgaacctgtacctgatcatcaactacttcaagggcggcaagctgcggttcaagaagatcaaacctgaagccttcgaagccaacagattctacaccgtgatcaacaaaaagagcggcgagatcgtgcccatggaggtgaacttcaacttcgacgaccccaacctgatcatcctgcctctggcctttggcaagagacagggcagagaattcatctggaacgacctgctgtccctggaaaccggcagcctgaagctggccaacggaagagtgatcgagaagacactgtacaacagaagaacccggcaggatgagcctgccctgttcgtggccctgaccttcgagcggcgggaggtcctggactcctccaatatcaaaccaatgaacctgatcggcgtggcaagaggcgaaaacatccccgccgtgatcgccctgaccgaccccgagggctgcccactgagccggtttaaggatagcctgggaaacccaacccacatcctgagaatcggcgagagctataaggagaagcagcggaccatccaggccaagaaggaggtggagcagcggagagccggcggctacagccggaagtacgccagcaaagccaagaatctggcagacgatatggtgagaaacaccgctagagatctgctgtactacgccgtgacccaggatgccatgctgatcttcgccaacctgagccggggcttcggccggcagggcaagcggaccttcatggccgagagacagtacacacggatggaggactggctgaccgccaagctggcctacgagggcctgagcaagacctacctgtccaagacactggcccagtacacctccaagacatgcagcaactgtgggtttaccatcaccagcgccgactacgacagggtgctggagaagctgaagaagacagcaacaggctggatgaccacaattaacggcaaggagctgaaggtggagggccagattacctactacaacagatacaagagacagaacgtagtcaaggacctgtccgtcgagctggatagactgagcgaagaatctgtgaacaacgacatctcctcctggacaaagggcagaagcggagaagctctgagcctcctgaagaaaagattctcccatagacccgtgcaggagaagttcgtgtgcctgaactgcggcttcgagacacacgcagccgagcaagccgccctgaacatcgccagatcctggctgttcctgcggagccaggagtacaagaaataccagacaaacaagacaaccggcaacaccgataagagagccttcgtcgagacctggcagtccttttaccggaagaagcttaaggaggtgtggaaacctgccgtgcggtctggcggatctggcggaggctccacaagcaggcccagggccgtgaagttcgccgacgtggccgtgtacttcagccccgaggagtggggctgcctgaggcccgcccagagggccctgtacagggacgtgatgagggagacctacggccacctgggcgccctgggctgcgccggccccaagcccgccctgatcagctggctggagaggaacaccgacgactgggagcccgccgccctggacccccaggagtgccccaggggcctgaccgtgcagaccagccccaagaaaaagagaaaagtctaagctgccttctgcggggcttgccttctggccatgcccttcttctctcccttgcacctgtacctcttggtctttgaataaagcctgagtaggaaggctagcaaaaaaaaaaaaaaaaaaaaaaaaaaaaaaaaaaaaaaaaaaaaaaaaaaaaaaaaaaaaaaaaaaaaaaaaaaaaaaaa

SEQ ID NO: 6741 - RNA, 5797 nt, synthetic construct
  source 1..5797: mol_type = other RNA
aggaaataagagagaaaagaagagtaagaagaaatataagagccaccatggcccctaagaagaagcgtaaagtgagccggatggaacgcctcgtctacgaggtgcggcagaagtgcagaaacatcgaggacatctgcatctcctgcggatctctgaacgtgaccctggagcacccactgttcatcggcggcatgtgccagaactgtaaaaactgttttctggagtgtgcctatcaatacgacgatgacggctaccagagctactgcaccatctgttgcggcggaagagaggtgctgatgtgtggaaataacaactgctgccggtgcttctgcgtggaatgcgtggacctgctggtgggccccggcgccgcccaggccgctattaaggaagatccttggaactgctacatgtgcggccacaagggcacatacggcctgctgagacggagagaggactggcctagcagactgcagatgttcttcgccaataaccacgaccaggagttcgacccccctaaggtgtaccctcccgtccccgccgagaagagaaagcccatccgggtcctgagcctgttcgatggcatcgccaccggtctgctggtgctgaaggacctgggcatccaggtggataggtacattgcctccgaggtgtgcgaggactccatcaccgtgggaatggtgcgtcatcagggcaagatcatgtacgtgggcgacgtgcggagcgtgacacagaagcatatccaggagtggggccctttcgacctggtgatcggcggcagcccttgcaatgacctgagcatcgtgaacccagcccggaagggcctgtacgagggaaccggcagactgttcttcgagttttacagactgctgcacgacgcccggcctaaggaaggcgacgaccggcccttcttttggctgttcgagaatgtggtggccatgggagtcagcgacaagcgggatattagccggttcctggagagcaaccccgtgatgatcgatgccaaggaagtgagcgccgcccaccgggccagatacttctggggcaatctgcctggcatgaacagacccctggccagcaccgtgaacgacaagctggagctgcaggagtgcctggagcacggccggatcgccaagttcagcaaggtgagaaccatcaccacccgaagcaacagcatcaaacaaggcaaggaccagcactttcctgtgttcatgaacgagaaggaggacatcctgtggtgtaccgagatggagagagtgttcgggttcccagtccactacacagatgtcagcaacatgtctagactggccagacagagactgctgggaagaagctggtccgtccctgtgatcagacacctgttcgcccctctgaaggagtacttcgcctgcgtgagcagcggcaacagcaacgccaacagccggggccccagcttctctagcggcctggtgccactgtccctgagagggagccacatgggccccatggagatctacaaaaccgtgagcgcctggaagcggcagcctgtgcgcgtgctgagcctgtttcggaatatcgataaagtcctgaaaagcctgggattcctggagagcggctctggctccggcggtggcaccctgaagtacgtggaggatgtgacaaacgtggtcagacgggatgtggagaagtggggccccttcgatctggtgtacggcagcacccaacccctgggcagctcttgtgaccggtgccctggctggtacatgtttcagttccaccggatcctgcagtacgccctgccgagacaggagtcccagcggccattcttttggattttcatggacaacttgctgctgaccgaggatgaccaggaaactaccactcggttcctgcagaccgaagccgtgaccctgcaggacgtgagaggccgggactaccagaacgccatgcgggtgtggtccaacatccctggactgaaaagcaagcacgcacctctgacccctaaagaagaggagtacctgcaggcccaggtgcggagcagaagcaagctggacgcccctaaggtggatctgctggtgaagaattgcctcctgcccctgagagagtacttcaagtatttcagccagaatagtctgcccctgggcggcccaagcagcggcgcccctcctcccagcggcggcagcccagccggctccccaacctctaccgaggagggcacctctgagtccgccacccccgagagcggccctggcacctccaccgagcccagcgagggcagcgcacccggcagccctgccggcagccccacctccacagaggagggaaccagcaccgagcccagcgaaggcagcgccccaggcaccagcaccgagcctagtgagggcggctctggcggcggcagcgcccaggagattaaacggatcaacaagatcagaagaagacttgtgaaagacagcaacaccaagaaggccggcaagacaggccccatgaaaaccctgctggttagagtgatgacacccgatctgagagagcggctggaaaacctgagaaagaagcctgaaaatatcccccagcccatcagcaatacatctagagccaacctgaataagctgctgaccgattacaccgaaatgaagaaggcgatcctgcatgtgtactgggaagagttccagaaggaccctgtgggcctgatgagccgggtggcccagcctgccagcaagaagatcgatcagaacaagctgaaacctgagatggacgagaagggcaacctgaccaccgccggctttgcctgctctcagtgtggccagcccctgttcgtgtacaagctggagcaggtgtctgagaagggcaaggcttacaccaactacttcggacggtgcaatgtggccgagcacgaaaagctgatcctgctggcccagctgaagcccgagaaggatagcgacgaagccgtgacatatagcctgggaaagtttgggcagagggccctggatttctacagcattcatgtgaccaaggagtccacccaccccgtgaagcccctggcccagatcgccggaaacagatacgcctccggacctgtgggaaaggccctgagcgacgcatgtatgggcacaatcgcctccttcctgtctaagtaccaggacatcatcatcgaacaccagaaggtggtgaagggcaaccagaagagactggagagcctgcgggagctggccggcaaggaaaacctggaataccctagcgtgaccctgccacctcagcctcacaccaaggagggcgttgatgcctacaacgaagtgatcgcccgggtgcgaatgtgggtgaacctgaacctgtggcagaagctgaagctaagcagagatgatgccaagcctctgctgagactgaagggattcccttcctttcctctggtcgagagacaggccaacgaagtggactggtgggacatggtgtgtaacgtgaagaagctgatcaacgagaaaaaggaggatggcaaggtgttttggcagaatctggctggctacaagagacaggaagccctgagaccatacctgagcagcgaggaagatcggaagaagggaaagaaattcgctcggtaccagctgggcgacctgctgctgcacctggaaaagaagcacggcgaggactggggaaaggtgtacgacgaggcctgggagcggattgacaagaaagtggaaggcctgagcaagcacatcaagctggaagaggaacggagaagcgaggacgcccagagcaaggccgccctgaccgactggctgcgggctaaggccagcttcgtgatcgagggcctgaaggaggccgacaaggacgagttctgcagatgcgagctgaagctgcagaagtggtacggggacctgcggggaaagcccttcgccatcgaagccgagaacagcatcctggacatcagcggcttcagcaagcagtacaactgtgccttcatctggcagaaggacggcgtgaagaagctgaacctgtacctgatcatcaactacttcaagggcggcaagctgcggttcaagaagatcaaacctgaagccttcgaagccaacagattctacaccgtgatcaacaaaaagagcggcgagatcgtgcccatggaggtgaacttcaacttcgacgaccccaacctgatcatcctgcctctggcctttggcaagagacagggcagagaattcatctggaacgacctgctgtccctggaaaccggcagcctgaagctggccaacggaagagtgatcgagaagacactgtacaacagaagaacccggcaggatgagcctgccctgttcgtggccctgaccttcgagcggcgggaggtcctggactcctccaatatcaaaccaatgaacctgatcggcgtggcaagaggcgaaaacatccccgccgtgatcgccctgaccgaccccgagggctgcccactgagccggtttaaggatagcctgggaaacccaacccacatcctgagaatcggcgagagctataaggagaagcagcggaccatccaggccaagaaggaggtggagcagcggagagccggcggctacagccggaagtacgccagcaaagccaagaatctggcagacgatatggtgagaaacaccgctagagatctgctgtactacgccgtgacccaggatgccatgctgatcttcgccaacctgagccggggcttcggccggcagggcaagcggaccttcatggccgagagacagtacacacggatggaggactggctgaccgccaagctggcctacgagggcctgagcaagacctacctgtccaagacactggcccagtacacctccaagacatgcagcaactgtgggtttaccatcaccagcgccgactacgacagggtgctggagaagctgaagaagacagcaacaggctggatgaccacaattaacggcaaggagctgaaggtggagggccagattacctactacaacagatacaagagacagaacgtagtcaaggacctgtccgtcgagctggatagactgagcgaagaatctgtgaacaacgacatctcctcctggacaaagggcagaagcggagaagctctgagcctcctgaagaaaagattctcccatagacccgtgcaggagaagttcgtgtgcctgaactgcggcttcgagacacacgcagccgagcaagccgccctgaacatcgccagatcctggctgttcctgcggagccaggagtacaagaaataccagacaaacaagacaaccggcaacaccgataagagagccttcgtcgagacctggcagtccttttaccggaagaagcttaaggaggtgtggaaacctgccgtgcggtctggcggatctggcggaggctccacaagccaccaggaggtggtgaccttcgaggacgtggccgtgtacttcacccagaccgagtgggccggcctgagccccgcccagagggccctgtacaggagcgtgatgctggagatctacggcaacctgaccagcctgggctaccccgtgcccaagcccgagctggtgagcctgctggagaggggcgacctgcccgtgggcctggagacccaggacaacccccccgcccagggcaccagggacatctacaccagccccaagaaaaagagaaaagtctaagctgccttctgcggggcttgccttctggccatgcccttcttctctcccttgcacctgtacctcttggtctttgaataaagcctgagtaggaaggctagcaaaaaaaaaaaaaaaaaaaaaaaaaaaaaaaaaaaaaaaaaaaaaaaaaaaaaaaaaaaaaaaaaaaaaaaaaaaaaaaa

SEQ ID NO: 6742 - RNA, 5797 nt, synthetic construct
  source 1..5797: mol_type = other RNA
aggaaataagagagaaaagaagagtaagaagaaatataagagccaccatggcccctaagaagaagcgtaaagtgagccggatggaacgcctcgtctacgaggtgcggcagaagtgcagaaacatcgaggacatctgcatctcctgcggatctctgaacgtgaccctggagcacccactgttcatcggcggcatgtgccagaactgtaaaaactgttttctggagtgtgcctatcaatacgacgatgacggctaccagagctactgcaccatctgttgcggcggaagagaggtgctgatgtgtggaaataacaactgctgccggtgcttctgcgtggaatgcgtggacctgctggtgggccccggcgccgcccaggccgctattaaggaagatccttggaactgctacatgtgcggccacaagggcacatacggcctgctgagacggagagaggactggcctagcagactgcagatgttcttcgccaataaccacgaccaggagttcgacccccctaaggtgtaccctcccgtccccgccgagaagagaaagcccatccgggtcctgagcctgttcgatggcatcgccaccggtctgctggtgctgaaggacctgggcatccaggtggataggtacattgcctccgaggtgtgcgaggactccatcaccgtgggaatggtgcgtcatcagggcaagatcatgtacgtgggcgacgtgcggagcgtgacacagaagcatatccaggagtggggccctttcgacctggtgatcggcggcagcccttgcaatgacctgagcatcgtgaacccagcccggaagggcctgtacgagggaaccggcagactgttcttcgagttttacagactgctgcacgacgcccggcctaaggaaggcgacgaccggcccttcttttggctgttcgagaatgtggtggccatgggagtcagcgacaagcgggatattagccggttcctggagagcaaccccgtgatgatcgatgccaaggaagtgagcgccgcccaccgggccagatacttctggggcaatctgcctggcatgaacagacccctggccagcaccgtgaacgacaagctggagctgcaggagtgcctggagcacggccggatcgccaagttcagcaaggtgagaaccatcaccacccgaagcaacagcatcaaacaaggcaaggaccagcactttcctgtgttcatgaacgagaaggaggacatcctgtggtgtaccgagatggagagagtgttcgggttcccagtccactacacagatgtcagcaacatgtctagactggccagacagagactgctgggaagaagctggtccgtccctgtgatcagacacctgttcgcccctctgaaggagtacttcgcctgcgtgagcagcggcaacagcaacgccaacagccggggccccagcttctctagcggcctggtgccactgtccctgagagggagccacatgggccccatggagatctacaaaaccgtgagcgcctggaagcggcagcctgtgcgcgtgctgagcctgtttcggaatatcgataaagtcctgaaaagcctgggattcctggagagcggctctggctccggcggtggcaccctgaagtacgtggaggatgtgacaaacgtggtcagacgggatgtggagaagtggggccccttcgatctggtgtacggcagcacccaacccctgggcagctcttgtgaccggtgccctggctggtacatgtttcagttccaccggatcctgcagtacgccctgccgagacaggagtcccagcggccattcttttggattttcatggacaacttgctgctgaccgaggatgaccaggaaactaccactcggttcctgcagaccgaagccgtgaccctgcaggacgtgagaggccgggactaccagaacgccatgcgggtgtggtccaacatccctggactgaaaagcaagcacgcacctctgacccctaaagaagaggagtacctgcaggcccaggtgcggagcagaagcaagctggacgcccctaaggtggatctgctggtgaagaattgcctcctgcccctgagagagtacttcaagtatttcagccagaatagtctgcccctgggcggcccaagcagcggcgcccctcctcccagcggcggcagcccagccggctccccaacctctaccgaggagggcacctctgagtccgccacccccgagagcggccctggcacctccaccgagcccagcgagggcagcgcacccggcagccctgccggcagccccacctccacagaggagggaaccagcaccgagcccagcgaaggcagcgccccaggcaccagcaccgagcctagtgagggcggctctggcggcggcagcgcccaggagattaaacggatcaacaagatcagaagaagacttgtgaaagacagcaacaccaagaaggccggcaagacaggccccatgaaaaccctgctggttagagtgatgacacccgatctgagagagcggctggaaaacctgagaaagaagcctgaaaatatcccccagcccatcagcaatacatctagagccaacctgaataagctgctgaccgattacaccgaaatgaagaaggcgatcctgcatgtgtactgggaagagttccagaaggaccctgtgggcctgatgagccgggtggcccagcctgccagcaagaagatcgatcagaacaagctgaaacctgagatggacgagaagggcaacctgaccaccgccggctttgcctgctctcagtgtggccagcccctgttcgtgtacaagctggagcaggtgtctgagaagggcaaggcttacaccaactacttcggacggtgcaatgtggccgagcacgaaaagctgatcctgctggcccagctgaagcccgagaaggatagcgacgaagccgtgacatatagcctgggaaagtttgggcagagggccctggatttctacagcattcatgtgaccaaggagtccacccaccccgtgaagcccctggcccagatcgccggaaacagatacgcctccggacctgtgggaaaggccctgagcgacgcatgtatgggcacaatcgcctccttcctgtctaagtaccaggacatcatcatcgaacaccagaaggtggtgaagggcaaccagaagagactggagagcctgcgggagctggccggcaaggaaaacctggaataccctagcgtgaccctgccacctcagcctcacaccaaggagggcgttgatgcctacaacgaagtgatcgcccgggtgcgaatgtgggtgaacctgaacctgtggcagaagctgaagctaagcagagatgatgccaagcctctgctgagactgaagggattcccttcctttcctctggtcgagagacaggccaacgaagtggactggtgggacatggtgtgtaacgtgaagaagctgatcaacgagaaaaaggaggatggcaaggtgttttggcagaatctggctggctacaagagacaggaagccctgagaccatacctgagcagcgaggaagatcggaagaagggaaagaaattcgctcggtaccagctgggcgacctgctgctgcacctggaaaagaagcacggcgaggactggggaaaggtgtacgacgaggcctgggagcggattgacaagaaagtggaaggcctgagcaagcacatcaagctggaagaggaacggagaagcgaggacgcccagagcaaggccgccctgaccgactggctgcgggctaaggccagcttcgtgatcgagggcctgaaggaggccgacaaggacgagttctgcagatgcgagctgaagctgcagaagtggtacggggacctgcggggaaagcccttcgccatcgaagccgagaacagcatcctggacatcagcggcttcagcaagcagtacaactgtgccttcatctggcagaaggacggcgtgaagaagctgaacctgtacctgatcatcaactacttcaagggcggcaagctgcggttcaagaagatcaaacctgaagccttcgaagccaacagattctacaccgtgatcaacaaaaagagcggcgagatcgtgcccatggaggtgaacttcaacttcgacgaccccaacctgatcatcctgcctctggcctttggcaagagacagggcagagaattcatctggaacgacctgctgtccctggaaaccggcagcctgaagctggccaacggaagagtgatcgagaagacactgtacaacagaagaacccggcaggatgagcctgccctgttcgtggccctgaccttcgagcggcgggaggtcctggactcctccaatatcaaaccaatgaacctgatcggcgtggcaagaggcgaaaacatccccgccgtgatcgccctgaccgaccccgagggctgcccactgagccggtttaaggatagcctgggaaacccaacccacatcctgagaatcggcgagagctataaggagaagcagcggaccatccaggccaagaaggaggtggagcagcggagagccggcggctacagccggaagtacgccagcaaagccaagaatctggcagacgatatggtgagaaacaccgctagagatctgctgtactacgccgtgacccaggatgccatgctgatcttcgccaacctgagccggggcttcggccggcagggcaagcggaccttcatggccgagagacagtacacacggatggaggactggctgaccgccaagctggcctacgagggcctgagcaagacctacctgtccaagacactggcccagtacacctccaagacatgcagcaactgtgggtttaccatcaccagcgccgactacgacagggtgctggagaagctgaagaagacagcaacaggctggatgaccacaattaacggcaaggagctgaaggtggagggccagattacctactacaacagatacaagagacagaacgtagtcaaggacctgtccgtcgagctggatagactgagcgaagaatctgtgaacaacgacatctcctcctggacaaagggcagaagcggagaagctctgagcctcctgaagaaaagattctcccatagacccgtgcaggagaagttcgtgtgcctgaactgcggcttcgagacacacgcagccgagcaagccgccctgaacatcgccagatcctggctgttcctgcggagccaggagtacaagaaataccagacaaacaagacaaccggcaacaccgataagagagccttcgtcgagacctggcagtccttttaccggaagaagcttaaggaggtgtggaaacctgccgtgcggtctggcggatctggcggaggctccacaagcagccacggccccctgagcttcgaggacgtggccatcgccttcaccaaggaggagtggcagcagctggaccccgcccagaggaccctgtacagggacgtgatgctggagaacttcagccacctggtgagcctgggccaccccgtgagcaagcccgacatcatcagcaggctggagcagggcgaggagccctggatcatcaagagggacatcagcgactggatctgccccgagagggagaccaggaccagccccaagaaaaagagaaaagtctaagctgccttctgcggggcttgccttctggccatgcccttcttctctcccttgcacctgtacctcttggtctttgaataaagcctgagtaggaaggctagcaaaaaaaaaaaaaaaaaaaaaaaaaaaaaaaaaaaaaaaaaaaaaaaaaaaaaaaaaaaaaaaaaaaaaaaaaaaaaaaa

SEQ ID NO: 6743 - RNA, 5797 nt, synthetic construct
  source 1..5797: mol_type = other RNA
aggaaataagagagaaaagaagagtaagaagaaatataagagccaccatggcccctaagaagaagcgtaaagtgagccggatggaacgcctcgtctacgaggtgcggcagaagtgcagaaacatcgaggacatctgcatctcctgcggatctctgaacgtgaccctggagcacccactgttcatcggcggcatgtgccagaactgtaaaaactgttttctggagtgtgcctatcaatacgacgatgacggctaccagagctactgcaccatctgttgcggcggaagagaggtgctgatgtgtggaaataacaactgctgccggtgcttctgcgtggaatgcgtggacctgctggtgggccccggcgccgcccaggccgctattaaggaagatccttggaactgctacatgtgcggccacaagggcacatacggcctgctgagacggagagaggactggcctagcagactgcagatgttcttcgccaataaccacgaccaggagttcgacccccctaaggtgtaccctcccgtccccgccgagaagagaaagcccatccgggtcctgagcctgttcgatggcatcgccaccggtctgctggtgctgaaggacctgggcatccaggtggataggtacattgcctccgaggtgtgcgaggactccatcaccgtgggaatggtgcgtcatcagggcaagatcatgtacgtgggcgacgtgcggagcgtgacacagaagcatatccaggagtggggccctttcgacctggtgatcggcggcagcccttgcaatgacctgagcatcgtgaacccagcccggaagggcctgtacgagggaaccggcagactgttcttcgagttttacagactgctgcacgacgcccggcctaaggaaggcgacgaccggcccttcttttggctgttcgagaatgtggtggccatgggagtcagcgacaagcgggatattagccggttcctggagagcaaccccgtgatgatcgatgccaaggaagtgagcgccgcccaccgggccagatacttctggggcaatctgcctggcatgaacagacccctggccagcaccgtgaacgacaagctggagctgcaggagtgcctggagcacggccggatcgccaagttcagcaaggtgagaaccatcaccacccgaagcaacagcatcaaacaaggcaaggaccagcactttcctgtgttcatgaacgagaaggaggacatcctgtggtgtaccgagatggagagagtgttcgggttcccagtccactacacagatgtcagcaacatgtctagactggccagacagagactgctgggaagaagctggtccgtccctgtgatcagacacctgttcgcccctctgaaggagtacttcgcctgcgtgagcagcggcaacagcaacgccaacagccggggccccagcttctctagcggcctggtgccactgtccctgagagggagccacatgggccccatggagatctacaaaaccgtgagcgcctggaagcggcagcctgtgcgcgtgctgagcctgtttcggaatatcgataaagtcctgaaaagcctgggattcctggagagcggctctggctccggcggtggcaccctgaagtacgtggaggatgtgacaaacgtggtcagacgggatgtggagaagtggggccccttcgatctggtgtacggcagcacccaacccctgggcagctcttgtgaccggtgccctggctggtacatgtttcagttccaccggatcctgcagtacgccctgccgagacaggagtcccagcggccattcttttggattttcatggacaacttgctgctgaccgaggatgaccaggaaactaccactcggttcctgcagaccgaagccgtgaccctgcaggacgtgagaggccgggactaccagaacgccatgcgggtgtggtccaacatccctggactgaaaagcaagcacgcacctctgacccctaaagaagaggagtacctgcaggcccaggtgcggagcagaagcaagctggacgcccctaaggtggatctgctggtgaagaattgcctcctgcccctgagagagtacttcaagtatttcagccagaatagtctgcccctgggcggcccaagcagcggcgcccctcctcccagcggcggcagcccagccggctccccaacctctaccgaggagggcacctctgagtccgccacccccgagagcggccctggcacctccaccgagcccagcgagggcagcgcacccggcagccctgccggcagccccacctccacagaggagggaaccagcaccgagcccagcgaaggcagcgccccaggcaccagcaccgagcctagtgagggcggctctggcggcggcagcgcccaggagattaaacggatcaacaagatcagaagaagacttgtgaaagacagcaacaccaagaaggccggcaagacaggccccatgaaaaccctgctggttagagtgatgacacccgatctgagagagcggctggaaaacctgagaaagaagcctgaaaatatcccccagcccatcagcaatacatctagagccaacctgaataagctgctgaccgattacaccgaaatgaagaaggcgatcctgcatgtgtactgggaagagttccagaaggaccctgtgggcctgatgagccgggtggcccagcctgccagcaagaagatcgatcagaacaagctgaaacctgagatggacgagaagggcaacctgaccaccgccggctttgcctgctctcagtgtggccagcccctgttcgtgtacaagctggagcaggtgtctgagaagggcaaggcttacaccaactacttcggacggtgcaatgtggccgagcacgaaaagctgatcctgctggcccagctgaagcccgagaaggatagcgacgaagccgtgacatatagcctgggaaagtttgggcagagggccctggatttctacagcattcatgtgaccaaggagtccacccaccccgtgaagcccctggcccagatcgccggaaacagatacgcctccggacctgtgggaaaggccctgagcgacgcatgtatgggcacaatcgcctccttcctgtctaagtaccaggacatcatcatcgaacaccagaaggtggtgaagggcaaccagaagagactggagagcctgcgggagctggccggcaaggaaaacctggaataccctagcgtgaccctgccacctcagcctcacaccaaggagggcgttgatgcctacaacgaagtgatcgcccgggtgcgaatgtgggtgaacctgaacctgtggcagaagctgaagctaagcagagatgatgccaagcctctgctgagactgaagggattcccttcctttcctctggtcgagagacaggccaacgaagtggactggtgggacatggtgtgtaacgtgaagaagctgatcaacgagaaaaaggaggatggcaaggtgttttggcagaatctggctggctacaagagacaggaagccctgagaccatacctgagcagcgaggaagatcggaagaagggaaagaaattcgctcggtaccagctgggcgacctgctgctgcacctggaaaagaagcacggcgaggactggggaaaggtgtacgacgaggcctgggagcggattgacaagaaagtggaaggcctgagcaagcacatcaagctggaagaggaacggagaagcgaggacgcccagagcaaggccgccctgaccgactggctgcgggctaaggccagcttcgtgatcgagggcctgaaggaggccgacaaggacgagttctgcagatgcgagctgaagctgcagaagtggtacggggacctgcggggaaagcccttcgccatcgaagccgagaacagcatcctggacatcagcggcttcagcaagcagtacaactgtgccttcatctggcagaaggacggcgtgaagaagctgaacctgtacctgatcatcaactacttcaagggcggcaagctgcggttcaagaagatcaaacctgaagccttcgaagccaacagattctacaccgtgatcaacaaaaagagcggcgagatcgtgcccatggaggtgaacttcaacttcgacgaccccaacctgatcatcctgcctctggcctttggcaagagacagggcagagaattcatctggaacgacctgctgtccctggaaaccggcagcctgaagctggccaacggaagagtgatcgagaagacactgtacaacagaagaacccggcaggatgagcctgccctgttcgtggccctgaccttcgagcggcgggaggtcctggactcctccaatatcaaaccaatgaacctgatcggcgtggcaagaggcgaaaacatccccgccgtgatcgccctgaccgaccccgagggctgcccactgagccggtttaaggatagcctgggaaacccaacccacatcctgagaatcggcgagagctataaggagaagcagcggaccatccaggccaagaaggaggtggagcagcggagagccggcggctacagccggaagtacgccagcaaagccaagaatctggcagacgatatggtgagaaacaccgctagagatctgctgtactacgccgtgacccaggatgccatgctgatcttcgccaacctgagccggggcttcggccggcagggcaagcggaccttcatggccgagagacagtacacacggatggaggactggctgaccgccaagctggcctacgagggcctgagcaagacctacctgtccaagacactggcccagtacacctccaagacatgcagcaactgtgggtttaccatcaccagcgccgactacgacagggtgctggagaagctgaagaagacagcaacaggctggatgaccacaattaacggcaaggagctgaaggtggagggccagattacctactacaacagatacaagagacagaacgtagtcaaggacctgtccgtcgagctggatagactgagcgaagaatctgtgaacaacgacatctcctcctggacaaagggcagaagcggagaagctctgagcctcctgaagaaaagattctcccatagacccgtgcaggagaagttcgtgtgcctgaactgcggcttcgagacacacgcagccgagcaagccgccctgaacatcgccagatcctggctgttcctgcggagccaggagtacaagaaataccagacaaacaagacaaccggcaacaccgataagagagccttcgtcgagacctggcagtccttttaccggaagaagcttaaggaggtgtggaaacctgccgtgcggtctggcggatctggcggaggctccacaagccccgccgacagggacgccgtgacctacgacgacgtgcacatcggcttcacccaggaggagtgggtgctgctgaaccccagccagaagagcctgtacaaggacgtgatgctggacacctacaggaacctgaccgccatcggctacaggtggcaggaccacaacatcgaggagcactgcgagaacagcaggaggcacaggaggaagttcagctgcaccaccaagccctacgagagcctgcagaacaccagccccaagaaaaagagaaaagtctaagctgccttctgcggggcttgccttctggccatgcccttcttctctcccttgcacctgtacctcttggtctttgaataaagcctgagtaggaaggctagcaaaaaaaaaaaaaaaaaaaaaaaaaaaaaaaaaaaaaaaaaaaaaaaaaaaaaaaaaaaaaaaaaaaaaaaaaaaaaaaa

SEQ ID NO: 6744 - RNA, 5797 nt, synthetic construct
  source 1..5797: mol_type = other RNA
aggaaataagagagaaaagaagagtaagaagaaatataagagccaccatggcccctaagaagaagcgtaaagtgagccggatggaacgcctcgtctacgaggtgcggcagaagtgcagaaacatcgaggacatctgcatctcctgcggatctctgaacgtgaccctggagcacccactgttcatcggcggcatgtgccagaactgtaaaaactgttttctggagtgtgcctatcaatacgacgatgacggctaccagagctactgcaccatctgttgcggcggaagagaggtgctgatgtgtggaaataacaactgctgccggtgcttctgcgtggaatgcgtggacctgctggtgggccccggcgccgcccaggccgctattaaggaagatccttggaactgctacatgtgcggccacaagggcacatacggcctgctgagacggagagaggactggcctagcagactgcagatgttcttcgccaataaccacgaccaggagttcgacccccctaaggtgtaccctcccgtccccgccgagaagagaaagcccatccgggtcctgagcctgttcgatggcatcgccaccggtctgctggtgctgaaggacctgggcatccaggtggataggtacattgcctccgaggtgtgcgaggactccatcaccgtgggaatggtgcgtcatcagggcaagatcatgtacgtgggcgacgtgcggagcgtgacacagaagcatatccaggagtggggccctttcgacctggtgatcggcggcagcccttgcaatgacctgagcatcgtgaacccagcccggaagggcctgtacgagggaaccggcagactgttcttcgagttttacagactgctgcacgacgcccggcctaaggaaggcgacgaccggcccttcttttggctgttcgagaatgtggtggccatgggagtcagcgacaagcgggatattagccggttcctggagagcaaccccgtgatgatcgatgccaaggaagtgagcgccgcccaccgggccagatacttctggggcaatctgcctggcatgaacagacccctggccagcaccgtgaacgacaagctggagctgcaggagtgcctggagcacggccggatcgccaagttcagcaaggtgagaaccatcaccacccgaagcaacagcatcaaacaaggcaaggaccagcactttcctgtgttcatgaacgagaaggaggacatcctgtggtgtaccgagatggagagagtgttcgggttcccagtccactacacagatgtcagcaacatgtctagactggccagacagagactgctgggaagaagctggtccgtccctgtgatcagacacctgttcgcccctctgaaggagtacttcgcctgcgtgagcagcggcaacagcaacgccaacagccggggccccagcttctctagcggcctggtgccactgtccctgagagggagccacatgggccccatggagatctacaaaaccgtgagcgcctggaagcggcagcctgtgcgcgtgctgagcctgtttcggaatatcgataaagtcctgaaaagcctgggattcctggagagcggctctggctccggcggtggcaccctgaagtacgtggaggatgtgacaaacgtggtcagacgggatgtggagaagtggggccccttcgatctggtgtacggcagcacccaacccctgggcagctcttgtgaccggtgccctggctggtacatgtttcagttccaccggatcctgcagtacgccctgccgagacaggagtcccagcggccattcttttggattttcatggacaacttgctgctgaccgaggatgaccaggaaactaccactcggttcctgcagaccgaagccgtgaccctgcaggacgtgagaggccgggactaccagaacgccatgcgggtgtggtccaacatccctggactgaaaagcaagcacgcacctctgacccctaaagaagaggagtacctgcaggcccaggtgcggagcagaagcaagctggacgcccctaaggtggatctgctggtgaagaattgcctcctgcccctgagagagtacttcaagtatttcagccagaatagtctgcccctgggcggcccaagcagcggcgcccctcctcccagcggcggcagcccagccggctccccaacctctaccgaggagggcacctctgagtccgccacccccgagagcggccctggcacctccaccgagcccagcgagggcagcgcacccggcagccctgccggcagccccacctccacagaggagggaaccagcaccgagcccagcgaaggcagcgccccaggcaccagcaccgagcctagtgagggcggctctggcggcggcagcgcccaggagattaaacggatcaacaagatcagaagaagacttgtgaaagacagcaacaccaagaaggccggcaagacaggccccatgaaaaccctgctggttagagtgatgacacccgatctgagagagcggctggaaaacctgagaaagaagcctgaaaatatcccccagcccatcagcaatacatctagagccaacctgaataagctgctgaccgattacaccgaaatgaagaaggcgatcctgcatgtgtactgggaagagttccagaaggaccctgtgggcctgatgagccgggtggcccagcctgccagcaagaagatcgatcagaacaagctgaaacctgagatggacgagaagggcaacctgaccaccgccggctttgcctgctctcagtgtggccagcccctgttcgtgtacaagctggagcaggtgtctgagaagggcaaggcttacaccaactacttcggacggtgcaatgtggccgagcacgaaaagctgatcctgctggcccagctgaagcccgagaaggatagcgacgaagccgtgacatatagcctgggaaagtttgggcagagggccctggatttctacagcattcatgtgaccaaggagtccacccaccccgtgaagcccctggcccagatcgccggaaacagatacgcctccggacctgtgggaaaggccctgagcgacgcatgtatgggcacaatcgcctccttcctgtctaagtaccaggacatcatcatcgaacaccagaaggtggtgaagggcaaccagaagagactggagagcctgcgggagctggccggcaaggaaaacctggaataccctagcgtgaccctgccacctcagcctcacaccaaggagggcgttgatgcctacaacgaagtgatcgcccgggtgcgaatgtgggtgaacctgaacctgtggcagaagctgaagctaagcagagatgatgccaagcctctgctgagactgaagggattcccttcctttcctctggtcgagagacaggccaacgaagtggactggtgggacatggtgtgtaacgtgaagaagctgatcaacgagaaaaaggaggatggcaaggtgttttggcagaatctggctggctacaagagacaggaagccctgagaccatacctgagcagcgaggaagatcggaagaagggaaagaaattcgctcggtaccagctgggcgacctgctgctgcacctggaaaagaagcacggcgaggactggggaaaggtgtacgacgaggcctgggagcggattgacaagaaagtggaaggcctgagcaagcacatcaagctggaagaggaacggagaagcgaggacgcccagagcaaggccgccctgaccgactggctgcgggctaaggccagcttcgtgatcgagggcctgaaggaggccgacaaggacgagttctgcagatgcgagctgaagctgcagaagtggtacggggacctgcggggaaagcccttcgccatcgaagccgagaacagcatcctggacatcagcggcttcagcaagcagtacaactgtgccttcatctggcagaaggacggcgtgaagaagctgaacctgtacctgatcatcaactacttcaagggcggcaagctgcggttcaagaagatcaaacctgaagccttcgaagccaacagattctacaccgtgatcaacaaaaagagcggcgagatcgtgcccatggaggtgaacttcaacttcgacgaccccaacctgatcatcctgcctctggcctttggcaagagacagggcagagaattcatctggaacgacctgctgtccctggaaaccggcagcctgaagctggccaacggaagagtgatcgagaagacactgtacaacagaagaacccggcaggatgagcctgccctgttcgtggccctgaccttcgagcggcgggaggtcctggactcctccaatatcaaaccaatgaacctgatcggcgtggcaagaggcgaaaacatccccgccgtgatcgccctgaccgaccccgagggctgcccactgagccggtttaaggatagcctgggaaacccaacccacatcctgagaatcggcgagagctataaggagaagcagcggaccatccaggccaagaaggaggtggagcagcggagagccggcggctacagccggaagtacgccagcaaagccaagaatctggcagacgatatggtgagaaacaccgctagagatctgctgtactacgccgtgacccaggatgccatgctgatcttcgccaacctgagccggggcttcggccggcagggcaagcggaccttcatggccgagagacagtacacacggatggaggactggctgaccgccaagctggcctacgagggcctgagcaagacctacctgtccaagacactggcccagtacacctccaagacatgcagcaactgtgggtttaccatcaccagcgccgactacgacagggtgctggagaagctgaagaagacagcaacaggctggatgaccacaattaacggcaaggagctgaaggtggagggccagattacctactacaacagatacaagagacagaacgtagtcaaggacctgtccgtcgagctggatagactgagcgaagaatctgtgaacaacgacatctcctcctggacaaagggcagaagcggagaagctctgagcctcctgaagaaaagattctcccatagacccgtgcaggagaagttcgtgtgcctgaactgcggcttcgagacacacgcagccgagcaagccgccctgaacatcgccagatcctggctgttcctgcggagccaggagtacaagaaataccagacaaacaagacaaccggcaacaccgataagagagccttcgtcgagacctggcagtccttttaccggaagaagcttaaggaggtgtggaaacctgccgtgcggtctggcggatctggcggaggctccacaagcagccaggagctgctgaccttcaaggacatcagcgtggacttcacccaggaggagtggggccagctgcccctggcccacaggaacctgtacagggaggtgatgctggagaactacggcaacctggtgagcgtggccggctaccagctgagcaagcccagcgtgatcagccagctggagaagggccaggagccctggatgaccgagaaggaggtgcccgaggaccccagcagcgacctgaggaccaccagccccaagaaaaagagaaaagtctaagctgccttctgcggggcttgccttctggccatgcccttcttctctcccttgcacctgtacctcttggtctttgaataaagcctgagtaggaaggctagcaaaaaaaaaaaaaaaaaaaaaaaaaaaaaaaaaaaaaaaaaaaaaaaaaaaaaaaaaaaaaaaaaaaaaaaaaaaaaaaa

SEQ ID NO: 6745 - RNA, 5797 nt, synthetic construct
  source 1..5797: mol_type = other RNA
aggaaataagagagaaaagaagagtaagaagaaatataagagccaccatggcccctaagaagaagcgtaaagtgagccggatggaacgcctcgtctacgaggtgcggcagaagtgcagaaacatcgaggacatctgcatctcctgcggatctctgaacgtgaccctggagcacccactgttcatcggcggcatgtgccagaactgtaaaaactgttttctggagtgtgcctatcaatacgacgatgacggctaccagagctactgcaccatctgttgcggcggaagagaggtgctgatgtgtggaaataacaactgctgccggtgcttctgcgtggaatgcgtggacctgctggtgggccccggcgccgcccaggccgctattaaggaagatccttggaactgctacatgtgcggccacaagggcacatacggcctgctgagacggagagaggactggcctagcagactgcagatgttcttcgccaataaccacgaccaggagttcgacccccctaaggtgtaccctcccgtccccgccgagaagagaaagcccatccgggtcctgagcctgttcgatggcatcgccaccggtctgctggtgctgaaggacctgggcatccaggtggataggtacattgcctccgaggtgtgcgaggactccatcaccgtgggaatggtgcgtcatcagggcaagatcatgtacgtgggcgacgtgcggagcgtgacacagaagcatatccaggagtggggccctttcgacctggtgatcggcggcagcccttgcaatgacctgagcatcgtgaacccagcccggaagggcctgtacgagggaaccggcagactgttcttcgagttttacagactgctgcacgacgcccggcctaaggaaggcgacgaccggcccttcttttggctgttcgagaatgtggtggccatgggagtcagcgacaagcgggatattagccggttcctggagagcaaccccgtgatgatcgatgccaaggaagtgagcgccgcccaccgggccagatacttctggggcaatctgcctggcatgaacagacccctggccagcaccgtgaacgacaagctggagctgcaggagtgcctggagcacggccggatcgccaagttcagcaaggtgagaaccatcaccacccgaagcaacagcatcaaacaaggcaaggaccagcactttcctgtgttcatgaacgagaaggaggacatcctgtggtgtaccgagatggagagagtgttcgggttcccagtccactacacagatgtcagcaacatgtctagactggccagacagagactgctgggaagaagctggtccgtccctgtgatcagacacctgttcgcccctctgaaggagtacttcgcctgcgtgagcagcggcaacagcaacgccaacagccggggccccagcttctctagcggcctggtgccactgtccctgagagggagccacatgggccccatggagatctacaaaaccgtgagcgcctggaagcggcagcctgtgcgcgtgctgagcctgtttcggaatatcgataaagtcctgaaaagcctgggattcctggagagcggctctggctccggcggtggcaccctgaagtacgtggaggatgtgacaaacgtggtcagacgggatgtggagaagtggggccccttcgatctggtgtacggcagcacccaacccctgggcagctcttgtgaccggtgccctggctggtacatgtttcagttccaccggatcctgcagtacgccctgccgagacaggagtcccagcggccattcttttggattttcatggacaacttgctgctgaccgaggatgaccaggaaactaccactcggttcctgcagaccgaagccgtgaccctgcaggacgtgagaggccgggactaccagaacgccatgcgggtgtggtccaacatccctggactgaaaagcaagcacgcacctctgacccctaaagaagaggagtacctgcaggcccaggtgcggagcagaagcaagctggacgcccctaaggtggatctgctggtgaagaattgcctcctgcccctgagagagtacttcaagtatttcagccagaatagtctgcccctgggcggcccaagcagcggcgcccctcctcccagcggcggcagcccagccggctccccaacctctaccgaggagggcacctctgagtccgccacccccgagagcggccctggcacctccaccgagcccagcgagggcagcgcacccggcagccctgccggcagccccacctccacagaggagggaaccagcaccgagcccagcgaaggcagcgccccaggcaccagcaccgagcctagtgagggcggctctggcggcggcagcgcccaggagattaaacggatcaacaagatcagaagaagacttgtgaaagacagcaacaccaagaaggccggcaagacaggccccatgaaaaccctgctggttagagtgatgacacccgatctgagagagcggctggaaaacctgagaaagaagcctgaaaatatcccccagcccatcagcaatacatctagagccaacctgaataagctgctgaccgattacaccgaaatgaagaaggcgatcctgcatgtgtactgggaagagttccagaaggaccctgtgggcctgatgagccgggtggcccagcctgccagcaagaagatcgatcagaacaagctgaaacctgagatggacgagaagggcaacctgaccaccgccggctttgcctgctctcagtgtggccagcccctgttcgtgtacaagctggagcaggtgtctgagaagggcaaggcttacaccaactacttcggacggtgcaatgtggccgagcacgaaaagctgatcctgctggcccagctgaagcccgagaaggatagcgacgaagccgtgacatatagcctgggaaagtttgggcagagggccctggatttctacagcattcatgtgaccaaggagtccacccaccccgtgaagcccctggcccagatcgccggaaacagatacgcctccggacctgtgggaaaggccctgagcgacgcatgtatgggcacaatcgcctccttcctgtctaagtaccaggacatcatcatcgaacaccagaaggtggtgaagggcaaccagaagagactggagagcctgcgggagctggccggcaaggaaaacctggaataccctagcgtgaccctgccacctcagcctcacaccaaggagggcgttgatgcctacaacgaagtgatcgcccgggtgcgaatgtgggtgaacctgaacctgtggcagaagctgaagctaagcagagatgatgccaagcctctgctgagactgaagggattcccttcctttcctctggtcgagagacaggccaacgaagtggactggtgggacatggtgtgtaacgtgaagaagctgatcaacgagaaaaaggaggatggcaaggtgttttggcagaatctggctggctacaagagacaggaagccctgagaccatacctgagcagcgaggaagatcggaagaagggaaagaaattcgctcggtaccagctgggcgacctgctgctgcacctggaaaagaagcacggcgaggactggggaaaggtgtacgacgaggcctgggagcggattgacaagaaagtggaaggcctgagcaagcacatcaagctggaagaggaacggagaagcgaggacgcccagagcaaggccgccctgaccgactggctgcgggctaaggccagcttcgtgatcgagggcctgaaggaggccgacaaggacgagttctgcagatgcgagctgaagctgcagaagtggtacggggacctgcggggaaagcccttcgccatcgaagccgagaacagcatcctggacatcagcggcttcagcaagcagtacaactgtgccttcatctggcagaaggacggcgtgaagaagctgaacctgtacctgatcatcaactacttcaagggcggcaagctgcggttcaagaagatcaaacctgaagccttcgaagccaacagattctacaccgtgatcaacaaaaagagcggcgagatcgtgcccatggaggtgaacttcaacttcgacgaccccaacctgatcatcctgcctctggcctttggcaagagacagggcagagaattcatctggaacgacctgctgtccctggaaaccggcagcctgaagctggccaacggaagagtgatcgagaagacactgtacaacagaagaacccggcaggatgagcctgccctgttcgtggccctgaccttcgagcggcgggaggtcctggactcctccaatatcaaaccaatgaacctgatcggcgtggcaagaggcgaaaacatccccgccgtgatcgccctgaccgaccccgagggctgcccactgagccggtttaaggatagcctgggaaacccaacccacatcctgagaatcggcgagagctataaggagaagcagcggaccatccaggccaagaaggaggtggagcagcggagagccggcggctacagccggaagtacgccagcaaagccaagaatctggcagacgatatggtgagaaacaccgctagagatctgctgtactacgccgtgacccaggatgccatgctgatcttcgccaacctgagccggggcttcggccggcagggcaagcggaccttcatggccgagagacagtacacacggatggaggactggctgaccgccaagctggcctacgagggcctgagcaagacctacctgtccaagacactggcccagtacacctccaagacatgcagcaactgtgggtttaccatcaccagcgccgactacgacagggtgctggagaagctgaagaagacagcaacaggctggatgaccacaattaacggcaaggagctgaaggtggagggccagattacctactacaacagatacaagagacagaacgtagtcaaggacctgtccgtcgagctggatagactgagcgaagaatctgtgaacaacgacatctcctcctggacaaagggcagaagcggagaagctctgagcctcctgaagaaaagattctcccatagacccgtgcaggagaagttcgtgtgcctgaactgcggcttcgagacacacgcagccgagcaagccgccctgaacatcgccagatcctggctgttcctgcggagccaggagtacaagaaataccagacaaacaagacaaccggcaacaccgataagagagccttcgtcgagacctggcagtccttttaccggaagaagcttaaggaggtgtggaaacctgccgtgcggtctggcggatctggcggaggctccacaagcgcccaggagctggtgaccttccaggacgtggccgtggacttcaccgaggaggagtggggcctgctggaccacagccagaaggagctgtacaaggaggtgatgctggagaacgcccagaacctgctgagcctgggcctgcccgtgaccagggaggacctgatcagcttcttccagaagggcgaggccccctggatcctggagcccaagggcccctggaacttctgccccgacgccgtgaccaggaccagccccaagaaaaagagaaaagtctaagctgccttctgcggggcttgccttctggccatgcccttcttctctcccttgcacctgtacctcttggtctttgaataaagcctgagtaggaaggctagcaaaaaaaaaaaaaaaaaaaaaaaaaaaaaaaaaaaaaaaaaaaaaaaaaaaaaaaaaaaaaaaaaaaaaaaaaaaaaaaa

SEQ ID NO: 6746 - RNA, 5797 nt, synthetic construct
  source 1..5797: mol_type = other RNA
aggaaataagagagaaaagaagagtaagaagaaatataagagccaccatggcccctaagaagaagcgtaaagtgagccggatggaacgcctcgtctacgaggtgcggcagaagtgcagaaacatcgaggacatctgcatctcctgcggatctctgaacgtgaccctggagcacccactgttcatcggcggcatgtgccagaactgtaaaaactgttttctggagtgtgcctatcaatacgacgatgacggctaccagagctactgcaccatctgttgcggcggaagagaggtgctgatgtgtggaaataacaactgctgccggtgcttctgcgtggaatgcgtggacctgctggtgggccccggcgccgcccaggccgctattaaggaagatccttggaactgctacatgtgcggccacaagggcacatacggcctgctgagacggagagaggactggcctagcagactgcagatgttcttcgccaataaccacgaccaggagttcgacccccctaaggtgtaccctcccgtccccgccgagaagagaaagcccatccgggtcctgagcctgttcgatggcatcgccaccggtctgctggtgctgaaggacctgggcatccaggtggataggtacattgcctccgaggtgtgcgaggactccatcaccgtgggaatggtgcgtcatcagggcaagatcatgtacgtgggcgacgtgcggagcgtgacacagaagcatatccaggagtggggccctttcgacctggtgatcggcggcagcccttgcaatgacctgagcatcgtgaacccagcccggaagggcctgtacgagggaaccggcagactgttcttcgagttttacagactgctgcacgacgcccggcctaaggaaggcgacgaccggcccttcttttggctgttcgagaatgtggtggccatgggagtcagcgacaagcgggatattagccggttcctggagagcaaccccgtgatgatcgatgccaaggaagtgagcgccgcccaccgggccagatacttctggggcaatctgcctggcatgaacagacccctggccagcaccgtgaacgacaagctggagctgcaggagtgcctggagcacggccggatcgccaagttcagcaaggtgagaaccatcaccacccgaagcaacagcatcaaacaaggcaaggaccagcactttcctgtgttcatgaacgagaaggaggacatcctgtggtgtaccgagatggagagagtgttcgggttcccagtccactacacagatgtcagcaacatgtctagactggccagacagagactgctgggaagaagctggtccgtccctgtgatcagacacctgttcgcccctctgaaggagtacttcgcctgcgtgagcagcggcaacagcaacgccaacagccggggccccagcttctctagcggcctggtgccactgtccctgagagggagccacatgggccccatggagatctacaaaaccgtgagcgcctggaagcggcagcctgtgcgcgtgctgagcctgtttcggaatatcgataaagtcctgaaaagcctgggattcctggagagcggctctggctccggcggtggcaccctgaagtacgtggaggatgtgacaaacgtggtcagacgggatgtggagaagtggggccccttcgatctggtgtacggcagcacccaacccctgggcagctcttgtgaccggtgccctggctggtacatgtttcagttccaccggatcctgcagtacgccctgccgagacaggagtcccagcggccattcttttggattttcatggacaacttgctgctgaccgaggatgaccaggaaactaccactcggttcctgcagaccgaagccgtgaccctgcaggacgtgagaggccgggactaccagaacgccatgcgggtgtggtccaacatccctggactgaaaagcaagcacgcacctctgacccctaaagaagaggagtacctgcaggcccaggtgcggagcagaagcaagctggacgcccctaaggtggatctgctggtgaagaattgcctcctgcccctgagagagtacttcaagtatttcagccagaatagtctgcccctgggcggcccaagcagcggcgcccctcctcccagcggcggcagcccagccggctccccaacctctaccgaggagggcacctctgagtccgccacccccgagagcggccctggcacctccaccgagcccagcgagggcagcgcacccggcagccctgccggcagccccacctccacagaggagggaaccagcaccgagcccagcgaaggcagcgccccaggcaccagcaccgagcctagtgagggcggctctggcggcggcagcgcccaggagattaaacggatcaacaagatcagaagaagacttgtgaaagacagcaacaccaagaaggccggcaagacaggccccatgaaaaccctgctggttagagtgatgacacccgatctgagagagcggctggaaaacctgagaaagaagcctgaaaatatcccccagcccatcagcaatacatctagagccaacctgaataagctgctgaccgattacaccgaaatgaagaaggcgatcctgcatgtgtactgggaagagttccagaaggaccctgtgggcctgatgagccgggtggcccagcctgccagcaagaagatcgatcagaacaagctgaaacctgagatggacgagaagggcaacctgaccaccgccggctttgcctgctctcagtgtggccagcccctgttcgtgtacaagctggagcaggtgtctgagaagggcaaggcttacaccaactacttcggacggtgcaatgtggccgagcacgaaaagctgatcctgctggcccagctgaagcccgagaaggatagcgacgaagccgtgacatatagcctgggaaagtttgggcagagggccctggatttctacagcattcatgtgaccaaggagtccacccaccccgtgaagcccctggcccagatcgccggaaacagatacgcctccggacctgtgggaaaggccctgagcgacgcatgtatgggcacaatcgcctccttcctgtctaagtaccaggacatcatcatcgaacaccagaaggtggtgaagggcaaccagaagagactggagagcctgcgggagctggccggcaaggaaaacctggaataccctagcgtgaccctgccacctcagcctcacaccaaggagggcgttgatgcctacaacgaagtgatcgcccgggtgcgaatgtgggtgaacctgaacctgtggcagaagctgaagctaagcagagatgatgccaagcctctgctgagactgaagggattcccttcctttcctctggtcgagagacaggccaacgaagtggactggtgggacatggtgtgtaacgtgaagaagctgatcaacgagaaaaaggaggatggcaaggtgttttggcagaatctggctggctacaagagacaggaagccctgagaccatacctgagcagcgaggaagatcggaagaagggaaagaaattcgctcggtaccagctgggcgacctgctgctgcacctggaaaagaagcacggcgaggactggggaaaggtgtacgacgaggcctgggagcggattgacaagaaagtggaaggcctgagcaagcacatcaagctggaagaggaacggagaagcgaggacgcccagagcaaggccgccctgaccgactggctgcgggctaaggccagcttcgtgatcgagggcctgaaggaggccgacaaggacgagttctgcagatgcgagctgaagctgcagaagtggtacggggacctgcggggaaagcccttcgccatcgaagccgagaacagcatcctggacatcagcggcttcagcaagcagtacaactgtgccttcatctggcagaaggacggcgtgaagaagctgaacctgtacctgatcatcaactacttcaagggcggcaagctgcggttcaagaagatcaaacctgaagccttcgaagccaacagattctacaccgtgatcaacaaaaagagcggcgagatcgtgcccatggaggtgaacttcaacttcgacgaccccaacctgatcatcctgcctctggcctttggcaagagacagggcagagaattcatctggaacgacctgctgtccctggaaaccggcagcctgaagctggccaacggaagagtgatcgagaagacactgtacaacagaagaacccggcaggatgagcctgccctgttcgtggccctgaccttcgagcggcgggaggtcctggactcctccaatatcaaaccaatgaacctgatcggcgtggcaagaggcgaaaacatccccgccgtgatcgccctgaccgaccccgagggctgcccactgagccggtttaaggatagcctgggaaacccaacccacatcctgagaatcggcgagagctataaggagaagcagcggaccatccaggccaagaaggaggtggagcagcggagagccggcggctacagccggaagtacgccagcaaagccaagaatctggcagacgatatggtgagaaacaccgctagagatctgctgtactacgccgtgacccaggatgccatgctgatcttcgccaacctgagccggggcttcggccggcagggcaagcggaccttcatggccgagagacagtacacacggatggaggactggctgaccgccaagctggcctacgagggcctgagcaagacctacctgtccaagacactggcccagtacacctccaagacatgcagcaactgtgggtttaccatcaccagcgccgactacgacagggtgctggagaagctgaagaagacagcaacaggctggatgaccacaattaacggcaaggagctgaaggtggagggccagattacctactacaacagatacaagagacagaacgtagtcaaggacctgtccgtcgagctggatagactgagcgaagaatctgtgaacaacgacatctcctcctggacaaagggcagaagcggagaagctctgagcctcctgaagaaaagattctcccatagacccgtgcaggagaagttcgtgtgcctgaactgcggcttcgagacacacgcagccgagcaagccgccctgaacatcgccagatcctggctgttcctgcggagccaggagtacaagaaataccagacaaacaagacaaccggcaacaccgataagagagccttcgtcgagacctggcagtccttttaccggaagaagcttaaggaggtgtggaaacctgccgtgcggtctggcggatctggcggaggctccacaagcgccctgaggagcgtgatgttcagcgacgtgagcatcgacttcagccccgaggagtgggagtacctggacctggagcagaaggacctgtacagggacgtgatgctggagaactacagcaacctggtgagcctgggctgcttcatcagcaagcccgacgtgatcagcagcctggagcagggcaaggagccctggaaggtggtgaggaagggcaggaggcagtaccccgacctggagaccaagtacaccagccccaagaaaaagagaaaagtctaagctgccttctgcggggcttgccttctggccatgcccttcttctctcccttgcacctgtacctcttggtctttgaataaagcctgagtaggaaggctagcaaaaaaaaaaaaaaaaaaaaaaaaaaaaaaaaaaaaaaaaaaaaaaaaaaaaaaaaaaaaaaaaaaaaaaaaaaaaaaaa

SEQ ID NO: 6747 - RNA, 5797 nt, synthetic construct
  source 1..5797: mol_type = other RNA
aggaaataagagagaaaagaagagtaagaagaaatataagagccaccatggcccctaagaagaagcgtaaagtgagccggatggaacgcctcgtctacgaggtgcggcagaagtgcagaaacatcgaggacatctgcatctcctgcggatctctgaacgtgaccctggagcacccactgttcatcggcggcatgtgccagaactgtaaaaactgttttctggagtgtgcctatcaatacgacgatgacggctaccagagctactgcaccatctgttgcggcggaagagaggtgctgatgtgtggaaataacaactgctgccggtgcttctgcgtggaatgcgtggacctgctggtgggccccggcgccgcccaggccgctattaaggaagatccttggaactgctacatgtgcggccacaagggcacatacggcctgctgagacggagagaggactggcctagcagactgcagatgttcttcgccaataaccacgaccaggagttcgacccccctaaggtgtaccctcccgtccccgccgagaagagaaagcccatccgggtcctgagcctgttcgatggcatcgccaccggtctgctggtgctgaaggacctgggcatccaggtggataggtacattgcctccgaggtgtgcgaggactccatcaccgtgggaatggtgcgtcatcagggcaagatcatgtacgtgggcgacgtgcggagcgtgacacagaagcatatccaggagtggggccctttcgacctggtgatcggcggcagcccttgcaatgacctgagcatcgtgaacccagcccggaagggcctgtacgagggaaccggcagactgttcttcgagttttacagactgctgcacgacgcccggcctaaggaaggcgacgaccggcccttcttttggctgttcgagaatgtggtggccatgggagtcagcgacaagcgggatattagccggttcctggagagcaaccccgtgatgatcgatgccaaggaagtgagcgccgcccaccgggccagatacttctggggcaatctgcctggcatgaacagacccctggccagcaccgtgaacgacaagctggagctgcaggagtgcctggagcacggccggatcgccaagttcagcaaggtgagaaccatcaccacccgaagcaacagcatcaaacaaggcaaggaccagcactttcctgtgttcatgaacgagaaggaggacatcctgtggtgtaccgagatggagagagtgttcgggttcccagtccactacacagatgtcagcaacatgtctagactggccagacagagactgctgggaagaagctggtccgtccctgtgatcagacacctgttcgcccctctgaaggagtacttcgcctgcgtgagcagcggcaacagcaacgccaacagccggggccccagcttctctagcggcctggtgccactgtccctgagagggagccacatgggccccatggagatctacaaaaccgtgagcgcctggaagcggcagcctgtgcgcgtgctgagcctgtttcggaatatcgataaagtcctgaaaagcctgggattcctggagagcggctctggctccggcggtggcaccctgaagtacgtggaggatgtgacaaacgtggtcagacgggatgtggagaagtggggccccttcgatctggtgtacggcagcacccaacccctgggcagctcttgtgaccggtgccctggctggtacatgtttcagttccaccggatcctgcagtacgccctgccgagacaggagtcccagcggccattcttttggattttcatggacaacttgctgctgaccgaggatgaccaggaaactaccactcggttcctgcagaccgaagccgtgaccctgcaggacgtgagaggccgggactaccagaacgccatgcgggtgtggtccaacatccctggactgaaaagcaagcacgcacctctgacccctaaagaagaggagtacctgcaggcccaggtgcggagcagaagcaagctggacgcccctaaggtggatctgctggtgaagaattgcctcctgcccctgagagagtacttcaagtatttcagccagaatagtctgcccctgggcggcccaagcagcggcgcccctcctcccagcggcggcagcccagccggctccccaacctctaccgaggagggcacctctgagtccgccacccccgagagcggccctggcacctccaccgagcccagcgagggcagcgcacccggcagccctgccggcagccccacctccacagaggagggaaccagcaccgagcccagcgaaggcagcgccccaggcaccagcaccgagcctagtgagggcggctctggcggcggcagcgcccaggagattaaacggatcaacaagatcagaagaagacttgtgaaagacagcaacaccaagaaggccggcaagacaggccccatgaaaaccctgctggttagagtgatgacacccgatctgagagagcggctggaaaacctgagaaagaagcctgaaaatatcccccagcccatcagcaatacatctagagccaacctgaataagctgctgaccgattacaccgaaatgaagaaggcgatcctgcatgtgtactgggaagagttccagaaggaccctgtgggcctgatgagccgggtggcccagcctgccagcaagaagatcgatcagaacaagctgaaacctgagatggacgagaagggcaacctgaccaccgccggctttgcctgctctcagtgtggccagcccctgttcgtgtacaagctggagcaggtgtctgagaagggcaaggcttacaccaactacttcggacggtgcaatgtggccgagcacgaaaagctgatcctgctggcccagctgaagcccgagaaggatagcgacgaagccgtgacatatagcctgggaaagtttgggcagagggccctggatttctacagcattcatgtgaccaaggagtccacccaccccgtgaagcccctggcccagatcgccggaaacagatacgcctccggacctgtgggaaaggccctgagcgacgcatgtatgggcacaatcgcctccttcctgtctaagtaccaggacatcatcatcgaacaccagaaggtggtgaagggcaaccagaagagactggagagcctgcgggagctggccggcaaggaaaacctggaataccctagcgtgaccctgccacctcagcctcacaccaaggagggcgttgatgcctacaacgaagtgatcgcccgggtgcgaatgtgggtgaacctgaacctgtggcagaagctgaagctaagcagagatgatgccaagcctctgctgagactgaagggattcccttcctttcctctggtcgagagacaggccaacgaagtggactggtgggacatggtgtgtaacgtgaagaagctgatcaacgagaaaaaggaggatggcaaggtgttttggcagaatctggctggctacaagagacaggaagccctgagaccatacctgagcagcgaggaagatcggaagaagggaaagaaattcgctcggtaccagctgggcgacctgctgctgcacctggaaaagaagcacggcgaggactggggaaaggtgtacgacgaggcctgggagcggattgacaagaaagtggaaggcctgagcaagcacatcaagctggaagaggaacggagaagcgaggacgcccagagcaaggccgccctgaccgactggctgcgggctaaggccagcttcgtgatcgagggcctgaaggaggccgacaaggacgagttctgcagatgcgagctgaagctgcagaagtggtacggggacctgcggggaaagcccttcgccatcgaagccgagaacagcatcctggacatcagcggcttcagcaagcagtacaactgtgccttcatctggcagaaggacggcgtgaagaagctgaacctgtacctgatcatcaactacttcaagggcggcaagctgcggttcaagaagatcaaacctgaagccttcgaagccaacagattctacaccgtgatcaacaaaaagagcggcgagatcgtgcccatggaggtgaacttcaacttcgacgaccccaacctgatcatcctgcctctggcctttggcaagagacagggcagagaattcatctggaacgacctgctgtccctggaaaccggcagcctgaagctggccaacggaagagtgatcgagaagacactgtacaacagaagaacccggcaggatgagcctgccctgttcgtggccctgaccttcgagcggcgggaggtcctggactcctccaatatcaaaccaatgaacctgatcggcgtggcaagaggcgaaaacatccccgccgtgatcgccctgaccgaccccgagggctgcccactgagccggtttaaggatagcctgggaaacccaacccacatcctgagaatcggcgagagctataaggagaagcagcggaccatccaggccaagaaggaggtggagcagcggagagccggcggctacagccggaagtacgccagcaaagccaagaatctggcagacgatatggtgagaaacaccgctagagatctgctgtactacgccgtgacccaggatgccatgctgatcttcgccaacctgagccggggcttcggccggcagggcaagcggaccttcatggccgagagacagtacacacggatggaggactggctgaccgccaagctggcctacgagggcctgagcaagacctacctgtccaagacactggcccagtacacctccaagacatgcagcaactgtgggtttaccatcaccagcgccgactacgacagggtgctggagaagctgaagaagacagcaacaggctggatgaccacaattaacggcaaggagctgaaggtggagggccagattacctactacaacagatacaagagacagaacgtagtcaaggacctgtccgtcgagctggatagactgagcgaagaatctgtgaacaacgacatctcctcctggacaaagggcagaagcggagaagctctgagcctcctgaagaaaagattctcccatagacccgtgcaggagaagttcgtgtgcctgaactgcggcttcgagacacacgcagccgagcaagccgccctgaacatcgccagatcctggctgttcctgcggagccaggagtacaagaaataccagacaaacaagacaaccggcaacaccgataagagagccttcgtcgagacctggcagtccttttaccggaagaagcttaaggaggtgtggaaacctgccgtgcggtctggcggatctggcggaggctccacaagcgtgaccttcgaggaggtggccgtgtacttcagcgaggaggagtgggccctgctggaccccggccagagggccctgtacagggacgtgatgcaggagaactacgagaccgtgatcagcctgggcaaggacttctgccccctgagccccgagcaggtggccctgtgcggcatgctgtgcggcaggagcgagggccacgtgagccagagccccgagcagagggagacctgcaagaggcagcacaagaccagccccaagaaaaagagaaaagtctaagctgccttctgcggggcttgccttctggccatgcccttcttctctcccttgcacctgtacctcttggtctttgaataaagcctgagtaggaaggctagcaaaaaaaaaaaaaaaaaaaaaaaaaaaaaaaaaaaaaaaaaaaaaaaaaaaaaaaaaaaaaaaaaaaaaaaaaaaaaaaa

SEQ ID NO: 6748 - RNA, 5797 nt, synthetic construct
  source 1..5797: mol_type = other RNA
aggaaataagagagaaaagaagagtaagaagaaatataagagccaccatggcccctaagaagaagcgtaaagtgagccggatggaacgcctcgtctacgaggtgcggcagaagtgcagaaacatcgaggacatctgcatctcctgcggatctctgaacgtgaccctggagcacccactgttcatcggcggcatgtgccagaactgtaaaaactgttttctggagtgtgcctatcaatacgacgatgacggctaccagagctactgcaccatctgttgcggcggaagagaggtgctgatgtgtggaaataacaactgctgccggtgcttctgcgtggaatgcgtggacctgctggtgggccccggcgccgcccaggccgctattaaggaagatccttggaactgctacatgtgcggccacaagggcacatacggcctgctgagacggagagaggactggcctagcagactgcagatgttcttcgccaataaccacgaccaggagttcgacccccctaaggtgtaccctcccgtccccgccgagaagagaaagcccatccgggtcctgagcctgttcgatggcatcgccaccggtctgctggtgctgaaggacctgggcatccaggtggataggtacattgcctccgaggtgtgcgaggactccatcaccgtgggaatggtgcgtcatcagggcaagatcatgtacgtgggcgacgtgcggagcgtgacacagaagcatatccaggagtggggccctttcgacctggtgatcggcggcagcccttgcaatgacctgagcatcgtgaacccagcccggaagggcctgtacgagggaaccggcagactgttcttcgagttttacagactgctgcacgacgcccggcctaaggaaggcgacgaccggcccttcttttggctgttcgagaatgtggtggccatgggagtcagcgacaagcgggatattagccggttcctggagagcaaccccgtgatgatcgatgccaaggaagtgagcgccgcccaccgggccagatacttctggggcaatctgcctggcatgaacagacccctggccagcaccgtgaacgacaagctggagctgcaggagtgcctggagcacggccggatcgccaagttcagcaaggtgagaaccatcaccacccgaagcaacagcatcaaacaaggcaaggaccagcactttcctgtgttcatgaacgagaaggaggacatcctgtggtgtaccgagatggagagagtgttcgggttcccagtccactacacagatgtcagcaacatgtctagactggccagacagagactgctgggaagaagctggtccgtccctgtgatcagacacctgttcgcccctctgaaggagtacttcgcctgcgtgagcagcggcaacagcaacgccaacagccggggccccagcttctctagcggcctggtgccactgtccctgagagggagccacatgggccccatggagatctacaaaaccgtgagcgcctggaagcggcagcctgtgcgcgtgctgagcctgtttcggaatatcgataaagtcctgaaaagcctgggattcctggagagcggctctggctccggcggtggcaccctgaagtacgtggaggatgtgacaaacgtggtcagacgggatgtggagaagtggggccccttcgatctggtgtacggcagcacccaacccctgggcagctcttgtgaccggtgccctggctggtacatgtttcagttccaccggatcctgcagtacgccctgccgagacaggagtcccagcggccattcttttggattttcatggacaacttgctgctgaccgaggatgaccaggaaactaccactcggttcctgcagaccgaagccgtgaccctgcaggacgtgagaggccgggactaccagaacgccatgcgggtgtggtccaacatccctggactgaaaagcaagcacgcacctctgacccctaaagaagaggagtacctgcaggcccaggtgcggagcagaagcaagctggacgcccctaaggtggatctgctggtgaagaattgcctcctgcccctgagagagtacttcaagtatttcagccagaatagtctgcccctgggcggcccaagcagcggcgcccctcctcccagcggcggcagcccagccggctccccaacctctaccgaggagggcacctctgagtccgccacccccgagagcggccctggcacctccaccgagcccagcgagggcagcgcacccggcagccctgccggcagccccacctccacagaggagggaaccagcaccgagcccagcgaaggcagcgccccaggcaccagcaccgagcctagtgagggcggctctggcggcggcagcgcccaggagattaaacggatcaacaagatcagaagaagacttgtgaaagacagcaacaccaagaaggccggcaagacaggccccatgaaaaccctgctggttagagtgatgacacccgatctgagagagcggctggaaaacctgagaaagaagcctgaaaatatcccccagcccatcagcaatacatctagagccaacctgaataagctgctgaccgattacaccgaaatgaagaaggcgatcctgcatgtgtactgggaagagttccagaaggaccctgtgggcctgatgagccgggtggcccagcctgccagcaagaagatcgatcagaacaagctgaaacctgagatggacgagaagggcaacctgaccaccgccggctttgcctgctctcagtgtggccagcccctgttcgtgtacaagctggagcaggtgtctgagaagggcaaggcttacaccaactacttcggacggtgcaatgtggccgagcacgaaaagctgatcctgctggcccagctgaagcccgagaaggatagcgacgaagccgtgacatatagcctgggaaagtttgggcagagggccctggatttctacagcattcatgtgaccaaggagtccacccaccccgtgaagcccctggcccagatcgccggaaacagatacgcctccggacctgtgggaaaggccctgagcgacgcatgtatgggcacaatcgcctccttcctgtctaagtaccaggacatcatcatcgaacaccagaaggtggtgaagggcaaccagaagagactggagagcctgcgggagctggccggcaaggaaaacctggaataccctagcgtgaccctgccacctcagcctcacaccaaggagggcgttgatgcctacaacgaagtgatcgcccgggtgcgaatgtgggtgaacctgaacctgtggcagaagctgaagctaagcagagatgatgccaagcctctgctgagactgaagggattcccttcctttcctctggtcgagagacaggccaacgaagtggactggtgggacatggtgtgtaacgtgaagaagctgatcaacgagaaaaaggaggatggcaaggtgttttggcagaatctggctggctacaagagacaggaagccctgagaccatacctgagcagcgaggaagatcggaagaagggaaagaaattcgctcggtaccagctgggcgacctgctgctgcacctggaaaagaagcacggcgaggactggggaaaggtgtacgacgaggcctgggagcggattgacaagaaagtggaaggcctgagcaagcacatcaagctggaagaggaacggagaagcgaggacgcccagagcaaggccgccctgaccgactggctgcgggctaaggccagcttcgtgatcgagggcctgaaggaggccgacaaggacgagttctgcagatgcgagctgaagctgcagaagtggtacggggacctgcggggaaagcccttcgccatcgaagccgagaacagcatcctggacatcagcggcttcagcaagcagtacaactgtgccttcatctggcagaaggacggcgtgaagaagctgaacctgtacctgatcatcaactacttcaagggcggcaagctgcggttcaagaagatcaaacctgaagccttcgaagccaacagattctacaccgtgatcaacaaaaagagcggcgagatcgtgcccatggaggtgaacttcaacttcgacgaccccaacctgatcatcctgcctctggcctttggcaagagacagggcagagaattcatctggaacgacctgctgtccctggaaaccggcagcctgaagctggccaacggaagagtgatcgagaagacactgtacaacagaagaacccggcaggatgagcctgccctgttcgtggccctgaccttcgagcggcgggaggtcctggactcctccaatatcaaaccaatgaacctgatcggcgtggcaagaggcgaaaacatccccgccgtgatcgccctgaccgaccccgagggctgcccactgagccggtttaaggatagcctgggaaacccaacccacatcctgagaatcggcgagagctataaggagaagcagcggaccatccaggccaagaaggaggtggagcagcggagagccggcggctacagccggaagtacgccagcaaagccaagaatctggcagacgatatggtgagaaacaccgctagagatctgctgtactacgccgtgacccaggatgccatgctgatcttcgccaacctgagccggggcttcggccggcagggcaagcggaccttcatggccgagagacagtacacacggatggaggactggctgaccgccaagctggcctacgagggcctgagcaagacctacctgtccaagacactggcccagtacacctccaagacatgcagcaactgtgggtttaccatcaccagcgccgactacgacagggtgctggagaagctgaagaagacagcaacaggctggatgaccacaattaacggcaaggagctgaaggtggagggccagattacctactacaacagatacaagagacagaacgtagtcaaggacctgtccgtcgagctggatagactgagcgaagaatctgtgaacaacgacatctcctcctggacaaagggcagaagcggagaagctctgagcctcctgaagaaaagattctcccatagacccgtgcaggagaagttcgtgtgcctgaactgcggcttcgagacacacgcagccgagcaagccgccctgaacatcgccagatcctggctgttcctgcggagccaggagtacaagaaataccagacaaacaagacaaccggcaacaccgataagagagccttcgtcgagacctggcagtccttttaccggaagaagcttaaggaggtgtggaaacctgccgtgcggtctggcggatctggcggaggctccacaagcgtgcaggagagcgtgaccttcaaggacgtggccgtgctgttcacccaggacgagtgggcccagctgagccccgcccagagggccctgtacagggacgtgatgctggagaactacagcaacctggtgagcctgggcctgctgggccccaagcccgacgtgttcagccagctgggcaagggcgaggagtggatgcccgaggacagcctgggcggcttctgcctggactggatgaccacccccgtgaccagccccaagaaaaagagaaaagtctaagctgccttctgcggggcttgccttctggccatgcccttcttctctcccttgcacctgtacctcttggtctttgaataaagcctgagtaggaaggctagcaaaaaaaaaaaaaaaaaaaaaaaaaaaaaaaaaaaaaaaaaaaaaaaaaaaaaaaaaaaaaaaaaaaaaaaaaaaaaaaa

SEQ ID NO: 6749 - RNA, 5797 nt, synthetic construct
  source 1..5797: mol_type = other RNA
aggaaataagagagaaaagaagagtaagaagaaatataagagccaccatggcccctaagaagaagcgtaaagtgagccggatggaacgcctcgtctacgaggtgcggcagaagtgcagaaacatcgaggacatctgcatctcctgcggatctctgaacgtgaccctggagcacccactgttcatcggcggcatgtgccagaactgtaaaaactgttttctggagtgtgcctatcaatacgacgatgacggctaccagagctactgcaccatctgttgcggcggaagagaggtgctgatgtgtggaaataacaactgctgccggtgcttctgcgtggaatgcgtggacctgctggtgggccccggcgccgcccaggccgctattaaggaagatccttggaactgctacatgtgcggccacaagggcacatacggcctgctgagacggagagaggactggcctagcagactgcagatgttcttcgccaataaccacgaccaggagttcgacccccctaaggtgtaccctcccgtccccgccgagaagagaaagcccatccgggtcctgagcctgttcgatggcatcgccaccggtctgctggtgctgaaggacctgggcatccaggtggataggtacattgcctccgaggtgtgcgaggactccatcaccgtgggaatggtgcgtcatcagggcaagatcatgtacgtgggcgacgtgcggagcgtgacacagaagcatatccaggagtggggccctttcgacctggtgatcggcggcagcccttgcaatgacctgagcatcgtgaacccagcccggaagggcctgtacgagggaaccggcagactgttcttcgagttttacagactgctgcacgacgcccggcctaaggaaggcgacgaccggcccttcttttggctgttcgagaatgtggtggccatgggagtcagcgacaagcgggatattagccggttcctggagagcaaccccgtgatgatcgatgccaaggaagtgagcgccgcccaccgggccagatacttctggggcaatctgcctggcatgaacagacccctggccagcaccgtgaacgacaagctggagctgcaggagtgcctggagcacggccggatcgccaagttcagcaaggtgagaaccatcaccacccgaagcaacagcatcaaacaaggcaaggaccagcactttcctgtgttcatgaacgagaaggaggacatcctgtggtgtaccgagatggagagagtgttcgggttcccagtccactacacagatgtcagcaacatgtctagactggccagacagagactgctgggaagaagctggtccgtccctgtgatcagacacctgttcgcccctctgaaggagtacttcgcctgcgtgagcagcggcaacagcaacgccaacagccggggccccagcttctctagcggcctggtgccactgtccctgagagggagccacatgggccccatggagatctacaaaaccgtgagcgcctggaagcggcagcctgtgcgcgtgctgagcctgtttcggaatatcgataaagtcctgaaaagcctgggattcctggagagcggctctggctccggcggtggcaccctgaagtacgtggaggatgtgacaaacgtggtcagacgggatgtggagaagtggggccccttcgatctggtgtacggcagcacccaacccctgggcagctcttgtgaccggtgccctggctggtacatgtttcagttccaccggatcctgcagtacgccctgccgagacaggagtcccagcggccattcttttggattttcatggacaacttgctgctgaccgaggatgaccaggaaactaccactcggttcctgcagaccgaagccgtgaccctgcaggacgtgagaggccgggactaccagaacgccatgcgggtgtggtccaacatccctggactgaaaagcaagcacgcacctctgacccctaaagaagaggagtacctgcaggcccaggtgcggagcagaagcaagctggacgcccctaaggtggatctgctggtgaagaattgcctcctgcccctgagagagtacttcaagtatttcagccagaatagtctgcccctgggcggcccaagcagcggcgcccctcctcccagcggcggcagcccagccggctccccaacctctaccgaggagggcacctctgagtccgccacccccgagagcggccctggcacctccaccgagcccagcgagggcagcgcacccggcagccctgccggcagccccacctccacagaggagggaaccagcaccgagcccagcgaaggcagcgccccaggcaccagcaccgagcctagtgagggcggctctggcggcggcagcgcccaggagattaaacggatcaacaagatcagaagaagacttgtgaaagacagcaacaccaagaaggccggcaagacaggccccatgaaaaccctgctggttagagtgatgacacccgatctgagagagcggctggaaaacctgagaaagaagcctgaaaatatcccccagcccatcagcaatacatctagagccaacctgaataagctgctgaccgattacaccgaaatgaagaaggcgatcctgcatgtgtactgggaagagttccagaaggaccctgtgggcctgatgagccgggtggcccagcctgccagcaagaagatcgatcagaacaagctgaaacctgagatggacgagaagggcaacctgaccaccgccggctttgcctgctctcagtgtggccagcccctgttcgtgtacaagctggagcaggtgtctgagaagggcaaggcttacaccaactacttcggacggtgcaatgtggccgagcacgaaaagctgatcctgctggcccagctgaagcccgagaaggatagcgacgaagccgtgacatatagcctgggaaagtttgggcagagggccctggatttctacagcattcatgtgaccaaggagtccacccaccccgtgaagcccctggcccagatcgccggaaacagatacgcctccggacctgtgggaaaggccctgagcgacgcatgtatgggcacaatcgcctccttcctgtctaagtaccaggacatcatcatcgaacaccagaaggtggtgaagggcaaccagaagagactggagagcctgcgggagctggccggcaaggaaaacctggaataccctagcgtgaccctgccacctcagcctcacaccaaggagggcgttgatgcctacaacgaagtgatcgcccgggtgcgaatgtgggtgaacctgaacctgtggcagaagctgaagctaagcagagatgatgccaagcctctgctgagactgaagggattcccttcctttcctctggtcgagagacaggccaacgaagtggactggtgggacatggtgtgtaacgtgaagaagctgatcaacgagaaaaaggaggatggcaaggtgttttggcagaatctggctggctacaagagacaggaagccctgagaccatacctgagcagcgaggaagatcggaagaagggaaagaaattcgctcggtaccagctgggcgacctgctgctgcacctggaaaagaagcacggcgaggactggggaaaggtgtacgacgaggcctgggagcggattgacaagaaagtggaaggcctgagcaagcacatcaagctggaagaggaacggagaagcgaggacgcccagagcaaggccgccctgaccgactggctgcgggctaaggccagcttcgtgatcgagggcctgaaggaggccgacaaggacgagttctgcagatgcgagctgaagctgcagaagtggtacggggacctgcggggaaagcccttcgccatcgaagccgagaacagcatcctggacatcagcggcttcagcaagcagtacaactgtgccttcatctggcagaaggacggcgtgaagaagctgaacctgtacctgatcatcaactacttcaagggcggcaagctgcggttcaagaagatcaaacctgaagccttcgaagccaacagattctacaccgtgatcaacaaaaagagcggcgagatcgtgcccatggaggtgaacttcaacttcgacgaccccaacctgatcatcctgcctctggcctttggcaagagacagggcagagaattcatctggaacgacctgctgtccctggaaaccggcagcctgaagctggccaacggaagagtgatcgagaagacactgtacaacagaagaacccggcaggatgagcctgccctgttcgtggccctgaccttcgagcggcgggaggtcctggactcctccaatatcaaaccaatgaacctgatcggcgtggcaagaggcgaaaacatccccgccgtgatcgccctgaccgaccccgagggctgcccactgagccggtttaaggatagcctgggaaacccaacccacatcctgagaatcggcgagagctataaggagaagcagcggaccatccaggccaagaaggaggtggagcagcggagagccggcggctacagccggaagtacgccagcaaagccaagaatctggcagacgatatggtgagaaacaccgctagagatctgctgtactacgccgtgacccaggatgccatgctgatcttcgccaacctgagccggggcttcggccggcagggcaagcggaccttcatggccgagagacagtacacacggatggaggactggctgaccgccaagctggcctacgagggcctgagcaagacctacctgtccaagacactggcccagtacacctccaagacatgcagcaactgtgggtttaccatcaccagcgccgactacgacagggtgctggagaagctgaagaagacagcaacaggctggatgaccacaattaacggcaaggagctgaaggtggagggccagattacctactacaacagatacaagagacagaacgtagtcaaggacctgtccgtcgagctggatagactgagcgaagaatctgtgaacaacgacatctcctcctggacaaagggcagaagcggagaagctctgagcctcctgaagaaaagattctcccatagacccgtgcaggagaagttcgtgtgcctgaactgcggcttcgagacacacgcagccgagcaagccgccctgaacatcgccagatcctggctgttcctgcggagccaggagtacaagaaataccagacaaacaagacaaccggcaacaccgataagagagccttcgtcgagacctggcagtccttttaccggaagaagcttaaggaggtgtggaaacctgccgtgcggtctggcggatctggcggaggctccacaagcttccagggcagcgtgagcttcgaggacgtgaccgtgggcttcagccaggaggagtggcagcacctggaccccagccagagggccctgtacagggacgtgatgctggagaactacagcaacctggtgagcgtgggctactgcgtgcacaagcccgaggtgatcttcaggctggagcagggcgaggagccctggaggctggaggaggagttccccagccagagcttccccgaggtgtggaccgccaccagccccaagaaaaagagaaaagtctaagctgccttctgcggggcttgccttctggccatgcccttcttctctcccttgcacctgtacctcttggtctttgaataaagcctgagtaggaaggctagcaaaaaaaaaaaaaaaaaaaaaaaaaaaaaaaaaaaaaaaaaaaaaaaaaaaaaaaaaaaaaaaaaaaaaaaaaaaaaaaa

SEQ ID NO: 6750 - RNA, 5797 nt, synthetic construct
  source 1..5797: mol_type = other RNA
aggaaataagagagaaaagaagagtaagaagaaatataagagccaccatggcccctaagaagaagcgtaaagtgagccggatggaacgcctcgtctacgaggtgcggcagaagtgcagaaacatcgaggacatctgcatctcctgcggatctctgaacgtgaccctggagcacccactgttcatcggcggcatgtgccagaactgtaaaaactgttttctggagtgtgcctatcaatacgacgatgacggctaccagagctactgcaccatctgttgcggcggaagagaggtgctgatgtgtggaaataacaactgctgccggtgcttctgcgtggaatgcgtggacctgctggtgggccccggcgccgcccaggccgctattaaggaagatccttggaactgctacatgtgcggccacaagggcacatacggcctgctgagacggagagaggactggcctagcagactgcagatgttcttcgccaataaccacgaccaggagttcgacccccctaaggtgtaccctcccgtccccgccgagaagagaaagcccatccgggtcctgagcctgttcgatggcatcgccaccggtctgctggtgctgaaggacctgggcatccaggtggataggtacattgcctccgaggtgtgcgaggactccatcaccgtgggaatggtgcgtcatcagggcaagatcatgtacgtgggcgacgtgcggagcgtgacacagaagcatatccaggagtggggccctttcgacctggtgatcggcggcagcccttgcaatgacctgagcatcgtgaacccagcccggaagggcctgtacgagggaaccggcagactgttcttcgagttttacagactgctgcacgacgcccggcctaaggaaggcgacgaccggcccttcttttggctgttcgagaatgtggtggccatgggagtcagcgacaagcgggatattagccggttcctggagagcaaccccgtgatgatcgatgccaaggaagtgagcgccgcccaccgggccagatacttctggggcaatctgcctggcatgaacagacccctggccagcaccgtgaacgacaagctggagctgcaggagtgcctggagcacggccggatcgccaagttcagcaaggtgagaaccatcaccacccgaagcaacagcatcaaacaaggcaaggaccagcactttcctgtgttcatgaacgagaaggaggacatcctgtggtgtaccgagatggagagagtgttcgggttcccagtccactacacagatgtcagcaacatgtctagactggccagacagagactgctgggaagaagctggtccgtccctgtgatcagacacctgttcgcccctctgaaggagtacttcgcctgcgtgagcagcggcaacagcaacgccaacagccggggccccagcttctctagcggcctggtgccactgtccctgagagggagccacatgggccccatggagatctacaaaaccgtgagcgcctggaagcggcagcctgtgcgcgtgctgagcctgtttcggaatatcgataaagtcctgaaaagcctgggattcctggagagcggctctggctccggcggtggcaccctgaagtacgtggaggatgtgacaaacgtggtcagacgggatgtggagaagtggggccccttcgatctggtgtacggcagcacccaacccctgggcagctcttgtgaccggtgccctggctggtacatgtttcagttccaccggatcctgcagtacgccctgccgagacaggagtcccagcggccattcttttggattttcatggacaacttgctgctgaccgaggatgaccaggaaactaccactcggttcctgcagaccgaagccgtgaccctgcaggacgtgagaggccgggactaccagaacgccatgcgggtgtggtccaacatccctggactgaaaagcaagcacgcacctctgacccctaaagaagaggagtacctgcaggcccaggtgcggagcagaagcaagctggacgcccctaaggtggatctgctggtgaagaattgcctcctgcccctgagagagtacttcaagtatttcagccagaatagtctgcccctgggcggcccaagcagcggcgcccctcctcccagcggcggcagcccagccggctccccaacctctaccgaggagggcacctctgagtccgccacccccgagagcggccctggcacctccaccgagcccagcgagggcagcgcacccggcagccctgccggcagccccacctccacagaggagggaaccagcaccgagcccagcgaaggcagcgccccaggcaccagcaccgagcctagtgagggcggctctggcggcggcagcgcccaggagattaaacggatcaacaagatcagaagaagacttgtgaaagacagcaacaccaagaaggccggcaagacaggccccatgaaaaccctgctggttagagtgatgacacccgatctgagagagcggctggaaaacctgagaaagaagcctgaaaatatcccccagcccatcagcaatacatctagagccaacctgaataagctgctgaccgattacaccgaaatgaagaaggcgatcctgcatgtgtactgggaagagttccagaaggaccctgtgggcctgatgagccgggtggcccagcctgccagcaagaagatcgatcagaacaagctgaaacctgagatggacgagaagggcaacctgaccaccgccggctttgcctgctctcagtgtggccagcccctgttcgtgtacaagctggagcaggtgtctgagaagggcaaggcttacaccaactacttcggacggtgcaatgtggccgagcacgaaaagctgatcctgctggcccagctgaagcccgagaaggatagcgacgaagccgtgacatatagcctgggaaagtttgggcagagggccctggatttctacagcattcatgtgaccaaggagtccacccaccccgtgaagcccctggcccagatcgccggaaacagatacgcctccggacctgtgggaaaggccctgagcgacgcatgtatgggcacaatcgcctccttcctgtctaagtaccaggacatcatcatcgaacaccagaaggtggtgaagggcaaccagaagagactggagagcctgcgggagctggccggcaaggaaaacctggaataccctagcgtgaccctgccacctcagcctcacaccaaggagggcgttgatgcctacaacgaagtgatcgcccgggtgcgaatgtgggtgaacctgaacctgtggcagaagctgaagctaagcagagatgatgccaagcctctgctgagactgaagggattcccttcctttcctctggtcgagagacaggccaacgaagtggactggtgggacatggtgtgtaacgtgaagaagctgatcaacgagaaaaaggaggatggcaaggtgttttggcagaatctggctggctacaagagacaggaagccctgagaccatacctgagcagcgaggaagatcggaagaagggaaagaaattcgctcggtaccagctgggcgacctgctgctgcacctggaaaagaagcacggcgaggactggggaaaggtgtacgacgaggcctgggagcggattgacaagaaagtggaaggcctgagcaagcacatcaagctggaagaggaacggagaagcgaggacgcccagagcaaggccgccctgaccgactggctgcgggctaaggccagcttcgtgatcgagggcctgaaggaggccgacaaggacgagttctgcagatgcgagctgaagctgcagaagtggtacggggacctgcggggaaagcccttcgccatcgaagccgagaacagcatcctggacatcagcggcttcagcaagcagtacaactgtgccttcatctggcagaaggacggcgtgaagaagctgaacctgtacctgatcatcaactacttcaagggcggcaagctgcggttcaagaagatcaaacctgaagccttcgaagccaacagattctacaccgtgatcaacaaaaagagcggcgagatcgtgcccatggaggtgaacttcaacttcgacgaccccaacctgatcatcctgcctctggcctttggcaagagacagggcagagaattcatctggaacgacctgctgtccctggaaaccggcagcctgaagctggccaacggaagagtgatcgagaagacactgtacaacagaagaacccggcaggatgagcctgccctgttcgtggccctgaccttcgagcggcgggaggtcctggactcctccaatatcaaaccaatgaacctgatcggcgtggcaagaggcgaaaacatccccgccgtgatcgccctgaccgaccccgagggctgcccactgagccggtttaaggatagcctgggaaacccaacccacatcctgagaatcggcgagagctataaggagaagcagcggaccatccaggccaagaaggaggtggagcagcggagagccggcggctacagccggaagtacgccagcaaagccaagaatctggcagacgatatggtgagaaacaccgctagagatctgctgtactacgccgtgacccaggatgccatgctgatcttcgccaacctgagccggggcttcggccggcagggcaagcggaccttcatggccgagagacagtacacacggatggaggactggctgaccgccaagctggcctacgagggcctgagcaagacctacctgtccaagacactggcccagtacacctccaagacatgcagcaactgtgggtttaccatcaccagcgccgactacgacagggtgctggagaagctgaagaagacagcaacaggctggatgaccacaattaacggcaaggagctgaaggtggagggccagattacctactacaacagatacaagagacagaacgtagtcaaggacctgtccgtcgagctggatagactgagcgaagaatctgtgaacaacgacatctcctcctggacaaagggcagaagcggagaagctctgagcctcctgaagaaaagattctcccatagacccgtgcaggagaagttcgtgtgcctgaactgcggcttcgagacacacgcagccgagcaagccgccctgaacatcgccagatcctggctgttcctgcggagccaggagtacaagaaataccagacaaacaagacaaccggcaacaccgataagagagccttcgtcgagacctggcagtccttttaccggaagaagcttaaggaggtgtggaaacctgccgtgcggtctggcggatctggcggaggctccacaagcgacagcgtggccttcgaggacgtggccatcaacttcacctgcgaggagtgggccctgctgggccccagccagaagagcctgtacagggacgtgatgcaggagaccatcaggaacctggactgcatcggcatgaagtggcagaacctggacatcgaggaggacgagtacaagaaccccggcaggaacctgaggtgcttcatggtggagaggagctgcgagatcaaggacaacagccagtgcggcaccagccccaagaaaaagagaaaagtctaagctgccttctgcggggcttgccttctggccatgcccttcttctctcccttgcacctgtacctcttggtctttgaataaagcctgagtaggaaggctagcaaaaaaaaaaaaaaaaaaaaaaaaaaaaaaaaaaaaaaaaaaaaaaaaaaaaaaaaaaaaaaaaaaaaaaaaaaaaaaaa

SEQ ID NO: 6751 - RNA, 5797 nt, synthetic construct
  source 1..5797: mol_type = other RNA
aggaaataagagagaaaagaagagtaagaagaaatataagagccaccatggcccctaagaagaagcgtaaagtgagccggatggaacgcctcgtctacgaggtgcggcagaagtgcagaaacatcgaggacatctgcatctcctgcggatctctgaacgtgaccctggagcacccactgttcatcggcggcatgtgccagaactgtaaaaactgttttctggagtgtgcctatcaatacgacgatgacggctaccagagctactgcaccatctgttgcggcggaagagaggtgctgatgtgtggaaataacaactgctgccggtgcttctgcgtggaatgcgtggacctgctggtgggccccggcgccgcccaggccgctattaaggaagatccttggaactgctacatgtgcggccacaagggcacatacggcctgctgagacggagagaggactggcctagcagactgcagatgttcttcgccaataaccacgaccaggagttcgacccccctaaggtgtaccctcccgtccccgccgagaagagaaagcccatccgggtcctgagcctgttcgatggcatcgccaccggtctgctggtgctgaaggacctgggcatccaggtggataggtacattgcctccgaggtgtgcgaggactccatcaccgtgggaatggtgcgtcatcagggcaagatcatgtacgtgggcgacgtgcggagcgtgacacagaagcatatccaggagtggggccctttcgacctggtgatcggcggcagcccttgcaatgacctgagcatcgtgaacccagcccggaagggcctgtacgagggaaccggcagactgttcttcgagttttacagactgctgcacgacgcccggcctaaggaaggcgacgaccggcccttcttttggctgttcgagaatgtggtggccatgggagtcagcgacaagcgggatattagccggttcctggagagcaaccccgtgatgatcgatgccaaggaagtgagcgccgcccaccgggccagatacttctggggcaatctgcctggcatgaacagacccctggccagcaccgtgaacgacaagctggagctgcaggagtgcctggagcacggccggatcgccaagttcagcaaggtgagaaccatcaccacccgaagcaacagcatcaaacaaggcaaggaccagcactttcctgtgttcatgaacgagaaggaggacatcctgtggtgtaccgagatggagagagtgttcgggttcccagtccactacacagatgtcagcaacatgtctagactggccagacagagactgctgggaagaagctggtccgtccctgtgatcagacacctgttcgcccctctgaaggagtacttcgcctgcgtgagcagcggcaacagcaacgccaacagccggggccccagcttctctagcggcctggtgccactgtccctgagagggagccacatgggccccatggagatctacaaaaccgtgagcgcctggaagcggcagcctgtgcgcgtgctgagcctgtttcggaatatcgataaagtcctgaaaagcctgggattcctggagagcggctctggctccggcggtggcaccctgaagtacgtggaggatgtgacaaacgtggtcagacgggatgtggagaagtggggccccttcgatctggtgtacggcagcacccaacccctgggcagctcttgtgaccggtgccctggctggtacatgtttcagttccaccggatcctgcagtacgccctgccgagacaggagtcccagcggccattcttttggattttcatggacaacttgctgctgaccgaggatgaccaggaaactaccactcggttcctgcagaccgaagccgtgaccctgcaggacgtgagaggccgggactaccagaacgccatgcgggtgtggtccaacatccctggactgaaaagcaagcacgcacctctgacccctaaagaagaggagtacctgcaggcccaggtgcggagcagaagcaagctggacgcccctaaggtggatctgctggtgaagaattgcctcctgcccctgagagagtacttcaagtatttcagccagaatagtctgcccctgggcggcccaagcagcggcgcccctcctcccagcggcggcagcccagccggctccccaacctctaccgaggagggcacctctgagtccgccacccccgagagcggccctggcacctccaccgagcccagcgagggcagcgcacccggcagccctgccggcagccccacctccacagaggagggaaccagcaccgagcccagcgaaggcagcgccccaggcaccagcaccgagcctagtgagggcggctctggcggcggcagcgcccaggagattaaacggatcaacaagatcagaagaagacttgtgaaagacagcaacaccaagaaggccggcaagacaggccccatgaaaaccctgctggttagagtgatgacacccgatctgagagagcggctggaaaacctgagaaagaagcctgaaaatatcccccagcccatcagcaatacatctagagccaacctgaataagctgctgaccgattacaccgaaatgaagaaggcgatcctgcatgtgtactgggaagagttccagaaggaccctgtgggcctgatgagccgggtggcccagcctgccagcaagaagatcgatcagaacaagctgaaacctgagatggacgagaagggcaacctgaccaccgccggctttgcctgctctcagtgtggccagcccctgttcgtgtacaagctggagcaggtgtctgagaagggcaaggcttacaccaactacttcggacggtgcaatgtggccgagcacgaaaagctgatcctgctggcccagctgaagcccgagaaggatagcgacgaagccgtgacatatagcctgggaaagtttgggcagagggccctggatttctacagcattcatgtgaccaaggagtccacccaccccgtgaagcccctggcccagatcgccggaaacagatacgcctccggacctgtgggaaaggccctgagcgacgcatgtatgggcacaatcgcctccttcctgtctaagtaccaggacatcatcatcgaacaccagaaggtggtgaagggcaaccagaagagactggagagcctgcgggagctggccggcaaggaaaacctggaataccctagcgtgaccctgccacctcagcctcacaccaaggagggcgttgatgcctacaacgaagtgatcgcccgggtgcgaatgtgggtgaacctgaacctgtggcagaagctgaagctaagcagagatgatgccaagcctctgctgagactgaagggattcccttcctttcctctggtcgagagacaggccaacgaagtggactggtgggacatggtgtgtaacgtgaagaagctgatcaacgagaaaaaggaggatggcaaggtgttttggcagaatctggctggctacaagagacaggaagccctgagaccatacctgagcagcgaggaagatcggaagaagggaaagaaattcgctcggtaccagctgggcgacctgctgctgcacctggaaaagaagcacggcgaggactggggaaaggtgtacgacgaggcctgggagcggattgacaagaaagtggaaggcctgagcaagcacatcaagctggaagaggaacggagaagcgaggacgcccagagcaaggccgccctgaccgactggctgcgggctaaggccagcttcgtgatcgagggcctgaaggaggccgacaaggacgagttctgcagatgcgagctgaagctgcagaagtggtacggggacctgcggggaaagcccttcgccatcgaagccgagaacagcatcctggacatcagcggcttcagcaagcagtacaactgtgccttcatctggcagaaggacggcgtgaagaagctgaacctgtacctgatcatcaactacttcaagggcggcaagctgcggttcaagaagatcaaacctgaagccttcgaagccaacagattctacaccgtgatcaacaaaaagagcggcgagatcgtgcccatggaggtgaacttcaacttcgacgaccccaacctgatcatcctgcctctggcctttggcaagagacagggcagagaattcatctggaacgacctgctgtccctggaaaccggcagcctgaagctggccaacggaagagtgatcgagaagacactgtacaacagaagaacccggcaggatgagcctgccctgttcgtggccctgaccttcgagcggcgggaggtcctggactcctccaatatcaaaccaatgaacctgatcggcgtggcaagaggcgaaaacatccccgccgtgatcgccctgaccgaccccgagggctgcccactgagccggtttaaggatagcctgggaaacccaacccacatcctgagaatcggcgagagctataaggagaagcagcggaccatccaggccaagaaggaggtggagcagcggagagccggcggctacagccggaagtacgccagcaaagccaagaatctggcagacgatatggtgagaaacaccgctagagatctgctgtactacgccgtgacccaggatgccatgctgatcttcgccaacctgagccggggcttcggccggcagggcaagcggaccttcatggccgagagacagtacacacggatggaggactggctgaccgccaagctggcctacgagggcctgagcaagacctacctgtccaagacactggcccagtacacctccaagacatgcagcaactgtgggtttaccatcaccagcgccgactacgacagggtgctggagaagctgaagaagacagcaacaggctggatgaccacaattaacggcaaggagctgaaggtggagggccagattacctactacaacagatacaagagacagaacgtagtcaaggacctgtccgtcgagctggatagactgagcgaagaatctgtgaacaacgacatctcctcctggacaaagggcagaagcggagaagctctgagcctcctgaagaaaagattctcccatagacccgtgcaggagaagttcgtgtgcctgaactgcggcttcgagacacacgcagccgagcaagccgccctgaacatcgccagatcctggctgttcctgcggagccaggagtacaagaaataccagacaaacaagacaaccggcaacaccgataagagagccttcgtcgagacctggcagtccttttaccggaagaagcttaaggaggtgtggaaacctgccgtgcggtctggcggatctggcggaggctccacaagccacggcagcagctacgagggcagcgtgagcttcagggacgtggccatcaacttcagcagggaggagtggaggcacctggacctgagccagaggaacctgtactgggacgtgatgctggagacctacagccacctgctgagcgtgggctaccagttccccaagcccgaggtggtgatgctggagcagggcaacgagccctgggccctgcagggcgagaggcccaggcacagctgccccggcgagaccagccccaagaaaaagagaaaagtctaagctgccttctgcggggcttgccttctggccatgcccttcttctctcccttgcacctgtacctcttggtctttgaataaagcctgagtaggaaggctagcaaaaaaaaaaaaaaaaaaaaaaaaaaaaaaaaaaaaaaaaaaaaaaaaaaaaaaaaaaaaaaaaaaaaaaaaaaaaaaaa

SEQ ID NO: 6752 - RNA, 5797 nt, synthetic construct
  source 1..5797: mol_type = other RNA
aggaaataagagagaaaagaagagtaagaagaaatataagagccaccatggcccctaagaagaagcgtaaagtgagccggatggaacgcctcgtctacgaggtgcggcagaagtgcagaaacatcgaggacatctgcatctcctgcggatctctgaacgtgaccctggagcacccactgttcatcggcggcatgtgccagaactgtaaaaactgttttctggagtgtgcctatcaatacgacgatgacggctaccagagctactgcaccatctgttgcggcggaagagaggtgctgatgtgtggaaataacaactgctgccggtgcttctgcgtggaatgcgtggacctgctggtgggccccggcgccgcccaggccgctattaaggaagatccttggaactgctacatgtgcggccacaagggcacatacggcctgctgagacggagagaggactggcctagcagactgcagatgttcttcgccaataaccacgaccaggagttcgacccccctaaggtgtaccctcccgtccccgccgagaagagaaagcccatccgggtcctgagcctgttcgatggcatcgccaccggtctgctggtgctgaaggacctgggcatccaggtggataggtacattgcctccgaggtgtgcgaggactccatcaccgtgggaatggtgcgtcatcagggcaagatcatgtacgtgggcgacgtgcggagcgtgacacagaagcatatccaggagtggggccctttcgacctggtgatcggcggcagcccttgcaatgacctgagcatcgtgaacccagcccggaagggcctgtacgagggaaccggcagactgttcttcgagttttacagactgctgcacgacgcccggcctaaggaaggcgacgaccggcccttcttttggctgttcgagaatgtggtggccatgggagtcagcgacaagcgggatattagccggttcctggagagcaaccccgtgatgatcgatgccaaggaagtgagcgccgcccaccgggccagatacttctggggcaatctgcctggcatgaacagacccctggccagcaccgtgaacgacaagctggagctgcaggagtgcctggagcacggccggatcgccaagttcagcaaggtgagaaccatcaccacccgaagcaacagcatcaaacaaggcaaggaccagcactttcctgtgttcatgaacgagaaggaggacatcctgtggtgtaccgagatggagagagtgttcgggttcccagtccactacacagatgtcagcaacatgtctagactggccagacagagactgctgggaagaagctggtccgtccctgtgatcagacacctgttcgcccctctgaaggagtacttcgcctgcgtgagcagcggcaacagcaacgccaacagccggggccccagcttctctagcggcctggtgccactgtccctgagagggagccacatgggccccatggagatctacaaaaccgtgagcgcctggaagcggcagcctgtgcgcgtgctgagcctgtttcggaatatcgataaagtcctgaaaagcctgggattcctggagagcggctctggctccggcggtggcaccctgaagtacgtggaggatgtgacaaacgtggtcagacgggatgtggagaagtggggccccttcgatctggtgtacggcagcacccaacccctgggcagctcttgtgaccggtgccctggctggtacatgtttcagttccaccggatcctgcagtacgccctgccgagacaggagtcccagcggccattcttttggattttcatggacaacttgctgctgaccgaggatgaccaggaaactaccactcggttcctgcagaccgaagccgtgaccctgcaggacgtgagaggccgggactaccagaacgccatgcgggtgtggtccaacatccctggactgaaaagcaagcacgcacctctgacccctaaagaagaggagtacctgcaggcccaggtgcggagcagaagcaagctggacgcccctaaggtggatctgctggtgaagaattgcctcctgcccctgagagagtacttcaagtatttcagccagaatagtctgcccctgggcggcccaagcagcggcgcccctcctcccagcggcggcagcccagccggctccccaacctctaccgaggagggcacctctgagtccgccacccccgagagcggccctggcacctccaccgagcccagcgagggcagcgcacccggcagccctgccggcagccccacctccacagaggagggaaccagcaccgagcccagcgaaggcagcgccccaggcaccagcaccgagcctagtgagggcggctctggcggcggcagcgcccaggagattaaacggatcaacaagatcagaagaagacttgtgaaagacagcaacaccaagaaggccggcaagacaggccccatgaaaaccctgctggttagagtgatgacacccgatctgagagagcggctggaaaacctgagaaagaagcctgaaaatatcccccagcccatcagcaatacatctagagccaacctgaataagctgctgaccgattacaccgaaatgaagaaggcgatcctgcatgtgtactgggaagagttccagaaggaccctgtgggcctgatgagccgggtggcccagcctgccagcaagaagatcgatcagaacaagctgaaacctgagatggacgagaagggcaacctgaccaccgccggctttgcctgctctcagtgtggccagcccctgttcgtgtacaagctggagcaggtgtctgagaagggcaaggcttacaccaactacttcggacggtgcaatgtggccgagcacgaaaagctgatcctgctggcccagctgaagcccgagaaggatagcgacgaagccgtgacatatagcctgggaaagtttgggcagagggccctggatttctacagcattcatgtgaccaaggagtccacccaccccgtgaagcccctggcccagatcgccggaaacagatacgcctccggacctgtgggaaaggccctgagcgacgcatgtatgggcacaatcgcctccttcctgtctaagtaccaggacatcatcatcgaacaccagaaggtggtgaagggcaaccagaagagactggagagcctgcgggagctggccggcaaggaaaacctggaataccctagcgtgaccctgccacctcagcctcacaccaaggagggcgttgatgcctacaacgaagtgatcgcccgggtgcgaatgtgggtgaacctgaacctgtggcagaagctgaagctaagcagagatgatgccaagcctctgctgagactgaagggattcccttcctttcctctggtcgagagacaggccaacgaagtggactggtgggacatggtgtgtaacgtgaagaagctgatcaacgagaaaaaggaggatggcaaggtgttttggcagaatctggctggctacaagagacaggaagccctgagaccatacctgagcagcgaggaagatcggaagaagggaaagaaattcgctcggtaccagctgggcgacctgctgctgcacctggaaaagaagcacggcgaggactggggaaaggtgtacgacgaggcctgggagcggattgacaagaaagtggaaggcctgagcaagcacatcaagctggaagaggaacggagaagcgaggacgcccagagcaaggccgccctgaccgactggctgcgggctaaggccagcttcgtgatcgagggcctgaaggaggccgacaaggacgagttctgcagatgcgagctgaagctgcagaagtggtacggggacctgcggggaaagcccttcgccatcgaagccgagaacagcatcctggacatcagcggcttcagcaagcagtacaactgtgccttcatctggcagaaggacggcgtgaagaagctgaacctgtacctgatcatcaactacttcaagggcggcaagctgcggttcaagaagatcaaacctgaagccttcgaagccaacagattctacaccgtgatcaacaaaaagagcggcgagatcgtgcccatggaggtgaacttcaacttcgacgaccccaacctgatcatcctgcctctggcctttggcaagagacagggcagagaattcatctggaacgacctgctgtccctggaaaccggcagcctgaagctggccaacggaagagtgatcgagaagacactgtacaacagaagaacccggcaggatgagcctgccctgttcgtggccctgaccttcgagcggcgggaggtcctggactcctccaatatcaaaccaatgaacctgatcggcgtggcaagaggcgaaaacatccccgccgtgatcgccctgaccgaccccgagggctgcccactgagccggtttaaggatagcctgggaaacccaacccacatcctgagaatcggcgagagctataaggagaagcagcggaccatccaggccaagaaggaggtggagcagcggagagccggcggctacagccggaagtacgccagcaaagccaagaatctggcagacgatatggtgagaaacaccgctagagatctgctgtactacgccgtgacccaggatgccatgctgatcttcgccaacctgagccggggcttcggccggcagggcaagcggaccttcatggccgagagacagtacacacggatggaggactggctgaccgccaagctggcctacgagggcctgagcaagacctacctgtccaagacactggcccagtacacctccaagacatgcagcaactgtgggtttaccatcaccagcgccgactacgacagggtgctggagaagctgaagaagacagcaacaggctggatgaccacaattaacggcaaggagctgaaggtggagggccagattacctactacaacagatacaagagacagaacgtagtcaaggacctgtccgtcgagctggatagactgagcgaagaatctgtgaacaacgacatctcctcctggacaaagggcagaagcggagaagctctgagcctcctgaagaaaagattctcccatagacccgtgcaggagaagttcgtgtgcctgaactgcggcttcgagacacacgcagccgagcaagccgccctgaacatcgccagatcctggctgttcctgcggagccaggagtacaagaaataccagacaaacaagacaaccggcaacaccgataagagagccttcgtcgagacctggcagtccttttaccggaagaagcttaaggaggtgtggaaacctgccgtgcggtctggcggatctggcggaggctccacaagccagcccggcgccgtgaggttcgccgacgtggccgtgtacttcagccccgaggagtggggctgcctgaggcccgtgcagagggccctgtacagggacgtgatgagggagacctacagccacctggtggccctgggcgtgggcggcaccaagcccaagctgatcagctgggtggaggaggaggccgagctgtggggccccgaggcccaggacctggagggcgccaagtgcctgaccgaggccaacaccagccccaagaaaaagagaaaagtctaagctgccttctgcggggcttgccttctggccatgcccttcttctctcccttgcacctgtacctcttggtctttgaataaagcctgagtaggaaggctagcaaaaaaaaaaaaaaaaaaaaaaaaaaaaaaaaaaaaaaaaaaaaaaaaaaaaaaaaaaaaaaaaaaaaaaaaaaaaaaaa

SEQ ID NO: 6753 - RNA, 5797 nt, synthetic construct
  source 1..5797: mol_type = other RNA
aggaaataagagagaaaagaagagtaagaagaaatataagagccaccatggcccctaagaagaagcgtaaagtgagccggatggaacgcctcgtctacgaggtgcggcagaagtgcagaaacatcgaggacatctgcatctcctgcggatctctgaacgtgaccctggagcacccactgttcatcggcggcatgtgccagaactgtaaaaactgttttctggagtgtgcctatcaatacgacgatgacggctaccagagctactgcaccatctgttgcggcggaagagaggtgctgatgtgtggaaataacaactgctgccggtgcttctgcgtggaatgcgtggacctgctggtgggccccggcgccgcccaggccgctattaaggaagatccttggaactgctacatgtgcggccacaagggcacatacggcctgctgagacggagagaggactggcctagcagactgcagatgttcttcgccaataaccacgaccaggagttcgacccccctaaggtgtaccctcccgtccccgccgagaagagaaagcccatccgggtcctgagcctgttcgatggcatcgccaccggtctgctggtgctgaaggacctgggcatccaggtggataggtacattgcctccgaggtgtgcgaggactccatcaccgtgggaatggtgcgtcatcagggcaagatcatgtacgtgggcgacgtgcggagcgtgacacagaagcatatccaggagtggggccctttcgacctggtgatcggcggcagcccttgcaatgacctgagcatcgtgaacccagcccggaagggcctgtacgagggaaccggcagactgttcttcgagttttacagactgctgcacgacgcccggcctaaggaaggcgacgaccggcccttcttttggctgttcgagaatgtggtggccatgggagtcagcgacaagcgggatattagccggttcctggagagcaaccccgtgatgatcgatgccaaggaagtgagcgccgcccaccgggccagatacttctggggcaatctgcctggcatgaacagacccctggccagcaccgtgaacgacaagctggagctgcaggagtgcctggagcacggccggatcgccaagttcagcaaggtgagaaccatcaccacccgaagcaacagcatcaaacaaggcaaggaccagcactttcctgtgttcatgaacgagaaggaggacatcctgtggtgtaccgagatggagagagtgttcgggttcccagtccactacacagatgtcagcaacatgtctagactggccagacagagactgctgggaagaagctggtccgtccctgtgatcagacacctgttcgcccctctgaaggagtacttcgcctgcgtgagcagcggcaacagcaacgccaacagccggggccccagcttctctagcggcctggtgccactgtccctgagagggagccacatgggccccatggagatctacaaaaccgtgagcgcctggaagcggcagcctgtgcgcgtgctgagcctgtttcggaatatcgataaagtcctgaaaagcctgggattcctggagagcggctctggctccggcggtggcaccctgaagtacgtggaggatgtgacaaacgtggtcagacgggatgtggagaagtggggccccttcgatctggtgtacggcagcacccaacccctgggcagctcttgtgaccggtgccctggctggtacatgtttcagttccaccggatcctgcagtacgccctgccgagacaggagtcccagcggccattcttttggattttcatggacaacttgctgctgaccgaggatgaccaggaaactaccactcggttcctgcagaccgaagccgtgaccctgcaggacgtgagaggccgggactaccagaacgccatgcgggtgtggtccaacatccctggactgaaaagcaagcacgcacctctgacccctaaagaagaggagtacctgcaggcccaggtgcggagcagaagcaagctggacgcccctaaggtggatctgctggtgaagaattgcctcctgcccctgagagagtacttcaagtatttcagccagaatagtctgcccctgggcggcccaagcagcggcgcccctcctcccagcggcggcagcccagccggctccccaacctctaccgaggagggcacctctgagtccgccacccccgagagcggccctggcacctccaccgagcccagcgagggcagcgcacccggcagccctgccggcagccccacctccacagaggagggaaccagcaccgagcccagcgaaggcagcgccccaggcaccagcaccgagcctagtgagggcggctctggcggcggcagcgcccaggagattaaacggatcaacaagatcagaagaagacttgtgaaagacagcaacaccaagaaggccggcaagacaggccccatgaaaaccctgctggttagagtgatgacacccgatctgagagagcggctggaaaacctgagaaagaagcctgaaaatatcccccagcccatcagcaatacatctagagccaacctgaataagctgctgaccgattacaccgaaatgaagaaggcgatcctgcatgtgtactgggaagagttccagaaggaccctgtgggcctgatgagccgggtggcccagcctgccagcaagaagatcgatcagaacaagctgaaacctgagatggacgagaagggcaacctgaccaccgccggctttgcctgctctcagtgtggccagcccctgttcgtgtacaagctggagcaggtgtctgagaagggcaaggcttacaccaactacttcggacggtgcaatgtggccgagcacgaaaagctgatcctgctggcccagctgaagcccgagaaggatagcgacgaagccgtgacatatagcctgggaaagtttgggcagagggccctggatttctacagcattcatgtgaccaaggagtccacccaccccgtgaagcccctggcccagatcgccggaaacagatacgcctccggacctgtgggaaaggccctgagcgacgcatgtatgggcacaatcgcctccttcctgtctaagtaccaggacatcatcatcgaacaccagaaggtggtgaagggcaaccagaagagactggagagcctgcgggagctggccggcaaggaaaacctggaataccctagcgtgaccctgccacctcagcctcacaccaaggagggcgttgatgcctacaacgaagtgatcgcccgggtgcgaatgtgggtgaacctgaacctgtggcagaagctgaagctaagcagagatgatgccaagcctctgctgagactgaagggattcccttcctttcctctggtcgagagacaggccaacgaagtggactggtgggacatggtgtgtaacgtgaagaagctgatcaacgagaaaaaggaggatggcaaggtgttttggcagaatctggctggctacaagagacaggaagccctgagaccatacctgagcagcgaggaagatcggaagaagggaaagaaattcgctcggtaccagctgggcgacctgctgctgcacctggaaaagaagcacggcgaggactggggaaaggtgtacgacgaggcctgggagcggattgacaagaaagtggaaggcctgagcaagcacatcaagctggaagaggaacggagaagcgaggacgcccagagcaaggccgccctgaccgactggctgcgggctaaggccagcttcgtgatcgagggcctgaaggaggccgacaaggacgagttctgcagatgcgagctgaagctgcagaagtggtacggggacctgcggggaaagcccttcgccatcgaagccgagaacagcatcctggacatcagcggcttcagcaagcagtacaactgtgccttcatctggcagaaggacggcgtgaagaagctgaacctgtacctgatcatcaactacttcaagggcggcaagctgcggttcaagaagatcaaacctgaagccttcgaagccaacagattctacaccgtgatcaacaaaaagagcggcgagatcgtgcccatggaggtgaacttcaacttcgacgaccccaacctgatcatcctgcctctggcctttggcaagagacagggcagagaattcatctggaacgacctgctgtccctggaaaccggcagcctgaagctggccaacggaagagtgatcgagaagacactgtacaacagaagaacccggcaggatgagcctgccctgttcgtggccctgaccttcgagcggcgggaggtcctggactcctccaatatcaaaccaatgaacctgatcggcgtggcaagaggcgaaaacatccccgccgtgatcgccctgaccgaccccgagggctgcccactgagccggtttaaggatagcctgggaaacccaacccacatcctgagaatcggcgagagctataaggagaagcagcggaccatccaggccaagaaggaggtggagcagcggagagccggcggctacagccggaagtacgccagcaaagccaagaatctggcagacgatatggtgagaaacaccgctagagatctgctgtactacgccgtgacccaggatgccatgctgatcttcgccaacctgagccggggcttcggccggcagggcaagcggaccttcatggccgagagacagtacacacggatggaggactggctgaccgccaagctggcctacgagggcctgagcaagacctacctgtccaagacactggcccagtacacctccaagacatgcagcaactgtgggtttaccatcaccagcgccgactacgacagggtgctggagaagctgaagaagacagcaacaggctggatgaccacaattaacggcaaggagctgaaggtggagggccagattacctactacaacagatacaagagacagaacgtagtcaaggacctgtccgtcgagctggatagactgagcgaagaatctgtgaacaacgacatctcctcctggacaaagggcagaagcggagaagctctgagcctcctgaagaaaagattctcccatagacccgtgcaggagaagttcgtgtgcctgaactgcggcttcgagacacacgcagccgagcaagccgccctgaacatcgccagatcctggctgttcctgcggagccaggagtacaagaaataccagacaaacaagacaaccggcaacaccgataagagagccttcgtcgagacctggcagtccttttaccggaagaagcttaaggaggtgtggaaacctgccgtgcggtctggcggatctggcggaggctccacaagcttcgaggagctggtgaccttcgaggacgtgttcgtggacttcagccccgaggagctgagcagcctgagcgccgcccagaggaacctgtacagggaggtgatgctggagaactacaggaacctggtgagcctgggctaccagttcagcaagcccgacatcatcagcaggctggaggccgaggagagcagggccatggagaaggacagcaggcacaccgtgatctgccagggcgaggcccacgacaccagccccaagaaaaagagaaaagtctaagctgccttctgcggggcttgccttctggccatgcccttcttctctcccttgcacctgtacctcttggtctttgaataaagcctgagtaggaaggctagcaaaaaaaaaaaaaaaaaaaaaaaaaaaaaaaaaaaaaaaaaaaaaaaaaaaaaaaaaaaaaaaaaaaaaaaaaaaaaaaa

SEQ ID NO: 6754 - RNA, 5797 nt, synthetic construct
  source 1..5797: mol_type = other RNA
aggaaataagagagaaaagaagagtaagaagaaatataagagccaccatggcccctaagaagaagcgtaaagtgagccggatggaacgcctcgtctacgaggtgcggcagaagtgcagaaacatcgaggacatctgcatctcctgcggatctctgaacgtgaccctggagcacccactgttcatcggcggcatgtgccagaactgtaaaaactgttttctggagtgtgcctatcaatacgacgatgacggctaccagagctactgcaccatctgttgcggcggaagagaggtgctgatgtgtggaaataacaactgctgccggtgcttctgcgtggaatgcgtggacctgctggtgggccccggcgccgcccaggccgctattaaggaagatccttggaactgctacatgtgcggccacaagggcacatacggcctgctgagacggagagaggactggcctagcagactgcagatgttcttcgccaataaccacgaccaggagttcgacccccctaaggtgtaccctcccgtccccgccgagaagagaaagcccatccgggtcctgagcctgttcgatggcatcgccaccggtctgctggtgctgaaggacctgggcatccaggtggataggtacattgcctccgaggtgtgcgaggactccatcaccgtgggaatggtgcgtcatcagggcaagatcatgtacgtgggcgacgtgcggagcgtgacacagaagcatatccaggagtggggccctttcgacctggtgatcggcggcagcccttgcaatgacctgagcatcgtgaacccagcccggaagggcctgtacgagggaaccggcagactgttcttcgagttttacagactgctgcacgacgcccggcctaaggaaggcgacgaccggcccttcttttggctgttcgagaatgtggtggccatgggagtcagcgacaagcgggatattagccggttcctggagagcaaccccgtgatgatcgatgccaaggaagtgagcgccgcccaccgggccagatacttctggggcaatctgcctggcatgaacagacccctggccagcaccgtgaacgacaagctggagctgcaggagtgcctggagcacggccggatcgccaagttcagcaaggtgagaaccatcaccacccgaagcaacagcatcaaacaaggcaaggaccagcactttcctgtgttcatgaacgagaaggaggacatcctgtggtgtaccgagatggagagagtgttcgggttcccagtccactacacagatgtcagcaacatgtctagactggccagacagagactgctgggaagaagctggtccgtccctgtgatcagacacctgttcgcccctctgaaggagtacttcgcctgcgtgagcagcggcaacagcaacgccaacagccggggccccagcttctctagcggcctggtgccactgtccctgagagggagccacatgggccccatggagatctacaaaaccgtgagcgcctggaagcggcagcctgtgcgcgtgctgagcctgtttcggaatatcgataaagtcctgaaaagcctgggattcctggagagcggctctggctccggcggtggcaccctgaagtacgtggaggatgtgacaaacgtggtcagacgggatgtggagaagtggggccccttcgatctggtgtacggcagcacccaacccctgggcagctcttgtgaccggtgccctggctggtacatgtttcagttccaccggatcctgcagtacgccctgccgagacaggagtcccagcggccattcttttggattttcatggacaacttgctgctgaccgaggatgaccaggaaactaccactcggttcctgcagaccgaagccgtgaccctgcaggacgtgagaggccgggactaccagaacgccatgcgggtgtggtccaacatccctggactgaaaagcaagcacgcacctctgacccctaaagaagaggagtacctgcaggcccaggtgcggagcagaagcaagctggacgcccctaaggtggatctgctggtgaagaattgcctcctgcccctgagagagtacttcaagtatttcagccagaatagtctgcccctgggcggcccaagcagcggcgcccctcctcccagcggcggcagcccagccggctccccaacctctaccgaggagggcacctctgagtccgccacccccgagagcggccctggcacctccaccgagcccagcgagggcagcgcacccggcagccctgccggcagccccacctccacagaggagggaaccagcaccgagcccagcgaaggcagcgccccaggcaccagcaccgagcctagtgagggcggctctggcggcggcagcgcccaggagattaaacggatcaacaagatcagaagaagacttgtgaaagacagcaacaccaagaaggccggcaagacaggccccatgaaaaccctgctggttagagtgatgacacccgatctgagagagcggctggaaaacctgagaaagaagcctgaaaatatcccccagcccatcagcaatacatctagagccaacctgaataagctgctgaccgattacaccgaaatgaagaaggcgatcctgcatgtgtactgggaagagttccagaaggaccctgtgggcctgatgagccgggtggcccagcctgccagcaagaagatcgatcagaacaagctgaaacctgagatggacgagaagggcaacctgaccaccgccggctttgcctgctctcagtgtggccagcccctgttcgtgtacaagctggagcaggtgtctgagaagggcaaggcttacaccaactacttcggacggtgcaatgtggccgagcacgaaaagctgatcctgctggcccagctgaagcccgagaaggatagcgacgaagccgtgacatatagcctgggaaagtttgggcagagggccctggatttctacagcattcatgtgaccaaggagtccacccaccccgtgaagcccctggcccagatcgccggaaacagatacgcctccggacctgtgggaaaggccctgagcgacgcatgtatgggcacaatcgcctccttcctgtctaagtaccaggacatcatcatcgaacaccagaaggtggtgaagggcaaccagaagagactggagagcctgcgggagctggccggcaaggaaaacctggaataccctagcgtgaccctgccacctcagcctcacaccaaggagggcgttgatgcctacaacgaagtgatcgcccgggtgcgaatgtgggtgaacctgaacctgtggcagaagctgaagctaagcagagatgatgccaagcctctgctgagactgaagggattcccttcctttcctctggtcgagagacaggccaacgaagtggactggtgggacatggtgtgtaacgtgaagaagctgatcaacgagaaaaaggaggatggcaaggtgttttggcagaatctggctggctacaagagacaggaagccctgagaccatacctgagcagcgaggaagatcggaagaagggaaagaaattcgctcggtaccagctgggcgacctgctgctgcacctggaaaagaagcacggcgaggactggggaaaggtgtacgacgaggcctgggagcggattgacaagaaagtggaaggcctgagcaagcacatcaagctggaagaggaacggagaagcgaggacgcccagagcaaggccgccctgaccgactggctgcgggctaaggccagcttcgtgatcgagggcctgaaggaggccgacaaggacgagttctgcagatgcgagctgaagctgcagaagtggtacggggacctgcggggaaagcccttcgccatcgaagccgagaacagcatcctggacatcagcggcttcagcaagcagtacaactgtgccttcatctggcagaaggacggcgtgaagaagctgaacctgtacctgatcatcaactacttcaagggcggcaagctgcggttcaagaagatcaaacctgaagccttcgaagccaacagattctacaccgtgatcaacaaaaagagcggcgagatcgtgcccatggaggtgaacttcaacttcgacgaccccaacctgatcatcctgcctctggcctttggcaagagacagggcagagaattcatctggaacgacctgctgtccctggaaaccggcagcctgaagctggccaacggaagagtgatcgagaagacactgtacaacagaagaacccggcaggatgagcctgccctgttcgtggccctgaccttcgagcggcgggaggtcctggactcctccaatatcaaaccaatgaacctgatcggcgtggcaagaggcgaaaacatccccgccgtgatcgccctgaccgaccccgagggctgcccactgagccggtttaaggatagcctgggaaacccaacccacatcctgagaatcggcgagagctataaggagaagcagcggaccatccaggccaagaaggaggtggagcagcggagagccggcggctacagccggaagtacgccagcaaagccaagaatctggcagacgatatggtgagaaacaccgctagagatctgctgtactacgccgtgacccaggatgccatgctgatcttcgccaacctgagccggggcttcggccggcagggcaagcggaccttcatggccgagagacagtacacacggatggaggactggctgaccgccaagctggcctacgagggcctgagcaagacctacctgtccaagacactggcccagtacacctccaagacatgcagcaactgtgggtttaccatcaccagcgccgactacgacagggtgctggagaagctgaagaagacagcaacaggctggatgaccacaattaacggcaaggagctgaaggtggagggccagattacctactacaacagatacaagagacagaacgtagtcaaggacctgtccgtcgagctggatagactgagcgaagaatctgtgaacaacgacatctcctcctggacaaagggcagaagcggagaagctctgagcctcctgaagaaaagattctcccatagacccgtgcaggagaagttcgtgtgcctgaactgcggcttcgagacacacgcagccgagcaagccgccctgaacatcgccagatcctggctgttcctgcggagccaggagtacaagaaataccagacaaacaagacaaccggcaacaccgataagagagccttcgtcgagacctggcagtccttttaccggaagaagcttaaggaggtgtggaaacctgccgtgcggtctggcggatctggcggaggctccacaagccagccccaggaggccctgaccttcaaggacgtggaggtgaccttcagccaggacgagtggggctggctggacgccagccagaggaacctgtacagggacgtgatgctggagaactacggcaacatcgccagcctgatgggccccttcaccaagcccgccctgatcagctggctggagaccagggagccctgggtgctgaacgtgcagggcgcccagcccgagggcaaccccggcgccgacgtgaccagccccaagaaaaagagaaaagtctaagctgccttctgcggggcttgccttctggccatgcccttcttctctcccttgcacctgtacctcttggtctttgaataaagcctgagtaggaaggctagcaaaaaaaaaaaaaaaaaaaaaaaaaaaaaaaaaaaaaaaaaaaaaaaaaaaaaaaaaaaaaaaaaaaaaaaaaaaaaaaa

SEQ ID NO: 6755 - RNA, 5797 nt, synthetic construct
  source 1..5797: mol_type = other RNA
aggaaataagagagaaaagaagagtaagaagaaatataagagccaccatggcccctaagaagaagcgtaaagtgagccggatggaacgcctcgtctacgaggtgcggcagaagtgcagaaacatcgaggacatctgcatctcctgcggatctctgaacgtgaccctggagcacccactgttcatcggcggcatgtgccagaactgtaaaaactgttttctggagtgtgcctatcaatacgacgatgacggctaccagagctactgcaccatctgttgcggcggaagagaggtgctgatgtgtggaaataacaactgctgccggtgcttctgcgtggaatgcgtggacctgctggtgggccccggcgccgcccaggccgctattaaggaagatccttggaactgctacatgtgcggccacaagggcacatacggcctgctgagacggagagaggactggcctagcagactgcagatgttcttcgccaataaccacgaccaggagttcgacccccctaaggtgtaccctcccgtccccgccgagaagagaaagcccatccgggtcctgagcctgttcgatggcatcgccaccggtctgctggtgctgaaggacctgggcatccaggtggataggtacattgcctccgaggtgtgcgaggactccatcaccgtgggaatggtgcgtcatcagggcaagatcatgtacgtgggcgacgtgcggagcgtgacacagaagcatatccaggagtggggccctttcgacctggtgatcggcggcagcccttgcaatgacctgagcatcgtgaacccagcccggaagggcctgtacgagggaaccggcagactgttcttcgagttttacagactgctgcacgacgcccggcctaaggaaggcgacgaccggcccttcttttggctgttcgagaatgtggtggccatgggagtcagcgacaagcgggatattagccggttcctggagagcaaccccgtgatgatcgatgccaaggaagtgagcgccgcccaccgggccagatacttctggggcaatctgcctggcatgaacagacccctggccagcaccgtgaacgacaagctggagctgcaggagtgcctggagcacggccggatcgccaagttcagcaaggtgagaaccatcaccacccgaagcaacagcatcaaacaaggcaaggaccagcactttcctgtgttcatgaacgagaaggaggacatcctgtggtgtaccgagatggagagagtgttcgggttcccagtccactacacagatgtcagcaacatgtctagactggccagacagagactgctgggaagaagctggtccgtccctgtgatcagacacctgttcgcccctctgaaggagtacttcgcctgcgtgagcagcggcaacagcaacgccaacagccggggccccagcttctctagcggcctggtgccactgtccctgagagggagccacatgggccccatggagatctacaaaaccgtgagcgcctggaagcggcagcctgtgcgcgtgctgagcctgtttcggaatatcgataaagtcctgaaaagcctgggattcctggagagcggctctggctccggcggtggcaccctgaagtacgtggaggatgtgacaaacgtggtcagacgggatgtggagaagtggggccccttcgatctggtgtacggcagcacccaacccctgggcagctcttgtgaccggtgccctggctggtacatgtttcagttccaccggatcctgcagtacgccctgccgagacaggagtcccagcggccattcttttggattttcatggacaacttgctgctgaccgaggatgaccaggaaactaccactcggttcctgcagaccgaagccgtgaccctgcaggacgtgagaggccgggactaccagaacgccatgcgggtgtggtccaacatccctggactgaaaagcaagcacgcacctctgacccctaaagaagaggagtacctgcaggcccaggtgcggagcagaagcaagctggacgcccctaaggtggatctgctggtgaagaattgcctcctgcccctgagagagtacttcaagtatttcagccagaatagtctgcccctgggcggcccaagcagcggcgcccctcctcccagcggcggcagcccagccggctccccaacctctaccgaggagggcacctctgagtccgccacccccgagagcggccctggcacctccaccgagcccagcgagggcagcgcacccggcagccctgccggcagccccacctccacagaggagggaaccagcaccgagcccagcgaaggcagcgccccaggcaccagcaccgagcctagtgagggcggctctggcggcggcagcgcccaggagattaaacggatcaacaagatcagaagaagacttgtgaaagacagcaacaccaagaaggccggcaagacaggccccatgaaaaccctgctggttagagtgatgacacccgatctgagagagcggctggaaaacctgagaaagaagcctgaaaatatcccccagcccatcagcaatacatctagagccaacctgaataagctgctgaccgattacaccgaaatgaagaaggcgatcctgcatgtgtactgggaagagttccagaaggaccctgtgggcctgatgagccgggtggcccagcctgccagcaagaagatcgatcagaacaagctgaaacctgagatggacgagaagggcaacctgaccaccgccggctttgcctgctctcagtgtggccagcccctgttcgtgtacaagctggagcaggtgtctgagaagggcaaggcttacaccaactacttcggacggtgcaatgtggccgagcacgaaaagctgatcctgctggcccagctgaagcccgagaaggatagcgacgaagccgtgacatatagcctgggaaagtttgggcagagggccctggatttctacagcattcatgtgaccaaggagtccacccaccccgtgaagcccctggcccagatcgccggaaacagatacgcctccggacctgtgggaaaggccctgagcgacgcatgtatgggcacaatcgcctccttcctgtctaagtaccaggacatcatcatcgaacaccagaaggtggtgaagggcaaccagaagagactggagagcctgcgggagctggccggcaaggaaaacctggaataccctagcgtgaccctgccacctcagcctcacaccaaggagggcgttgatgcctacaacgaagtgatcgcccgggtgcgaatgtgggtgaacctgaacctgtggcagaagctgaagctaagcagagatgatgccaagcctctgctgagactgaagggattcccttcctttcctctggtcgagagacaggccaacgaagtggactggtgggacatggtgtgtaacgtgaagaagctgatcaacgagaaaaaggaggatggcaaggtgttttggcagaatctggctggctacaagagacaggaagccctgagaccatacctgagcagcgaggaagatcggaagaagggaaagaaattcgctcggtaccagctgggcgacctgctgctgcacctggaaaagaagcacggcgaggactggggaaaggtgtacgacgaggcctgggagcggattgacaagaaagtggaaggcctgagcaagcacatcaagctggaagaggaacggagaagcgaggacgcccagagcaaggccgccctgaccgactggctgcgggctaaggccagcttcgtgatcgagggcctgaaggaggccgacaaggacgagttctgcagatgcgagctgaagctgcagaagtggtacggggacctgcggggaaagcccttcgccatcgaagccgagaacagcatcctggacatcagcggcttcagcaagcagtacaactgtgccttcatctggcagaaggacggcgtgaagaagctgaacctgtacctgatcatcaactacttcaagggcggcaagctgcggttcaagaagatcaaacctgaagccttcgaagccaacagattctacaccgtgatcaacaaaaagagcggcgagatcgtgcccatggaggtgaacttcaacttcgacgaccccaacctgatcatcctgcctctggcctttggcaagagacagggcagagaattcatctggaacgacctgctgtccctggaaaccggcagcctgaagctggccaacggaagagtgatcgagaagacactgtacaacagaagaacccggcaggatgagcctgccctgttcgtggccctgaccttcgagcggcgggaggtcctggactcctccaatatcaaaccaatgaacctgatcggcgtggcaagaggcgaaaacatccccgccgtgatcgccctgaccgaccccgagggctgcccactgagccggtttaaggatagcctgggaaacccaacccacatcctgagaatcggcgagagctataaggagaagcagcggaccatccaggccaagaaggaggtggagcagcggagagccggcggctacagccggaagtacgccagcaaagccaagaatctggcagacgatatggtgagaaacaccgctagagatctgctgtactacgccgtgacccaggatgccatgctgatcttcgccaacctgagccggggcttcggccggcagggcaagcggaccttcatggccgagagacagtacacacggatggaggactggctgaccgccaagctggcctacgagggcctgagcaagacctacctgtccaagacactggcccagtacacctccaagacatgcagcaactgtgggtttaccatcaccagcgccgactacgacagggtgctggagaagctgaagaagacagcaacaggctggatgaccacaattaacggcaaggagctgaaggtggagggccagattacctactacaacagatacaagagacagaacgtagtcaaggacctgtccgtcgagctggatagactgagcgaagaatctgtgaacaacgacatctcctcctggacaaagggcagaagcggagaagctctgagcctcctgaagaaaagattctcccatagacccgtgcaggagaagttcgtgtgcctgaactgcggcttcgagacacacgcagccgagcaagccgccctgaacatcgccagatcctggctgttcctgcggagccaggagtacaagaaataccagacaaacaagacaaccggcaacaccgataagagagccttcgtcgagacctggcagtccttttaccggaagaagcttaaggaggtgtggaaacctgccgtgcggtctggcggatctggcggaggctccacaagcccccagaagagcgtgaccttcgaggacgtggccgtgtacttcacccagaccgagtgggacggcctgagccccgcccagagggccctgtacagggacgtgatgctggagaactacggcaacgtggccagcctgggcttccccctgctgaagcccaccgtgatcagccagctggagggcggcggcgagctggagggccccagccccctgaccagcggcaccggcaccggccaccagggcctgtggaccagccccaagaaaaagagaaaagtctaagctgccttctgcggggcttgccttctggccatgcccttcttctctcccttgcacctgtacctcttggtctttgaataaagcctgagtaggaaggctagcaaaaaaaaaaaaaaaaaaaaaaaaaaaaaaaaaaaaaaaaaaaaaaaaaaaaaaaaaaaaaaaaaaaaaaaaaaaaaaaa

SEQ ID NO: 6756 - RNA, 5797 nt, synthetic construct
  source 1..5797: mol_type = other RNA
aggaaataagagagaaaagaagagtaagaagaaatataagagccaccatggcccctaagaagaagcgtaaagtgagccggatggaacgcctcgtctacgaggtgcggcagaagtgcagaaacatcgaggacatctgcatctcctgcggatctctgaacgtgaccctggagcacccactgttcatcggcggcatgtgccagaactgtaaaaactgttttctggagtgtgcctatcaatacgacgatgacggctaccagagctactgcaccatctgttgcggcggaagagaggtgctgatgtgtggaaataacaactgctgccggtgcttctgcgtggaatgcgtggacctgctggtgggccccggcgccgcccaggccgctattaaggaagatccttggaactgctacatgtgcggccacaagggcacatacggcctgctgagacggagagaggactggcctagcagactgcagatgttcttcgccaataaccacgaccaggagttcgacccccctaaggtgtaccctcccgtccccgccgagaagagaaagcccatccgggtcctgagcctgttcgatggcatcgccaccggtctgctggtgctgaaggacctgggcatccaggtggataggtacattgcctccgaggtgtgcgaggactccatcaccgtgggaatggtgcgtcatcagggcaagatcatgtacgtgggcgacgtgcggagcgtgacacagaagcatatccaggagtggggccctttcgacctggtgatcggcggcagcccttgcaatgacctgagcatcgtgaacccagcccggaagggcctgtacgagggaaccggcagactgttcttcgagttttacagactgctgcacgacgcccggcctaaggaaggcgacgaccggcccttcttttggctgttcgagaatgtggtggccatgggagtcagcgacaagcgggatattagccggttcctggagagcaaccccgtgatgatcgatgccaaggaagtgagcgccgcccaccgggccagatacttctggggcaatctgcctggcatgaacagacccctggccagcaccgtgaacgacaagctggagctgcaggagtgcctggagcacggccggatcgccaagttcagcaaggtgagaaccatcaccacccgaagcaacagcatcaaacaaggcaaggaccagcactttcctgtgttcatgaacgagaaggaggacatcctgtggtgtaccgagatggagagagtgttcgggttcccagtccactacacagatgtcagcaacatgtctagactggccagacagagactgctgggaagaagctggtccgtccctgtgatcagacacctgttcgcccctctgaaggagtacttcgcctgcgtgagcagcggcaacagcaacgccaacagccggggccccagcttctctagcggcctggtgccactgtccctgagagggagccacatgggccccatggagatctacaaaaccgtgagcgcctggaagcggcagcctgtgcgcgtgctgagcctgtttcggaatatcgataaagtcctgaaaagcctgggattcctggagagcggctctggctccggcggtggcaccctgaagtacgtggaggatgtgacaaacgtggtcagacgggatgtggagaagtggggccccttcgatctggtgtacggcagcacccaacccctgggcagctcttgtgaccggtgccctggctggtacatgtttcagttccaccggatcctgcagtacgccctgccgagacaggagtcccagcggccattcttttggattttcatggacaacttgctgctgaccgaggatgaccaggaaactaccactcggttcctgcagaccgaagccgtgaccctgcaggacgtgagaggccgggactaccagaacgccatgcgggtgtggtccaacatccctggactgaaaagcaagcacgcacctctgacccctaaagaagaggagtacctgcaggcccaggtgcggagcagaagcaagctggacgcccctaaggtggatctgctggtgaagaattgcctcctgcccctgagagagtacttcaagtatttcagccagaatagtctgcccctgggcggcccaagcagcggcgcccctcctcccagcggcggcagcccagccggctccccaacctctaccgaggagggcacctctgagtccgccacccccgagagcggccctggcacctccaccgagcccagcgagggcagcgcacccggcagccctgccggcagccccacctccacagaggagggaaccagcaccgagcccagcgaaggcagcgccccaggcaccagcaccgagcctagtgagggcggctctggcggcggcagcgcccaggagattaaacggatcaacaagatcagaagaagacttgtgaaagacagcaacaccaagaaggccggcaagacaggccccatgaaaaccctgctggttagagtgatgacacccgatctgagagagcggctggaaaacctgagaaagaagcctgaaaatatcccccagcccatcagcaatacatctagagccaacctgaataagctgctgaccgattacaccgaaatgaagaaggcgatcctgcatgtgtactgggaagagttccagaaggaccctgtgggcctgatgagccgggtggcccagcctgccagcaagaagatcgatcagaacaagctgaaacctgagatggacgagaagggcaacctgaccaccgccggctttgcctgctctcagtgtggccagcccctgttcgtgtacaagctggagcaggtgtctgagaagggcaaggcttacaccaactacttcggacggtgcaatgtggccgagcacgaaaagctgatcctgctggcccagctgaagcccgagaaggatagcgacgaagccgtgacatatagcctgggaaagtttgggcagagggccctggatttctacagcattcatgtgaccaaggagtccacccaccccgtgaagcccctggcccagatcgccggaaacagatacgcctccggacctgtgggaaaggccctgagcgacgcatgtatgggcacaatcgcctccttcctgtctaagtaccaggacatcatcatcgaacaccagaaggtggtgaagggcaaccagaagagactggagagcctgcgggagctggccggcaaggaaaacctggaataccctagcgtgaccctgccacctcagcctcacaccaaggagggcgttgatgcctacaacgaagtgatcgcccgggtgcgaatgtgggtgaacctgaacctgtggcagaagctgaagctaagcagagatgatgccaagcctctgctgagactgaagggattcccttcctttcctctggtcgagagacaggccaacgaagtggactggtgggacatggtgtgtaacgtgaagaagctgatcaacgagaaaaaggaggatggcaaggtgttttggcagaatctggctggctacaagagacaggaagccctgagaccatacctgagcagcgaggaagatcggaagaagggaaagaaattcgctcggtaccagctgggcgacctgctgctgcacctggaaaagaagcacggcgaggactggggaaaggtgtacgacgaggcctgggagcggattgacaagaaagtggaaggcctgagcaagcacatcaagctggaagaggaacggagaagcgaggacgcccagagcaaggccgccctgaccgactggctgcgggctaaggccagcttcgtgatcgagggcctgaaggaggccgacaaggacgagttctgcagatgcgagctgaagctgcagaagtggtacggggacctgcggggaaagcccttcgccatcgaagccgagaacagcatcctggacatcagcggcttcagcaagcagtacaactgtgccttcatctggcagaaggacggcgtgaagaagctgaacctgtacctgatcatcaactacttcaagggcggcaagctgcggttcaagaagatcaaacctgaagccttcgaagccaacagattctacaccgtgatcaacaaaaagagcggcgagatcgtgcccatggaggtgaacttcaacttcgacgaccccaacctgatcatcctgcctctggcctttggcaagagacagggcagagaattcatctggaacgacctgctgtccctggaaaccggcagcctgaagctggccaacggaagagtgatcgagaagacactgtacaacagaagaacccggcaggatgagcctgccctgttcgtggccctgaccttcgagcggcgggaggtcctggactcctccaatatcaaaccaatgaacctgatcggcgtggcaagaggcgaaaacatccccgccgtgatcgccctgaccgaccccgagggctgcccactgagccggtttaaggatagcctgggaaacccaacccacatcctgagaatcggcgagagctataaggagaagcagcggaccatccaggccaagaaggaggtggagcagcggagagccggcggctacagccggaagtacgccagcaaagccaagaatctggcagacgatatggtgagaaacaccgctagagatctgctgtactacgccgtgacccaggatgccatgctgatcttcgccaacctgagccggggcttcggccggcagggcaagcggaccttcatggccgagagacagtacacacggatggaggactggctgaccgccaagctggcctacgagggcctgagcaagacctacctgtccaagacactggcccagtacacctccaagacatgcagcaactgtgggtttaccatcaccagcgccgactacgacagggtgctggagaagctgaagaagacagcaacaggctggatgaccacaattaacggcaaggagctgaaggtggagggccagattacctactacaacagatacaagagacagaacgtagtcaaggacctgtccgtcgagctggatagactgagcgaagaatctgtgaacaacgacatctcctcctggacaaagggcagaagcggagaagctctgagcctcctgaagaaaagattctcccatagacccgtgcaggagaagttcgtgtgcctgaactgcggcttcgagacacacgcagccgagcaagccgccctgaacatcgccagatcctggctgttcctgcggagccaggagtacaagaaataccagacaaacaagacaaccggcaacaccgataagagagccttcgtcgagacctggcagtccttttaccggaagaagcttaaggaggtgtggaaacctgccgtgcggtctggcggatctggcggaggctccacaagcagccagatccccctgaccttccaggacgtggccgtggacttcacctgggaggagtggggcctgctggagcccagccagaaggacatgtactgggacgtgatgctggagaactacgagaacttcgtgagcctgggcggcctgcccatctgcctgcccgacgtgatcagcaggatggagaggatcgaggccccctggatggccgagggcggcgtgctggtgagcaccttcctgggcagcctgagcaccagccccaagaaaaagagaaaagtctaagctgccttctgcggggcttgccttctggccatgcccttcttctctcccttgcacctgtacctcttggtctttgaataaagcctgagtaggaaggctagcaaaaaaaaaaaaaaaaaaaaaaaaaaaaaaaaaaaaaaaaaaaaaaaaaaaaaaaaaaaaaaaaaaaaaaaaaaaaaaaa

SEQ ID NO: 6757 - RNA, 5797 nt, synthetic construct
  source 1..5797: mol_type = other RNA
aggaaataagagagaaaagaagagtaagaagaaatataagagccaccatggcccctaagaagaagcgtaaagtgagccggatggaacgcctcgtctacgaggtgcggcagaagtgcagaaacatcgaggacatctgcatctcctgcggatctctgaacgtgaccctggagcacccactgttcatcggcggcatgtgccagaactgtaaaaactgttttctggagtgtgcctatcaatacgacgatgacggctaccagagctactgcaccatctgttgcggcggaagagaggtgctgatgtgtggaaataacaactgctgccggtgcttctgcgtggaatgcgtggacctgctggtgggccccggcgccgcccaggccgctattaaggaagatccttggaactgctacatgtgcggccacaagggcacatacggcctgctgagacggagagaggactggcctagcagactgcagatgttcttcgccaataaccacgaccaggagttcgacccccctaaggtgtaccctcccgtccccgccgagaagagaaagcccatccgggtcctgagcctgttcgatggcatcgccaccggtctgctggtgctgaaggacctgggcatccaggtggataggtacattgcctccgaggtgtgcgaggactccatcaccgtgggaatggtgcgtcatcagggcaagatcatgtacgtgggcgacgtgcggagcgtgacacagaagcatatccaggagtggggccctttcgacctggtgatcggcggcagcccttgcaatgacctgagcatcgtgaacccagcccggaagggcctgtacgagggaaccggcagactgttcttcgagttttacagactgctgcacgacgcccggcctaaggaaggcgacgaccggcccttcttttggctgttcgagaatgtggtggccatgggagtcagcgacaagcgggatattagccggttcctggagagcaaccccgtgatgatcgatgccaaggaagtgagcgccgcccaccgggccagatacttctggggcaatctgcctggcatgaacagacccctggccagcaccgtgaacgacaagctggagctgcaggagtgcctggagcacggccggatcgccaagttcagcaaggtgagaaccatcaccacccgaagcaacagcatcaaacaaggcaaggaccagcactttcctgtgttcatgaacgagaaggaggacatcctgtggtgtaccgagatggagagagtgttcgggttcccagtccactacacagatgtcagcaacatgtctagactggccagacagagactgctgggaagaagctggtccgtccctgtgatcagacacctgttcgcccctctgaaggagtacttcgcctgcgtgagcagcggcaacagcaacgccaacagccggggccccagcttctctagcggcctggtgccactgtccctgagagggagccacatgggccccatggagatctacaaaaccgtgagcgcctggaagcggcagcctgtgcgcgtgctgagcctgtttcggaatatcgataaagtcctgaaaagcctgggattcctggagagcggctctggctccggcggtggcaccctgaagtacgtggaggatgtgacaaacgtggtcagacgggatgtggagaagtggggccccttcgatctggtgtacggcagcacccaacccctgggcagctcttgtgaccggtgccctggctggtacatgtttcagttccaccggatcctgcagtacgccctgccgagacaggagtcccagcggccattcttttggattttcatggacaacttgctgctgaccgaggatgaccaggaaactaccactcggttcctgcagaccgaagccgtgaccctgcaggacgtgagaggccgggactaccagaacgccatgcgggtgtggtccaacatccctggactgaaaagcaagcacgcacctctgacccctaaagaagaggagtacctgcaggcccaggtgcggagcagaagcaagctggacgcccctaaggtggatctgctggtgaagaattgcctcctgcccctgagagagtacttcaagtatttcagccagaatagtctgcccctgggcggcccaagcagcggcgcccctcctcccagcggcggcagcccagccggctccccaacctctaccgaggagggcacctctgagtccgccacccccgagagcggccctggcacctccaccgagcccagcgagggcagcgcacccggcagccctgccggcagccccacctccacagaggagggaaccagcaccgagcccagcgaaggcagcgccccaggcaccagcaccgagcctagtgagggcggctctggcggcggcagcgcccaggagattaaacggatcaacaagatcagaagaagacttgtgaaagacagcaacaccaagaaggccggcaagacaggccccatgaaaaccctgctggttagagtgatgacacccgatctgagagagcggctggaaaacctgagaaagaagcctgaaaatatcccccagcccatcagcaatacatctagagccaacctgaataagctgctgaccgattacaccgaaatgaagaaggcgatcctgcatgtgtactgggaagagttccagaaggaccctgtgggcctgatgagccgggtggcccagcctgccagcaagaagatcgatcagaacaagctgaaacctgagatggacgagaagggcaacctgaccaccgccggctttgcctgctctcagtgtggccagcccctgttcgtgtacaagctggagcaggtgtctgagaagggcaaggcttacaccaactacttcggacggtgcaatgtggccgagcacgaaaagctgatcctgctggcccagctgaagcccgagaaggatagcgacgaagccgtgacatatagcctgggaaagtttgggcagagggccctggatttctacagcattcatgtgaccaaggagtccacccaccccgtgaagcccctggcccagatcgccggaaacagatacgcctccggacctgtgggaaaggccctgagcgacgcatgtatgggcacaatcgcctccttcctgtctaagtaccaggacatcatcatcgaacaccagaaggtggtgaagggcaaccagaagagactggagagcctgcgggagctggccggcaaggaaaacctggaataccctagcgtgaccctgccacctcagcctcacaccaaggagggcgttgatgcctacaacgaagtgatcgcccgggtgcgaatgtgggtgaacctgaacctgtggcagaagctgaagctaagcagagatgatgccaagcctctgctgagactgaagggattcccttcctttcctctggtcgagagacaggccaacgaagtggactggtgggacatggtgtgtaacgtgaagaagctgatcaacgagaaaaaggaggatggcaaggtgttttggcagaatctggctggctacaagagacaggaagccctgagaccatacctgagcagcgaggaagatcggaagaagggaaagaaattcgctcggtaccagctgggcgacctgctgctgcacctggaaaagaagcacggcgaggactggggaaaggtgtacgacgaggcctgggagcggattgacaagaaagtggaaggcctgagcaagcacatcaagctggaagaggaacggagaagcgaggacgcccagagcaaggccgccctgaccgactggctgcgggctaaggccagcttcgtgatcgagggcctgaaggaggccgacaaggacgagttctgcagatgcgagctgaagctgcagaagtggtacggggacctgcggggaaagcccttcgccatcgaagccgagaacagcatcctggacatcagcggcttcagcaagcagtacaactgtgccttcatctggcagaaggacggcgtgaagaagctgaacctgtacctgatcatcaactacttcaagggcggcaagctgcggttcaagaagatcaaacctgaagccttcgaagccaacagattctacaccgtgatcaacaaaaagagcggcgagatcgtgcccatggaggtgaacttcaacttcgacgaccccaacctgatcatcctgcctctggcctttggcaagagacagggcagagaattcatctggaacgacctgctgtccctggaaaccggcagcctgaagctggccaacggaagagtgatcgagaagacactgtacaacagaagaacccggcaggatgagcctgccctgttcgtggccctgaccttcgagcggcgggaggtcctggactcctccaatatcaaaccaatgaacctgatcggcgtggcaagaggcgaaaacatccccgccgtgatcgccctgaccgaccccgagggctgcccactgagccggtttaaggatagcctgggaaacccaacccacatcctgagaatcggcgagagctataaggagaagcagcggaccatccaggccaagaaggaggtggagcagcggagagccggcggctacagccggaagtacgccagcaaagccaagaatctggcagacgatatggtgagaaacaccgctagagatctgctgtactacgccgtgacccaggatgccatgctgatcttcgccaacctgagccggggcttcggccggcagggcaagcggaccttcatggccgagagacagtacacacggatggaggactggctgaccgccaagctggcctacgagggcctgagcaagacctacctgtccaagacactggcccagtacacctccaagacatgcagcaactgtgggtttaccatcaccagcgccgactacgacagggtgctggagaagctgaagaagacagcaacaggctggatgaccacaattaacggcaaggagctgaaggtggagggccagattacctactacaacagatacaagagacagaacgtagtcaaggacctgtccgtcgagctggatagactgagcgaagaatctgtgaacaacgacatctcctcctggacaaagggcagaagcggagaagctctgagcctcctgaagaaaagattctcccatagacccgtgcaggagaagttcgtgtgcctgaactgcggcttcgagacacacgcagccgagcaagccgccctgaacatcgccagatcctggctgttcctgcggagccaggagtacaagaaataccagacaaacaagacaaccggcaacaccgataagagagccttcgtcgagacctggcagtccttttaccggaagaagcttaaggaggtgtggaaacctgccgtgcggtctggcggatctggcggaggctccacaagctgccaggagctggtgaccttcgaggacgtggccgtgtacttcagcctggaggagtgggagaggctggaggccgaccagaggggcctgtaccaggaggtgatgcaggagaactacggcatcctggtgagcctgggctaccccatccccaagcccgacctgatcttcaggctggagcagggcgaggagccctgggtgcccgacagccccaggcccgaggagggcgacatcgtgaccggcgtgtacaccagccccaagaaaaagagaaaagtctaagctgccttctgcggggcttgccttctggccatgcccttcttctctcccttgcacctgtacctcttggtctttgaataaagcctgagtaggaaggctagcaaaaaaaaaaaaaaaaaaaaaaaaaaaaaaaaaaaaaaaaaaaaaaaaaaaaaaaaaaaaaaaaaaaaaaaaaaaaaaaa

SEQ ID NO: 6758 - RNA, 5797 nt, synthetic construct
  source 1..5797: mol_type = other RNA
aggaaataagagagaaaagaagagtaagaagaaatataagagccaccatggcccctaagaagaagcgtaaagtgagccggatggaacgcctcgtctacgaggtgcggcagaagtgcagaaacatcgaggacatctgcatctcctgcggatctctgaacgtgaccctggagcacccactgttcatcggcggcatgtgccagaactgtaaaaactgttttctggagtgtgcctatcaatacgacgatgacggctaccagagctactgcaccatctgttgcggcggaagagaggtgctgatgtgtggaaataacaactgctgccggtgcttctgcgtggaatgcgtggacctgctggtgggccccggcgccgcccaggccgctattaaggaagatccttggaactgctacatgtgcggccacaagggcacatacggcctgctgagacggagagaggactggcctagcagactgcagatgttcttcgccaataaccacgaccaggagttcgacccccctaaggtgtaccctcccgtccccgccgagaagagaaagcccatccgggtcctgagcctgttcgatggcatcgccaccggtctgctggtgctgaaggacctgggcatccaggtggataggtacattgcctccgaggtgtgcgaggactccatcaccgtgggaatggtgcgtcatcagggcaagatcatgtacgtgggcgacgtgcggagcgtgacacagaagcatatccaggagtggggccctttcgacctggtgatcggcggcagcccttgcaatgacctgagcatcgtgaacccagcccggaagggcctgtacgagggaaccggcagactgttcttcgagttttacagactgctgcacgacgcccggcctaaggaaggcgacgaccggcccttcttttggctgttcgagaatgtggtggccatgggagtcagcgacaagcgggatattagccggttcctggagagcaaccccgtgatgatcgatgccaaggaagtgagcgccgcccaccgggccagatacttctggggcaatctgcctggcatgaacagacccctggccagcaccgtgaacgacaagctggagctgcaggagtgcctggagcacggccggatcgccaagttcagcaaggtgagaaccatcaccacccgaagcaacagcatcaaacaaggcaaggaccagcactttcctgtgttcatgaacgagaaggaggacatcctgtggtgtaccgagatggagagagtgttcgggttcccagtccactacacagatgtcagcaacatgtctagactggccagacagagactgctgggaagaagctggtccgtccctgtgatcagacacctgttcgcccctctgaaggagtacttcgcctgcgtgagcagcggcaacagcaacgccaacagccggggccccagcttctctagcggcctggtgccactgtccctgagagggagccacatgggccccatggagatctacaaaaccgtgagcgcctggaagcggcagcctgtgcgcgtgctgagcctgtttcggaatatcgataaagtcctgaaaagcctgggattcctggagagcggctctggctccggcggtggcaccctgaagtacgtggaggatgtgacaaacgtggtcagacgggatgtggagaagtggggccccttcgatctggtgtacggcagcacccaacccctgggcagctcttgtgaccggtgccctggctggtacatgtttcagttccaccggatcctgcagtacgccctgccgagacaggagtcccagcggccattcttttggattttcatggacaacttgctgctgaccgaggatgaccaggaaactaccactcggttcctgcagaccgaagccgtgaccctgcaggacgtgagaggccgggactaccagaacgccatgcgggtgtggtccaacatccctggactgaaaagcaagcacgcacctctgacccctaaagaagaggagtacctgcaggcccaggtgcggagcagaagcaagctggacgcccctaaggtggatctgctggtgaagaattgcctcctgcccctgagagagtacttcaagtatttcagccagaatagtctgcccctgggcggcccaagcagcggcgcccctcctcccagcggcggcagcccagccggctccccaacctctaccgaggagggcacctctgagtccgccacccccgagagcggccctggcacctccaccgagcccagcgagggcagcgcacccggcagccctgccggcagccccacctccacagaggagggaaccagcaccgagcccagcgaaggcagcgccccaggcaccagcaccgagcctagtgagggcggctctggcggcggcagcgcccaggagattaaacggatcaacaagatcagaagaagacttgtgaaagacagcaacaccaagaaggccggcaagacaggccccatgaaaaccctgctggttagagtgatgacacccgatctgagagagcggctggaaaacctgagaaagaagcctgaaaatatcccccagcccatcagcaatacatctagagccaacctgaataagctgctgaccgattacaccgaaatgaagaaggcgatcctgcatgtgtactgggaagagttccagaaggaccctgtgggcctgatgagccgggtggcccagcctgccagcaagaagatcgatcagaacaagctgaaacctgagatggacgagaagggcaacctgaccaccgccggctttgcctgctctcagtgtggccagcccctgttcgtgtacaagctggagcaggtgtctgagaagggcaaggcttacaccaactacttcggacggtgcaatgtggccgagcacgaaaagctgatcctgctggcccagctgaagcccgagaaggatagcgacgaagccgtgacatatagcctgggaaagtttgggcagagggccctggatttctacagcattcatgtgaccaaggagtccacccaccccgtgaagcccctggcccagatcgccggaaacagatacgcctccggacctgtgggaaaggccctgagcgacgcatgtatgggcacaatcgcctccttcctgtctaagtaccaggacatcatcatcgaacaccagaaggtggtgaagggcaaccagaagagactggagagcctgcgggagctggccggcaaggaaaacctggaataccctagcgtgaccctgccacctcagcctcacaccaaggagggcgttgatgcctacaacgaagtgatcgcccgggtgcgaatgtgggtgaacctgaacctgtggcagaagctgaagctaagcagagatgatgccaagcctctgctgagactgaagggattcccttcctttcctctggtcgagagacaggccaacgaagtggactggtgggacatggtgtgtaacgtgaagaagctgatcaacgagaaaaaggaggatggcaaggtgttttggcagaatctggctggctacaagagacaggaagccctgagaccatacctgagcagcgaggaagatcggaagaagggaaagaaattcgctcggtaccagctgggcgacctgctgctgcacctggaaaagaagcacggcgaggactggggaaaggtgtacgacgaggcctgggagcggattgacaagaaagtggaaggcctgagcaagcacatcaagctggaagaggaacggagaagcgaggacgcccagagcaaggccgccctgaccgactggctgcgggctaaggccagcttcgtgatcgagggcctgaaggaggccgacaaggacgagttctgcagatgcgagctgaagctgcagaagtggtacggggacctgcggggaaagcccttcgccatcgaagccgagaacagcatcctggacatcagcggcttcagcaagcagtacaactgtgccttcatctggcagaaggacggcgtgaagaagctgaacctgtacctgatcatcaactacttcaagggcggcaagctgcggttcaagaagatcaaacctgaagccttcgaagccaacagattctacaccgtgatcaacaaaaagagcggcgagatcgtgcccatggaggtgaacttcaacttcgacgaccccaacctgatcatcctgcctctggcctttggcaagagacagggcagagaattcatctggaacgacctgctgtccctggaaaccggcagcctgaagctggccaacggaagagtgatcgagaagacactgtacaacagaagaacccggcaggatgagcctgccctgttcgtggccctgaccttcgagcggcgggaggtcctggactcctccaatatcaaaccaatgaacctgatcggcgtggcaagaggcgaaaacatccccgccgtgatcgccctgaccgaccccgagggctgcccactgagccggtttaaggatagcctgggaaacccaacccacatcctgagaatcggcgagagctataaggagaagcagcggaccatccaggccaagaaggaggtggagcagcggagagccggcggctacagccggaagtacgccagcaaagccaagaatctggcagacgatatggtgagaaacaccgctagagatctgctgtactacgccgtgacccaggatgccatgctgatcttcgccaacctgagccggggcttcggccggcagggcaagcggaccttcatggccgagagacagtacacacggatggaggactggctgaccgccaagctggcctacgagggcctgagcaagacctacctgtccaagacactggcccagtacacctccaagacatgcagcaactgtgggtttaccatcaccagcgccgactacgacagggtgctggagaagctgaagaagacagcaacaggctggatgaccacaattaacggcaaggagctgaaggtggagggccagattacctactacaacagatacaagagacagaacgtagtcaaggacctgtccgtcgagctggatagactgagcgaagaatctgtgaacaacgacatctcctcctggacaaagggcagaagcggagaagctctgagcctcctgaagaaaagattctcccatagacccgtgcaggagaagttcgtgtgcctgaactgcggcttcgagacacacgcagccgagcaagccgccctgaacatcgccagatcctggctgttcctgcggagccaggagtacaagaaataccagacaaacaagacaaccggcaacaccgataagagagccttcgtcgagacctggcagtccttttaccggaagaagcttaaggaggtgtggaaacctgccgtgcggtctggcggatctggcggaggctccacaagcatgagccagggcctggtgaccttcagggacgtggccatcgacttcagccaggaggagtggaagtggctgcagcccgcccagagggacctgtacaggtgcgtgatgctggagaactacggccacctggtgagcctgggcctgagcatcagcaagcccgacgtggtgagcctgctggagcagggcaaggagccctggctgggcaagagggaggtgaagagggacctgttcagcgtgagcgagagcaccagccccaagaaaaagagaaaagtctaagctgccttctgcggggcttgccttctggccatgcccttcttctctcccttgcacctgtacctcttggtctttgaataaagcctgagtaggaaggctagcaaaaaaaaaaaaaaaaaaaaaaaaaaaaaaaaaaaaaaaaaaaaaaaaaaaaaaaaaaaaaaaaaaaaaaaaaaaaaaaa

SEQ ID NO: 6759 - RNA, 5797 nt, synthetic construct
  source 1..5797: mol_type = other RNA
aggaaataagagagaaaagaagagtaagaagaaatataagagccaccatggcccctaagaagaagcgtaaagtgagccggatggaacgcctcgtctacgaggtgcggcagaagtgcagaaacatcgaggacatctgcatctcctgcggatctctgaacgtgaccctggagcacccactgttcatcggcggcatgtgccagaactgtaaaaactgttttctggagtgtgcctatcaatacgacgatgacggctaccagagctactgcaccatctgttgcggcggaagagaggtgctgatgtgtggaaataacaactgctgccggtgcttctgcgtggaatgcgtggacctgctggtgggccccggcgccgcccaggccgctattaaggaagatccttggaactgctacatgtgcggccacaagggcacatacggcctgctgagacggagagaggactggcctagcagactgcagatgttcttcgccaataaccacgaccaggagttcgacccccctaaggtgtaccctcccgtccccgccgagaagagaaagcccatccgggtcctgagcctgttcgatggcatcgccaccggtctgctggtgctgaaggacctgggcatccaggtggataggtacattgcctccgaggtgtgcgaggactccatcaccgtgggaatggtgcgtcatcagggcaagatcatgtacgtgggcgacgtgcggagcgtgacacagaagcatatccaggagtggggccctttcgacctggtgatcggcggcagcccttgcaatgacctgagcatcgtgaacccagcccggaagggcctgtacgagggaaccggcagactgttcttcgagttttacagactgctgcacgacgcccggcctaaggaaggcgacgaccggcccttcttttggctgttcgagaatgtggtggccatgggagtcagcgacaagcgggatattagccggttcctggagagcaaccccgtgatgatcgatgccaaggaagtgagcgccgcccaccgggccagatacttctggggcaatctgcctggcatgaacagacccctggccagcaccgtgaacgacaagctggagctgcaggagtgcctggagcacggccggatcgccaagttcagcaaggtgagaaccatcaccacccgaagcaacagcatcaaacaaggcaaggaccagcactttcctgtgttcatgaacgagaaggaggacatcctgtggtgtaccgagatggagagagtgttcgggttcccagtccactacacagatgtcagcaacatgtctagactggccagacagagactgctgggaagaagctggtccgtccctgtgatcagacacctgttcgcccctctgaaggagtacttcgcctgcgtgagcagcggcaacagcaacgccaacagccggggccccagcttctctagcggcctggtgccactgtccctgagagggagccacatgggccccatggagatctacaaaaccgtgagcgcctggaagcggcagcctgtgcgcgtgctgagcctgtttcggaatatcgataaagtcctgaaaagcctgggattcctggagagcggctctggctccggcggtggcaccctgaagtacgtggaggatgtgacaaacgtggtcagacgggatgtggagaagtggggccccttcgatctggtgtacggcagcacccaacccctgggcagctcttgtgaccggtgccctggctggtacatgtttcagttccaccggatcctgcagtacgccctgccgagacaggagtcccagcggccattcttttggattttcatggacaacttgctgctgaccgaggatgaccaggaaactaccactcggttcctgcagaccgaagccgtgaccctgcaggacgtgagaggccgggactaccagaacgccatgcgggtgtggtccaacatccctggactgaaaagcaagcacgcacctctgacccctaaagaagaggagtacctgcaggcccaggtgcggagcagaagcaagctggacgcccctaaggtggatctgctggtgaagaattgcctcctgcccctgagagagtacttcaagtatttcagccagaatagtctgcccctgggcggcccaagcagcggcgcccctcctcccagcggcggcagcccagccggctccccaacctctaccgaggagggcacctctgagtccgccacccccgagagcggccctggcacctccaccgagcccagcgagggcagcgcacccggcagccctgccggcagccccacctccacagaggagggaaccagcaccgagcccagcgaaggcagcgccccaggcaccagcaccgagcctagtgagggcggctctggcggcggcagcgcccaggagattaaacggatcaacaagatcagaagaagacttgtgaaagacagcaacaccaagaaggccggcaagacaggccccatgaaaaccctgctggttagagtgatgacacccgatctgagagagcggctggaaaacctgagaaagaagcctgaaaatatcccccagcccatcagcaatacatctagagccaacctgaataagctgctgaccgattacaccgaaatgaagaaggcgatcctgcatgtgtactgggaagagttccagaaggaccctgtgggcctgatgagccgggtggcccagcctgccagcaagaagatcgatcagaacaagctgaaacctgagatggacgagaagggcaacctgaccaccgccggctttgcctgctctcagtgtggccagcccctgttcgtgtacaagctggagcaggtgtctgagaagggcaaggcttacaccaactacttcggacggtgcaatgtggccgagcacgaaaagctgatcctgctggcccagctgaagcccgagaaggatagcgacgaagccgtgacatatagcctgggaaagtttgggcagagggccctggatttctacagcattcatgtgaccaaggagtccacccaccccgtgaagcccctggcccagatcgccggaaacagatacgcctccggacctgtgggaaaggccctgagcgacgcatgtatgggcacaatcgcctccttcctgtctaagtaccaggacatcatcatcgaacaccagaaggtggtgaagggcaaccagaagagactggagagcctgcgggagctggccggcaaggaaaacctggaataccctagcgtgaccctgccacctcagcctcacaccaaggagggcgttgatgcctacaacgaagtgatcgcccgggtgcgaatgtgggtgaacctgaacctgtggcagaagctgaagctaagcagagatgatgccaagcctctgctgagactgaagggattcccttcctttcctctggtcgagagacaggccaacgaagtggactggtgggacatggtgtgtaacgtgaagaagctgatcaacgagaaaaaggaggatggcaaggtgttttggcagaatctggctggctacaagagacaggaagccctgagaccatacctgagcagcgaggaagatcggaagaagggaaagaaattcgctcggtaccagctgggcgacctgctgctgcacctggaaaagaagcacggcgaggactggggaaaggtgtacgacgaggcctgggagcggattgacaagaaagtggaaggcctgagcaagcacatcaagctggaagaggaacggagaagcgaggacgcccagagcaaggccgccctgaccgactggctgcgggctaaggccagcttcgtgatcgagggcctgaaggaggccgacaaggacgagttctgcagatgcgagctgaagctgcagaagtggtacggggacctgcggggaaagcccttcgccatcgaagccgagaacagcatcctggacatcagcggcttcagcaagcagtacaactgtgccttcatctggcagaaggacggcgtgaagaagctgaacctgtacctgatcatcaactacttcaagggcggcaagctgcggttcaagaagatcaaacctgaagccttcgaagccaacagattctacaccgtgatcaacaaaaagagcggcgagatcgtgcccatggaggtgaacttcaacttcgacgaccccaacctgatcatcctgcctctggcctttggcaagagacagggcagagaattcatctggaacgacctgctgtccctggaaaccggcagcctgaagctggccaacggaagagtgatcgagaagacactgtacaacagaagaacccggcaggatgagcctgccctgttcgtggccctgaccttcgagcggcgggaggtcctggactcctccaatatcaaaccaatgaacctgatcggcgtggcaagaggcgaaaacatccccgccgtgatcgccctgaccgaccccgagggctgcccactgagccggtttaaggatagcctgggaaacccaacccacatcctgagaatcggcgagagctataaggagaagcagcggaccatccaggccaagaaggaggtggagcagcggagagccggcggctacagccggaagtacgccagcaaagccaagaatctggcagacgatatggtgagaaacaccgctagagatctgctgtactacgccgtgacccaggatgccatgctgatcttcgccaacctgagccggggcttcggccggcagggcaagcggaccttcatggccgagagacagtacacacggatggaggactggctgaccgccaagctggcctacgagggcctgagcaagacctacctgtccaagacactggcccagtacacctccaagacatgcagcaactgtgggtttaccatcaccagcgccgactacgacagggtgctggagaagctgaagaagacagcaacaggctggatgaccacaattaacggcaaggagctgaaggtggagggccagattacctactacaacagatacaagagacagaacgtagtcaaggacctgtccgtcgagctggatagactgagcgaagaatctgtgaacaacgacatctcctcctggacaaagggcagaagcggagaagctctgagcctcctgaagaaaagattctcccatagacccgtgcaggagaagttcgtgtgcctgaactgcggcttcgagacacacgcagccgagcaagccgccctgaacatcgccagatcctggctgttcctgcggagccaggagtacaagaaataccagacaaacaagacaaccggcaacaccgataagagagccttcgtcgagacctggcagtccttttaccggaagaagcttaaggaggtgtggaaacctgccgtgcggtctggcggatctggcggaggctccacaagcagccaggagcccgtgaccttcgccgacgtggccgtggtgttcacccccgaggagtgggtgttcctggacagcacccagaggagcctgtacagggacgtgatgctggagaactacaggaacctggccagcgtggccgaccagctgtgcaagcccaacgccctgagctacctggaggagaggggcgagcagtggaccaccgacaggggcatcctgagcgacacctgcgccgagccccagtgccagaccagccccaagaaaaagagaaaagtctaagctgccttctgcggggcttgccttctggccatgcccttcttctctcccttgcacctgtacctcttggtctttgaataaagcctgagtaggaaggctagcaaaaaaaaaaaaaaaaaaaaaaaaaaaaaaaaaaaaaaaaaaaaaaaaaaaaaaaaaaaaaaaaaaaaaaaaaaaaaaaa

SEQ ID NO: 6760 - RNA, 5821 nt, synthetic construct
  source 1..5821: mol_type = other RNA
aggaaataagagagaaaagaagagtaagaagaaatataagagccaccatggcccctaagaagaagcgtaaagtgagccggatggaacgcctcgtctacgaggtgcggcagaagtgcagaaacatcgaggacatctgcatctcctgcggatctctgaacgtgaccctggagcacccactgttcatcggcggcatgtgccagaactgtaaaaactgttttctggagtgtgcctatcaatacgacgatgacggctaccagagctactgcaccatctgttgcggcggaagagaggtgctgatgtgtggaaataacaactgctgccggtgcttctgcgtggaatgcgtggacctgctggtgggccccggcgccgcccaggccgctattaaggaagatccttggaactgctacatgtgcggccacaagggcacatacggcctgctgagacggagagaggactggcctagcagactgcagatgttcttcgccaataaccacgaccaggagttcgacccccctaaggtgtaccctcccgtccccgccgagaagagaaagcccatccgggtcctgagcctgttcgatggcatcgccaccggtctgctggtgctgaaggacctgggcatccaggtggataggtacattgcctccgaggtgtgcgaggactccatcaccgtgggaatggtgcgtcatcagggcaagatcatgtacgtgggcgacgtgcggagcgtgacacagaagcatatccaggagtggggccctttcgacctggtgatcggcggcagcccttgcaatgacctgagcatcgtgaacccagcccggaagggcctgtacgagggaaccggcagactgttcttcgagttttacagactgctgcacgacgcccggcctaaggaaggcgacgaccggcccttcttttggctgttcgagaatgtggtggccatgggagtcagcgacaagcgggatattagccggttcctggagagcaaccccgtgatgatcgatgccaaggaagtgagcgccgcccaccgggccagatacttctggggcaatctgcctggcatgaacagacccctggccagcaccgtgaacgacaagctggagctgcaggagtgcctggagcacggccggatcgccaagttcagcaaggtgagaaccatcaccacccgaagcaacagcatcaaacaaggcaaggaccagcactttcctgtgttcatgaacgagaaggaggacatcctgtggtgtaccgagatggagagagtgttcgggttcccagtccactacacagatgtcagcaacatgtctagactggccagacagagactgctgggaagaagctggtccgtccctgtgatcagacacctgttcgcccctctgaaggagtacttcgcctgcgtgagcagcggcaacagcaacgccaacagccggggccccagcttctctagcggcctggtgccactgtccctgagagggagccacatgggccccatggagatctacaaaaccgtgagcgcctggaagcggcagcctgtgcgcgtgctgagcctgtttcggaatatcgataaagtcctgaaaagcctgggattcctggagagcggctctggctccggcggtggcaccctgaagtacgtggaggatgtgacaaacgtggtcagacgggatgtggagaagtggggccccttcgatctggtgtacggcagcacccaacccctgggcagctcttgtgaccggtgccctggctggtacatgtttcagttccaccggatcctgcagtacgccctgccgagacaggagtcccagcggccattcttttggattttcatggacaacttgctgctgaccgaggatgaccaggaaactaccactcggttcctgcagaccgaagccgtgaccctgcaggacgtgagaggccgggactaccagaacgccatgcgggtgtggtccaacatccctggactgaaaagcaagcacgcacctctgacccctaaagaagaggagtacctgcaggcccaggtgcggagcagaagcaagctggacgcccctaaggtggatctgctggtgaagaattgcctcctgcccctgagagagtacttcaagtatttcagccagaatagtctgcccctgggcggcccaagcagcggcgcccctcctcccagcggcggcagcccagccggctccccaacctctaccgaggagggcacctctgagtccgccacccccgagagcggccctggcacctccaccgagcccagcgagggcagcgcacccggcagccctgccggcagccccacctccacagaggagggaaccagcaccgagcccagcgaaggcagcgccccaggcaccagcaccgagcctagtgagggcggctctggcggcggcagcgcccaggagattaaacggatcaacaagatcagaagaagacttgtgaaagacagcaacaccaagaaggccggcaagacaggccccatgaaaaccctgctggttagagtgatgacacccgatctgagagagcggctggaaaacctgagaaagaagcctgaaaatatcccccagcccatcagcaatacatctagagccaacctgaataagctgctgaccgattacaccgaaatgaagaaggcgatcctgcatgtgtactgggaagagttccagaaggaccctgtgggcctgatgagccgggtggcccagcctgccagcaagaagatcgatcagaacaagctgaaacctgagatggacgagaagggcaacctgaccaccgccggctttgcctgctctcagtgtggccagcccctgttcgtgtacaagctggagcaggtgtctgagaagggcaaggcttacaccaactacttcggacggtgcaatgtggccgagcacgaaaagctgatcctgctggcccagctgaagcccgagaaggatagcgacgaagccgtgacatatagcctgggaaagtttgggcagagggccctggatttctacagcattcatgtgaccaaggagtccacccaccccgtgaagcccctggcccagatcgccggaaacagatacgcctccggacctgtgggaaaggccctgagcgacgcatgtatgggcacaatcgcctccttcctgtctaagtaccaggacatcatcatcgaacaccagaaggtggtgaagggcaaccagaagagactggagagcctgcgggagctggccggcaaggaaaacctggaataccctagcgtgaccctgccacctcagcctcacaccaaggagggcgttgatgcctacaacgaagtgatcgcccgggtgcgaatgtgggtgaacctgaacctgtggcagaagctgaagctaagcagagatgatgccaagcctctgctgagactgaagggattcccttcctttcctctggtcgagagacaggccaacgaagtggactggtgggacatggtgtgtaacgtgaagaagctgatcaacgagaaaaaggaggatggcaaggtgttttggcagaatctggctggctacaagagacaggaagccctgagaccatacctgagcagcgaggaagatcggaagaagggaaagaaattcgctcggtaccagctgggcgacctgctgctgcacctggaaaagaagcacggcgaggactggggaaaggtgtacgacgaggcctgggagcggattgacaagaaagtggaaggcctgagcaagcacatcaagctggaagaggaacggagaagcgaggacgcccagagcaaggccgccctgaccgactggctgcgggctaaggccagcttcgtgatcgagggcctgaaggaggccgacaaggacgagttctgcagatgcgagctgaagctgcagaagtggtacggggacctgcggggaaagcccttcgccatcgaagccgagaacagcatcctggacatcagcggcttcagcaagcagtacaactgtgccttcatctggcagaaggacggcgtgaagaagctgaacctgtacctgatcatcaactacttcaagggcggcaagctgcggttcaagaagatcaaacctgaagccttcgaagccaacagattctacaccgtgatcaacaaaaagagcggcgagatcgtgcccatggaggtgaacttcaacttcgacgaccccaacctgatcatcctgcctctggcctttggcaagagacagggcagagaattcatctggaacgacctgctgtccctggaaaccggcagcctgaagctggccaacggaagagtgatcgagaagacactgtacaacagaagaacccggcaggatgagcctgccctgttcgtggccctgaccttcgagcggcgggaggtcctggactcctccaatatcaaaccaatgaacctgatcggcgtggcaagaggcgaaaacatccccgccgtgatcgccctgaccgaccccgagggctgcccactgagccggtttaaggatagcctgggaaacccaacccacatcctgagaatcggcgagagctataaggagaagcagcggaccatccaggccaagaaggaggtggagcagcggagagccggcggctacagccggaagtacgccagcaaagccaagaatctggcagacgatatggtgagaaacaccgctagagatctgctgtactacgccgtgacccaggatgccatgctgatcttcgccaacctgagccggggcttcggccggcagggcaagcggaccttcatggccgagagacagtacacacggatggaggactggctgaccgccaagctggcctacgagggcctgagcaagacctacctgtccaagacactggcccagtacacctccaagacatgcagcaactgtgggtttaccatcaccagcgccgactacgacagggtgctggagaagctgaagaagacagcaacaggctggatgaccacaattaacggcaaggagctgaaggtggagggccagattacctactacaacagatacaagagacagaacgtagtcaaggacctgtccgtcgagctggatagactgagcgaagaatctgtgaacaacgacatctcctcctggacaaagggcagaagcggagaagctctgagcctcctgaagaaaagattctcccatagacccgtgcaggagaagttcgtgtgcctgaactgcggcttcgagacacacgcagccgagcaagccgccctgaacatcgccagatcctggctgttcctgcggagccaggagtacaagaaataccagacaaacaagacaaccggcaacaccgataagagagccttcgtcgagacctggcagtccttttaccggaagaagcttaaggaggtgtggaaacctgccgtgcggtctggcggatctggcggaggctccacaagcgtggtgttcgaggacgtggccgtgaacttcaccctggaggagtgggccctgctggacagcagccagaaggagctgtacagggacgtgatgctggagaccttcaggaacctggccagcgtggacggcgagacccagtacaaggccaacggcagcgtgagccagcaggacatctacaggaacaagatcagcaaggagcacaagatcagcaagttcaccggcaacgacagctggcccttcgtgctgggcaagatctgggaggagctgagcaccagccccaagaaaaagagaaaagtctaagctgccttctgcggggcttgccttctggccatgcccttcttctctcccttgcacctgtacctcttggtctttgaataaagcctgagtaggaaggctagcaaaaaaaaaaaaaaaaaaaaaaaaaaaaaaaaaaaaaaaaaaaaaaaaaaaaaaaaaaaaaaaaaaaaaaaaaaaaaaaa

SEQ ID NO: 6761 - RNA, 5797 nt, synthetic construct
  source 1..5797: mol_type = other RNA
aggaaataagagagaaaagaagagtaagaagaaatataagagccaccatggcccctaagaagaagcgtaaagtgagccggatggaacgcctcgtctacgaggtgcggcagaagtgcagaaacatcgaggacatctgcatctcctgcggatctctgaacgtgaccctggagcacccactgttcatcggcggcatgtgccagaactgtaaaaactgttttctggagtgtgcctatcaatacgacgatgacggctaccagagctactgcaccatctgttgcggcggaagagaggtgctgatgtgtggaaataacaactgctgccggtgcttctgcgtggaatgcgtggacctgctggtgggccccggcgccgcccaggccgctattaaggaagatccttggaactgctacatgtgcggccacaagggcacatacggcctgctgagacggagagaggactggcctagcagactgcagatgttcttcgccaataaccacgaccaggagttcgacccccctaaggtgtaccctcccgtccccgccgagaagagaaagcccatccgggtcctgagcctgttcgatggcatcgccaccggtctgctggtgctgaaggacctgggcatccaggtggataggtacattgcctccgaggtgtgcgaggactccatcaccgtgggaatggtgcgtcatcagggcaagatcatgtacgtgggcgacgtgcggagcgtgacacagaagcatatccaggagtggggccctttcgacctggtgatcggcggcagcccttgcaatgacctgagcatcgtgaacccagcccggaagggcctgtacgagggaaccggcagactgttcttcgagttttacagactgctgcacgacgcccggcctaaggaaggcgacgaccggcccttcttttggctgttcgagaatgtggtggccatgggagtcagcgacaagcgggatattagccggttcctggagagcaaccccgtgatgatcgatgccaaggaagtgagcgccgcccaccgggccagatacttctggggcaatctgcctggcatgaacagacccctggccagcaccgtgaacgacaagctggagctgcaggagtgcctggagcacggccggatcgccaagttcagcaaggtgagaaccatcaccacccgaagcaacagcatcaaacaaggcaaggaccagcactttcctgtgttcatgaacgagaaggaggacatcctgtggtgtaccgagatggagagagtgttcgggttcccagtccactacacagatgtcagcaacatgtctagactggccagacagagactgctgggaagaagctggtccgtccctgtgatcagacacctgttcgcccctctgaaggagtacttcgcctgcgtgagcagcggcaacagcaacgccaacagccggggccccagcttctctagcggcctggtgccactgtccctgagagggagccacatgggccccatggagatctacaaaaccgtgagcgcctggaagcggcagcctgtgcgcgtgctgagcctgtttcggaatatcgataaagtcctgaaaagcctgggattcctggagagcggctctggctccggcggtggcaccctgaagtacgtggaggatgtgacaaacgtggtcagacgggatgtggagaagtggggccccttcgatctggtgtacggcagcacccaacccctgggcagctcttgtgaccggtgccctggctggtacatgtttcagttccaccggatcctgcagtacgccctgccgagacaggagtcccagcggccattcttttggattttcatggacaacttgctgctgaccgaggatgaccaggaaactaccactcggttcctgcagaccgaagccgtgaccctgcaggacgtgagaggccgggactaccagaacgccatgcgggtgtggtccaacatccctggactgaaaagcaagcacgcacctctgacccctaaagaagaggagtacctgcaggcccaggtgcggagcagaagcaagctggacgcccctaaggtggatctgctggtgaagaattgcctcctgcccctgagagagtacttcaagtatttcagccagaatagtctgcccctgggcggcccaagcagcggcgcccctcctcccagcggcggcagcccagccggctccccaacctctaccgaggagggcacctctgagtccgccacccccgagagcggccctggcacctccaccgagcccagcgagggcagcgcacccggcagccctgccggcagccccacctccacagaggagggaaccagcaccgagcccagcgaaggcagcgccccaggcaccagcaccgagcctagtgagggcggctctggcggcggcagcgcccaggagattaaacggatcaacaagatcagaagaagacttgtgaaagacagcaacaccaagaaggccggcaagacaggccccatgaaaaccctgctggttagagtgatgacacccgatctgagagagcggctggaaaacctgagaaagaagcctgaaaatatcccccagcccatcagcaatacatctagagccaacctgaataagctgctgaccgattacaccgaaatgaagaaggcgatcctgcatgtgtactgggaagagttccagaaggaccctgtgggcctgatgagccgggtggcccagcctgccagcaagaagatcgatcagaacaagctgaaacctgagatggacgagaagggcaacctgaccaccgccggctttgcctgctctcagtgtggccagcccctgttcgtgtacaagctggagcaggtgtctgagaagggcaaggcttacaccaactacttcggacggtgcaatgtggccgagcacgaaaagctgatcctgctggcccagctgaagcccgagaaggatagcgacgaagccgtgacatatagcctgggaaagtttgggcagagggccctggatttctacagcattcatgtgaccaaggagtccacccaccccgtgaagcccctggcccagatcgccggaaacagatacgcctccggacctgtgggaaaggccctgagcgacgcatgtatgggcacaatcgcctccttcctgtctaagtaccaggacatcatcatcgaacaccagaaggtggtgaagggcaaccagaagagactggagagcctgcgggagctggccggcaaggaaaacctggaataccctagcgtgaccctgccacctcagcctcacaccaaggagggcgttgatgcctacaacgaagtgatcgcccgggtgcgaatgtgggtgaacctgaacctgtggcagaagctgaagctaagcagagatgatgccaagcctctgctgagactgaagggattcccttcctttcctctggtcgagagacaggccaacgaagtggactggtgggacatggtgtgtaacgtgaagaagctgatcaacgagaaaaaggaggatggcaaggtgttttggcagaatctggctggctacaagagacaggaagccctgagaccatacctgagcagcgaggaagatcggaagaagggaaagaaattcgctcggtaccagctgggcgacctgctgctgcacctggaaaagaagcacggcgaggactggggaaaggtgtacgacgaggcctgggagcggattgacaagaaagtggaaggcctgagcaagcacatcaagctggaagaggaacggagaagcgaggacgcccagagcaaggccgccctgaccgactggctgcgggctaaggccagcttcgtgatcgagggcctgaaggaggccgacaaggacgagttctgcagatgcgagctgaagctgcagaagtggtacggggacctgcggggaaagcccttcgccatcgaagccgagaacagcatcctggacatcagcggcttcagcaagcagtacaactgtgccttcatctggcagaaggacggcgtgaagaagctgaacctgtacctgatcatcaactacttcaagggcggcaagctgcggttcaagaagatcaaacctgaagccttcgaagccaacagattctacaccgtgatcaacaaaaagagcggcgagatcgtgcccatggaggtgaacttcaacttcgacgaccccaacctgatcatcctgcctctggcctttggcaagagacagggcagagaattcatctggaacgacctgctgtccctggaaaccggcagcctgaagctggccaacggaagagtgatcgagaagacactgtacaacagaagaacccggcaggatgagcctgccctgttcgtggccctgaccttcgagcggcgggaggtcctggactcctccaatatcaaaccaatgaacctgatcggcgtggcaagaggcgaaaacatccccgccgtgatcgccctgaccgaccccgagggctgcccactgagccggtttaaggatagcctgggaaacccaacccacatcctgagaatcggcgagagctataaggagaagcagcggaccatccaggccaagaaggaggtggagcagcggagagccggcggctacagccggaagtacgccagcaaagccaagaatctggcagacgatatggtgagaaacaccgctagagatctgctgtactacgccgtgacccaggatgccatgctgatcttcgccaacctgagccggggcttcggccggcagggcaagcggaccttcatggccgagagacagtacacacggatggaggactggctgaccgccaagctggcctacgagggcctgagcaagacctacctgtccaagacactggcccagtacacctccaagacatgcagcaactgtgggtttaccatcaccagcgccgactacgacagggtgctggagaagctgaagaagacagcaacaggctggatgaccacaattaacggcaaggagctgaaggtggagggccagattacctactacaacagatacaagagacagaacgtagtcaaggacctgtccgtcgagctggatagactgagcgaagaatctgtgaacaacgacatctcctcctggacaaagggcagaagcggagaagctctgagcctcctgaagaaaagattctcccatagacccgtgcaggagaagttcgtgtgcctgaactgcggcttcgagacacacgcagccgagcaagccgccctgaacatcgccagatcctggctgttcctgcggagccaggagtacaagaaataccagacaaacaagacaaccggcaacaccgataagagagccttcgtcgagacctggcagtccttttaccggaagaagcttaaggaggtgtggaaacctgccgtgcggtctggcggatctggcggaggctccacaagcgccgacatcaccctgatgagccaggcccaggacagcaggagcatcctgttccaggagagcgtgaccttcgaggacgtggccgtgaacttcaccaacagggagtggcagtgcctgacctacgcccagaggcacctgtacaaggacgtgatgctggagaactacaggaacatggccagcctgggcttccccttccccaagccccccctgatcagccacctggagagggaggtggacccctgcgtgaccagccccaagaaaaagagaaaagtctaagctgccttctgcggggcttgccttctggccatgcccttcttctctcccttgcacctgtacctcttggtctttgaataaagcctgagtaggaaggctagcaaaaaaaaaaaaaaaaaaaaaaaaaaaaaaaaaaaaaaaaaaaaaaaaaaaaaaaaaaaaaaaaaaaaaaaaaaaaaaaa

SEQ ID NO: 6762 - RNA, 5797 nt, synthetic construct
  source 1..5797: mol_type = other RNA
aggaaataagagagaaaagaagagtaagaagaaatataagagccaccatggcccctaagaagaagcgtaaagtgagccggatggaacgcctcgtctacgaggtgcggcagaagtgcagaaacatcgaggacatctgcatctcctgcggatctctgaacgtgaccctggagcacccactgttcatcggcggcatgtgccagaactgtaaaaactgttttctggagtgtgcctatcaatacgacgatgacggctaccagagctactgcaccatctgttgcggcggaagagaggtgctgatgtgtggaaataacaactgctgccggtgcttctgcgtggaatgcgtggacctgctggtgggccccggcgccgcccaggccgctattaaggaagatccttggaactgctacatgtgcggccacaagggcacatacggcctgctgagacggagagaggactggcctagcagactgcagatgttcttcgccaataaccacgaccaggagttcgacccccctaaggtgtaccctcccgtccccgccgagaagagaaagcccatccgggtcctgagcctgttcgatggcatcgccaccggtctgctggtgctgaaggacctgggcatccaggtggataggtacattgcctccgaggtgtgcgaggactccatcaccgtgggaatggtgcgtcatcagggcaagatcatgtacgtgggcgacgtgcggagcgtgacacagaagcatatccaggagtggggccctttcgacctggtgatcggcggcagcccttgcaatgacctgagcatcgtgaacccagcccggaagggcctgtacgagggaaccggcagactgttcttcgagttttacagactgctgcacgacgcccggcctaaggaaggcgacgaccggcccttcttttggctgttcgagaatgtggtggccatgggagtcagcgacaagcgggatattagccggttcctggagagcaaccccgtgatgatcgatgccaaggaagtgagcgccgcccaccgggccagatacttctggggcaatctgcctggcatgaacagacccctggccagcaccgtgaacgacaagctggagctgcaggagtgcctggagcacggccggatcgccaagttcagcaaggtgagaaccatcaccacccgaagcaacagcatcaaacaaggcaaggaccagcactttcctgtgttcatgaacgagaaggaggacatcctgtggtgtaccgagatggagagagtgttcgggttcccagtccactacacagatgtcagcaacatgtctagactggccagacagagactgctgggaagaagctggtccgtccctgtgatcagacacctgttcgcccctctgaaggagtacttcgcctgcgtgagcagcggcaacagcaacgccaacagccggggccccagcttctctagcggcctggtgccactgtccctgagagggagccacatgggccccatggagatctacaaaaccgtgagcgcctggaagcggcagcctgtgcgcgtgctgagcctgtttcggaatatcgataaagtcctgaaaagcctgggattcctggagagcggctctggctccggcggtggcaccctgaagtacgtggaggatgtgacaaacgtggtcagacgggatgtggagaagtggggccccttcgatctggtgtacggcagcacccaacccctgggcagctcttgtgaccggtgccctggctggtacatgtttcagttccaccggatcctgcagtacgccctgccgagacaggagtcccagcggccattcttttggattttcatggacaacttgctgctgaccgaggatgaccaggaaactaccactcggttcctgcagaccgaagccgtgaccctgcaggacgtgagaggccgggactaccagaacgccatgcgggtgtggtccaacatccctggactgaaaagcaagcacgcacctctgacccctaaagaagaggagtacctgcaggcccaggtgcggagcagaagcaagctggacgcccctaaggtggatctgctggtgaagaattgcctcctgcccctgagagagtacttcaagtatttcagccagaatagtctgcccctgggcggcccaagcagcggcgcccctcctcccagcggcggcagcccagccggctccccaacctctaccgaggagggcacctctgagtccgccacccccgagagcggccctggcacctccaccgagcccagcgagggcagcgcacccggcagccctgccggcagccccacctccacagaggagggaaccagcaccgagcccagcgaaggcagcgccccaggcaccagcaccgagcctagtgagggcggctctggcggcggcagcgcccaggagattaaacggatcaacaagatcagaagaagacttgtgaaagacagcaacaccaagaaggccggcaagacaggccccatgaaaaccctgctggttagagtgatgacacccgatctgagagagcggctggaaaacctgagaaagaagcctgaaaatatcccccagcccatcagcaatacatctagagccaacctgaataagctgctgaccgattacaccgaaatgaagaaggcgatcctgcatgtgtactgggaagagttccagaaggaccctgtgggcctgatgagccgggtggcccagcctgccagcaagaagatcgatcagaacaagctgaaacctgagatggacgagaagggcaacctgaccaccgccggctttgcctgctctcagtgtggccagcccctgttcgtgtacaagctggagcaggtgtctgagaagggcaaggcttacaccaactacttcggacggtgcaatgtggccgagcacgaaaagctgatcctgctggcccagctgaagcccgagaaggatagcgacgaagccgtgacatatagcctgggaaagtttgggcagagggccctggatttctacagcattcatgtgaccaaggagtccacccaccccgtgaagcccctggcccagatcgccggaaacagatacgcctccggacctgtgggaaaggccctgagcgacgcatgtatgggcacaatcgcctccttcctgtctaagtaccaggacatcatcatcgaacaccagaaggtggtgaagggcaaccagaagagactggagagcctgcgggagctggccggcaaggaaaacctggaataccctagcgtgaccctgccacctcagcctcacaccaaggagggcgttgatgcctacaacgaagtgatcgcccgggtgcgaatgtgggtgaacctgaacctgtggcagaagctgaagctaagcagagatgatgccaagcctctgctgagactgaagggattcccttcctttcctctggtcgagagacaggccaacgaagtggactggtgggacatggtgtgtaacgtgaagaagctgatcaacgagaaaaaggaggatggcaaggtgttttggcagaatctggctggctacaagagacaggaagccctgagaccatacctgagcagcgaggaagatcggaagaagggaaagaaattcgctcggtaccagctgggcgacctgctgctgcacctggaaaagaagcacggcgaggactggggaaaggtgtacgacgaggcctgggagcggattgacaagaaagtggaaggcctgagcaagcacatcaagctggaagaggaacggagaagcgaggacgcccagagcaaggccgccctgaccgactggctgcgggctaaggccagcttcgtgatcgagggcctgaaggaggccgacaaggacgagttctgcagatgcgagctgaagctgcagaagtggtacggggacctgcggggaaagcccttcgccatcgaagccgagaacagcatcctggacatcagcggcttcagcaagcagtacaactgtgccttcatctggcagaaggacggcgtgaagaagctgaacctgtacctgatcatcaactacttcaagggcggcaagctgcggttcaagaagatcaaacctgaagccttcgaagccaacagattctacaccgtgatcaacaaaaagagcggcgagatcgtgcccatggaggtgaacttcaacttcgacgaccccaacctgatcatcctgcctctggcctttggcaagagacagggcagagaattcatctggaacgacctgctgtccctggaaaccggcagcctgaagctggccaacggaagagtgatcgagaagacactgtacaacagaagaacccggcaggatgagcctgccctgttcgtggccctgaccttcgagcggcgggaggtcctggactcctccaatatcaaaccaatgaacctgatcggcgtggcaagaggcgaaaacatccccgccgtgatcgccctgaccgaccccgagggctgcccactgagccggtttaaggatagcctgggaaacccaacccacatcctgagaatcggcgagagctataaggagaagcagcggaccatccaggccaagaaggaggtggagcagcggagagccggcggctacagccggaagtacgccagcaaagccaagaatctggcagacgatatggtgagaaacaccgctagagatctgctgtactacgccgtgacccaggatgccatgctgatcttcgccaacctgagccggggcttcggccggcagggcaagcggaccttcatggccgagagacagtacacacggatggaggactggctgaccgccaagctggcctacgagggcctgagcaagacctacctgtccaagacactggcccagtacacctccaagacatgcagcaactgtgggtttaccatcaccagcgccgactacgacagggtgctggagaagctgaagaagacagcaacaggctggatgaccacaattaacggcaaggagctgaaggtggagggccagattacctactacaacagatacaagagacagaacgtagtcaaggacctgtccgtcgagctggatagactgagcgaagaatctgtgaacaacgacatctcctcctggacaaagggcagaagcggagaagctctgagcctcctgaagaaaagattctcccatagacccgtgcaggagaagttcgtgtgcctgaactgcggcttcgagacacacgcagccgagcaagccgccctgaacatcgccagatcctggctgttcctgcggagccaggagtacaagaaataccagacaaacaagacaaccggcaacaccgataagagagccttcgtcgagacctggcagtccttttaccggaagaagcttaaggaggtgtggaaacctgccgtgcggtctggcggatctggcggaggctccacaagcgagatggagccccacagccacgccgtgccctgccagcccagcatgagcttcaaggacgtggccgtgaccttcacccaggaggagtggggccagctgaacctggcccagaggaggctgtacaggaacgtgaccctggagacctggagccacctggtgagcctgggcctgctgctgagcaagcccgacgtgatcagctggctggagcagggccaggacccctggagggccgagcagggcccccccaccagccccaagaaaaagagaaaagtctaagctgccttctgcggggcttgccttctggccatgcccttcttctctcccttgcacctgtacctcttggtctttgaataaagcctgagtaggaaggctagcaaaaaaaaaaaaaaaaaaaaaaaaaaaaaaaaaaaaaaaaaaaaaaaaaaaaaaaaaaaaaaaaaaaaaaaaaaaaaaaa

SEQ ID NO: 6763 - RNA, 5797 nt, synthetic construct
  source 1..5797: mol_type = other RNA
aggaaataagagagaaaagaagagtaagaagaaatataagagccaccatggcccctaagaagaagcgtaaagtgagccggatggaacgcctcgtctacgaggtgcggcagaagtgcagaaacatcgaggacatctgcatctcctgcggatctctgaacgtgaccctggagcacccactgttcatcggcggcatgtgccagaactgtaaaaactgttttctggagtgtgcctatcaatacgacgatgacggctaccagagctactgcaccatctgttgcggcggaagagaggtgctgatgtgtggaaataacaactgctgccggtgcttctgcgtggaatgcgtggacctgctggtgggccccggcgccgcccaggccgctattaaggaagatccttggaactgctacatgtgcggccacaagggcacatacggcctgctgagacggagagaggactggcctagcagactgcagatgttcttcgccaataaccacgaccaggagttcgacccccctaaggtgtaccctcccgtccccgccgagaagagaaagcccatccgggtcctgagcctgttcgatggcatcgccaccggtctgctggtgctgaaggacctgggcatccaggtggataggtacattgcctccgaggtgtgcgaggactccatcaccgtgggaatggtgcgtcatcagggcaagatcatgtacgtgggcgacgtgcggagcgtgacacagaagcatatccaggagtggggccctttcgacctggtgatcggcggcagcccttgcaatgacctgagcatcgtgaacccagcccggaagggcctgtacgagggaaccggcagactgttcttcgagttttacagactgctgcacgacgcccggcctaaggaaggcgacgaccggcccttcttttggctgttcgagaatgtggtggccatgggagtcagcgacaagcgggatattagccggttcctggagagcaaccccgtgatgatcgatgccaaggaagtgagcgccgcccaccgggccagatacttctggggcaatctgcctggcatgaacagacccctggccagcaccgtgaacgacaagctggagctgcaggagtgcctggagcacggccggatcgccaagttcagcaaggtgagaaccatcaccacccgaagcaacagcatcaaacaaggcaaggaccagcactttcctgtgttcatgaacgagaaggaggacatcctgtggtgtaccgagatggagagagtgttcgggttcccagtccactacacagatgtcagcaacatgtctagactggccagacagagactgctgggaagaagctggtccgtccctgtgatcagacacctgttcgcccctctgaaggagtacttcgcctgcgtgagcagcggcaacagcaacgccaacagccggggccccagcttctctagcggcctggtgccactgtccctgagagggagccacatgggccccatggagatctacaaaaccgtgagcgcctggaagcggcagcctgtgcgcgtgctgagcctgtttcggaatatcgataaagtcctgaaaagcctgggattcctggagagcggctctggctccggcggtggcaccctgaagtacgtggaggatgtgacaaacgtggtcagacgggatgtggagaagtggggccccttcgatctggtgtacggcagcacccaacccctgggcagctcttgtgaccggtgccctggctggtacatgtttcagttccaccggatcctgcagtacgccctgccgagacaggagtcccagcggccattcttttggattttcatggacaacttgctgctgaccgaggatgaccaggaaactaccactcggttcctgcagaccgaagccgtgaccctgcaggacgtgagaggccgggactaccagaacgccatgcgggtgtggtccaacatccctggactgaaaagcaagcacgcacctctgacccctaaagaagaggagtacctgcaggcccaggtgcggagcagaagcaagctggacgcccctaaggtggatctgctggtgaagaattgcctcctgcccctgagagagtacttcaagtatttcagccagaatagtctgcccctgggcggcccaagcagcggcgcccctcctcccagcggcggcagcccagccggctccccaacctctaccgaggagggcacctctgagtccgccacccccgagagcggccctggcacctccaccgagcccagcgagggcagcgcacccggcagccctgccggcagccccacctccacagaggagggaaccagcaccgagcccagcgaaggcagcgccccaggcaccagcaccgagcctagtgagggcggctctggcggcggcagcgcccaggagattaaacggatcaacaagatcagaagaagacttgtgaaagacagcaacaccaagaaggccggcaagacaggccccatgaaaaccctgctggttagagtgatgacacccgatctgagagagcggctggaaaacctgagaaagaagcctgaaaatatcccccagcccatcagcaatacatctagagccaacctgaataagctgctgaccgattacaccgaaatgaagaaggcgatcctgcatgtgtactgggaagagttccagaaggaccctgtgggcctgatgagccgggtggcccagcctgccagcaagaagatcgatcagaacaagctgaaacctgagatggacgagaagggcaacctgaccaccgccggctttgcctgctctcagtgtggccagcccctgttcgtgtacaagctggagcaggtgtctgagaagggcaaggcttacaccaactacttcggacggtgcaatgtggccgagcacgaaaagctgatcctgctggcccagctgaagcccgagaaggatagcgacgaagccgtgacatatagcctgggaaagtttgggcagagggccctggatttctacagcattcatgtgaccaaggagtccacccaccccgtgaagcccctggcccagatcgccggaaacagatacgcctccggacctgtgggaaaggccctgagcgacgcatgtatgggcacaatcgcctccttcctgtctaagtaccaggacatcatcatcgaacaccagaaggtggtgaagggcaaccagaagagactggagagcctgcgggagctggccggcaaggaaaacctggaataccctagcgtgaccctgccacctcagcctcacaccaaggagggcgttgatgcctacaacgaagtgatcgcccgggtgcgaatgtgggtgaacctgaacctgtggcagaagctgaagctaagcagagatgatgccaagcctctgctgagactgaagggattcccttcctttcctctggtcgagagacaggccaacgaagtggactggtgggacatggtgtgtaacgtgaagaagctgatcaacgagaaaaaggaggatggcaaggtgttttggcagaatctggctggctacaagagacaggaagccctgagaccatacctgagcagcgaggaagatcggaagaagggaaagaaattcgctcggtaccagctgggcgacctgctgctgcacctggaaaagaagcacggcgaggactggggaaaggtgtacgacgaggcctgggagcggattgacaagaaagtggaaggcctgagcaagcacatcaagctggaagaggaacggagaagcgaggacgcccagagcaaggccgccctgaccgactggctgcgggctaaggccagcttcgtgatcgagggcctgaaggaggccgacaaggacgagttctgcagatgcgagctgaagctgcagaagtggtacggggacctgcggggaaagcccttcgccatcgaagccgagaacagcatcctggacatcagcggcttcagcaagcagtacaactgtgccttcatctggcagaaggacggcgtgaagaagctgaacctgtacctgatcatcaactacttcaagggcggcaagctgcggttcaagaagatcaaacctgaagccttcgaagccaacagattctacaccgtgatcaacaaaaagagcggcgagatcgtgcccatggaggtgaacttcaacttcgacgaccccaacctgatcatcctgcctctggcctttggcaagagacagggcagagaattcatctggaacgacctgctgtccctggaaaccggcagcctgaagctggccaacggaagagtgatcgagaagacactgtacaacagaagaacccggcaggatgagcctgccctgttcgtggccctgaccttcgagcggcgggaggtcctggactcctccaatatcaaaccaatgaacctgatcggcgtggcaagaggcgaaaacatccccgccgtgatcgccctgaccgaccccgagggctgcccactgagccggtttaaggatagcctgggaaacccaacccacatcctgagaatcggcgagagctataaggagaagcagcggaccatccaggccaagaaggaggtggagcagcggagagccggcggctacagccggaagtacgccagcaaagccaagaatctggcagacgatatggtgagaaacaccgctagagatctgctgtactacgccgtgacccaggatgccatgctgatcttcgccaacctgagccggggcttcggccggcagggcaagcggaccttcatggccgagagacagtacacacggatggaggactggctgaccgccaagctggcctacgagggcctgagcaagacctacctgtccaagacactggcccagtacacctccaagacatgcagcaactgtgggtttaccatcaccagcgccgactacgacagggtgctggagaagctgaagaagacagcaacaggctggatgaccacaattaacggcaaggagctgaaggtggagggccagattacctactacaacagatacaagagacagaacgtagtcaaggacctgtccgtcgagctggatagactgagcgaagaatctgtgaacaacgacatctcctcctggacaaagggcagaagcggagaagctctgagcctcctgaagaaaagattctcccatagacccgtgcaggagaagttcgtgtgcctgaactgcggcttcgagacacacgcagccgagcaagccgccctgaacatcgccagatcctggctgttcctgcggagccaggagtacaagaaataccagacaaacaagacaaccggcaacaccgataagagagccttcgtcgagacctggcagtccttttaccggaagaagcttaaggaggtgtggaaacctgccgtgcggtctggcggatctggcggaggctccacaagccaccaggaggtggtgaccttcgaggacgtggccgtgtacttcacccagaccgagtgggccggcctgagccccgcccagagggccctgtacaggagcgtgatgctggagatctacggcaacctgaccagcctgggctaccccgtgcccaagcccgccctggtgagcctgctggagaggggcgagctgccctggggcctggagaccagggacgacccccccgcccagggcaccaaggacatctgcaccagccccaagaaaaagagaaaagtctaagctgccttctgcggggcttgccttctggccatgcccttcttctctcccttgcacctgtacctcttggtctttgaataaagcctgagtaggaaggctagcaaaaaaaaaaaaaaaaaaaaaaaaaaaaaaaaaaaaaaaaaaaaaaaaaaaaaaaaaaaaaaaaaaaaaaaaaaaaaaaa

SEQ ID NO: 6764 - RNA, 5797 nt, synthetic construct
  source 1..5797: mol_type = other RNA
aggaaataagagagaaaagaagagtaagaagaaatataagagccaccatggcccctaagaagaagcgtaaagtgagccggatggaacgcctcgtctacgaggtgcggcagaagtgcagaaacatcgaggacatctgcatctcctgcggatctctgaacgtgaccctggagcacccactgttcatcggcggcatgtgccagaactgtaaaaactgttttctggagtgtgcctatcaatacgacgatgacggctaccagagctactgcaccatctgttgcggcggaagagaggtgctgatgtgtggaaataacaactgctgccggtgcttctgcgtggaatgcgtggacctgctggtgggccccggcgccgcccaggccgctattaaggaagatccttggaactgctacatgtgcggccacaagggcacatacggcctgctgagacggagagaggactggcctagcagactgcagatgttcttcgccaataaccacgaccaggagttcgacccccctaaggtgtaccctcccgtccccgccgagaagagaaagcccatccgggtcctgagcctgttcgatggcatcgccaccggtctgctggtgctgaaggacctgggcatccaggtggataggtacattgcctccgaggtgtgcgaggactccatcaccgtgggaatggtgcgtcatcagggcaagatcatgtacgtgggcgacgtgcggagcgtgacacagaagcatatccaggagtggggccctttcgacctggtgatcggcggcagcccttgcaatgacctgagcatcgtgaacccagcccggaagggcctgtacgagggaaccggcagactgttcttcgagttttacagactgctgcacgacgcccggcctaaggaaggcgacgaccggcccttcttttggctgttcgagaatgtggtggccatgggagtcagcgacaagcgggatattagccggttcctggagagcaaccccgtgatgatcgatgccaaggaagtgagcgccgcccaccgggccagatacttctggggcaatctgcctggcatgaacagacccctggccagcaccgtgaacgacaagctggagctgcaggagtgcctggagcacggccggatcgccaagttcagcaaggtgagaaccatcaccacccgaagcaacagcatcaaacaaggcaaggaccagcactttcctgtgttcatgaacgagaaggaggacatcctgtggtgtaccgagatggagagagtgttcgggttcccagtccactacacagatgtcagcaacatgtctagactggccagacagagactgctgggaagaagctggtccgtccctgtgatcagacacctgttcgcccctctgaaggagtacttcgcctgcgtgagcagcggcaacagcaacgccaacagccggggccccagcttctctagcggcctggtgccactgtccctgagagggagccacatgggccccatggagatctacaaaaccgtgagcgcctggaagcggcagcctgtgcgcgtgctgagcctgtttcggaatatcgataaagtcctgaaaagcctgggattcctggagagcggctctggctccggcggtggcaccctgaagtacgtggaggatgtgacaaacgtggtcagacgggatgtggagaagtggggccccttcgatctggtgtacggcagcacccaacccctgggcagctcttgtgaccggtgccctggctggtacatgtttcagttccaccggatcctgcagtacgccctgccgagacaggagtcccagcggccattcttttggattttcatggacaacttgctgctgaccgaggatgaccaggaaactaccactcggttcctgcagaccgaagccgtgaccctgcaggacgtgagaggccgggactaccagaacgccatgcgggtgtggtccaacatccctggactgaaaagcaagcacgcacctctgacccctaaagaagaggagtacctgcaggcccaggtgcggagcagaagcaagctggacgcccctaaggtggatctgctggtgaagaattgcctcctgcccctgagagagtacttcaagtatttcagccagaatagtctgcccctgggcggcccaagcagcggcgcccctcctcccagcggcggcagcccagccggctccccaacctctaccgaggagggcacctctgagtccgccacccccgagagcggccctggcacctccaccgagcccagcgagggcagcgcacccggcagccctgccggcagccccacctccacagaggagggaaccagcaccgagcccagcgaaggcagcgccccaggcaccagcaccgagcctagtgagggcggctctggcggcggcagcgcccaggagattaaacggatcaacaagatcagaagaagacttgtgaaagacagcaacaccaagaaggccggcaagacaggccccatgaaaaccctgctggttagagtgatgacacccgatctgagagagcggctggaaaacctgagaaagaagcctgaaaatatcccccagcccatcagcaatacatctagagccaacctgaataagctgctgaccgattacaccgaaatgaagaaggcgatcctgcatgtgtactgggaagagttccagaaggaccctgtgggcctgatgagccgggtggcccagcctgccagcaagaagatcgatcagaacaagctgaaacctgagatggacgagaagggcaacctgaccaccgccggctttgcctgctctcagtgtggccagcccctgttcgtgtacaagctggagcaggtgtctgagaagggcaaggcttacaccaactacttcggacggtgcaatgtggccgagcacgaaaagctgatcctgctggcccagctgaagcccgagaaggatagcgacgaagccgtgacatatagcctgggaaagtttgggcagagggccctggatttctacagcattcatgtgaccaaggagtccacccaccccgtgaagcccctggcccagatcgccggaaacagatacgcctccggacctgtgggaaaggccctgagcgacgcatgtatgggcacaatcgcctccttcctgtctaagtaccaggacatcatcatcgaacaccagaaggtggtgaagggcaaccagaagagactggagagcctgcgggagctggccggcaaggaaaacctggaataccctagcgtgaccctgccacctcagcctcacaccaaggagggcgttgatgcctacaacgaagtgatcgcccgggtgcgaatgtgggtgaacctgaacctgtggcagaagctgaagctaagcagagatgatgccaagcctctgctgagactgaagggattcccttcctttcctctggtcgagagacaggccaacgaagtggactggtgggacatggtgtgtaacgtgaagaagctgatcaacgagaaaaaggaggatggcaaggtgttttggcagaatctggctggctacaagagacaggaagccctgagaccatacctgagcagcgaggaagatcggaagaagggaaagaaattcgctcggtaccagctgggcgacctgctgctgcacctggaaaagaagcacggcgaggactggggaaaggtgtacgacgaggcctgggagcggattgacaagaaagtggaaggcctgagcaagcacatcaagctggaagaggaacggagaagcgaggacgcccagagcaaggccgccctgaccgactggctgcgggctaaggccagcttcgtgatcgagggcctgaaggaggccgacaaggacgagttctgcagatgcgagctgaagctgcagaagtggtacggggacctgcggggaaagcccttcgccatcgaagccgagaacagcatcctggacatcagcggcttcagcaagcagtacaactgtgccttcatctggcagaaggacggcgtgaagaagctgaacctgtacctgatcatcaactacttcaagggcggcaagctgcggttcaagaagatcaaacctgaagccttcgaagccaacagattctacaccgtgatcaacaaaaagagcggcgagatcgtgcccatggaggtgaacttcaacttcgacgaccccaacctgatcatcctgcctctggcctttggcaagagacagggcagagaattcatctggaacgacctgctgtccctggaaaccggcagcctgaagctggccaacggaagagtgatcgagaagacactgtacaacagaagaacccggcaggatgagcctgccctgttcgtggccctgaccttcgagcggcgggaggtcctggactcctccaatatcaaaccaatgaacctgatcggcgtggcaagaggcgaaaacatccccgccgtgatcgccctgaccgaccccgagggctgcccactgagccggtttaaggatagcctgggaaacccaacccacatcctgagaatcggcgagagctataaggagaagcagcggaccatccaggccaagaaggaggtggagcagcggagagccggcggctacagccggaagtacgccagcaaagccaagaatctggcagacgatatggtgagaaacaccgctagagatctgctgtactacgccgtgacccaggatgccatgctgatcttcgccaacctgagccggggcttcggccggcagggcaagcggaccttcatggccgagagacagtacacacggatggaggactggctgaccgccaagctggcctacgagggcctgagcaagacctacctgtccaagacactggcccagtacacctccaagacatgcagcaactgtgggtttaccatcaccagcgccgactacgacagggtgctggagaagctgaagaagacagcaacaggctggatgaccacaattaacggcaaggagctgaaggtggagggccagattacctactacaacagatacaagagacagaacgtagtcaaggacctgtccgtcgagctggatagactgagcgaagaatctgtgaacaacgacatctcctcctggacaaagggcagaagcggagaagctctgagcctcctgaagaaaagattctcccatagacccgtgcaggagaagttcgtgtgcctgaactgcggcttcgagacacacgcagccgagcaagccgccctgaacatcgccagatcctggctgttcctgcggagccaggagtacaagaaataccagacaaacaagacaaccggcaacaccgataagagagccttcgtcgagacctggcagtccttttaccggaagaagcttaaggaggtgtggaaacctgccgtgcggtctggcggatctggcggaggctccacaagcatggccaccgccctgaccgaccccgcccaggtgagcgtgaccttcgacgacgtggccgtgaccttcacccaggaggagtggggccagctggacctggcccagaggaccctgtaccaggaggtgatgctggagaactgcggcctgctggtgagcctgggctgccccgtgcccaggcccgagctgatctaccacctggagcacggccaggagccctggaccaggaaggaggacctgagccagggcaccagccccaagaaaaagagaaaagtctaagctgccttctgcggggcttgccttctggccatgcccttcttctctcccttgcacctgtacctcttggtctttgaataaagcctgagtaggaaggctagcaaaaaaaaaaaaaaaaaaaaaaaaaaaaaaaaaaaaaaaaaaaaaaaaaaaaaaaaaaaaaaaaaaaaaaaaaaaaaaaa

SEQ ID NO: 6765 - RNA, 5794 nt, synthetic construct
  source 1..5794: mol_type = other RNA
aggaaataagagagaaaagaagagtaagaagaaatataagagccaccatggcccctaagaagaagcgtaaagtgagccggatggaacgcctcgtctacgaggtgcggcagaagtgcagaaacatcgaggacatctgcatctcctgcggatctctgaacgtgaccctggagcacccactgttcatcggcggcatgtgccagaactgtaaaaactgttttctggagtgtgcctatcaatacgacgatgacggctaccagagctactgcaccatctgttgcggcggaagagaggtgctgatgtgtggaaataacaactgctgccggtgcttctgcgtggaatgcgtggacctgctggtgggccccggcgccgcccaggccgctattaaggaagatccttggaactgctacatgtgcggccacaagggcacatacggcctgctgagacggagagaggactggcctagcagactgcagatgttcttcgccaataaccacgaccaggagttcgacccccctaaggtgtaccctcccgtccccgccgagaagagaaagcccatccgggtcctgagcctgttcgatggcatcgccaccggtctgctggtgctgaaggacctgggcatccaggtggataggtacattgcctccgaggtgtgcgaggactccatcaccgtgggaatggtgcgtcatcagggcaagatcatgtacgtgggcgacgtgcggagcgtgacacagaagcatatccaggagtggggccctttcgacctggtgatcggcggcagcccttgcaatgacctgagcatcgtgaacccagcccggaagggcctgtacgagggaaccggcagactgttcttcgagttttacagactgctgcacgacgcccggcctaaggaaggcgacgaccggcccttcttttggctgttcgagaatgtggtggccatgggagtcagcgacaagcgggatattagccggttcctggagagcaaccccgtgatgatcgatgccaaggaagtgagcgccgcccaccgggccagatacttctggggcaatctgcctggcatgaacagacccctggccagcaccgtgaacgacaagctggagctgcaggagtgcctggagcacggccggatcgccaagttcagcaaggtgagaaccatcaccacccgaagcaacagcatcaaacaaggcaaggaccagcactttcctgtgttcatgaacgagaaggaggacatcctgtggtgtaccgagatggagagagtgttcgggttcccagtccactacacagatgtcagcaacatgtctagactggccagacagagactgctgggaagaagctggtccgtccctgtgatcagacacctgttcgcccctctgaaggagtacttcgcctgcgtgagcagcggcaacagcaacgccaacagccggggccccagcttctctagcggcctggtgccactgtccctgagagggagccacatgggccccatggagatctacaaaaccgtgagcgcctggaagcggcagcctgtgcgcgtgctgagcctgtttcggaatatcgataaagtcctgaaaagcctgggattcctggagagcggctctggctccggcggtggcaccctgaagtacgtggaggatgtgacaaacgtggtcagacgggatgtggagaagtggggccccttcgatctggtgtacggcagcacccaacccctgggcagctcttgtgaccggtgccctggctggtacatgtttcagttccaccggatcctgcagtacgccctgccgagacaggagtcccagcggccattcttttggattttcatggacaacttgctgctgaccgaggatgaccaggaaactaccactcggttcctgcagaccgaagccgtgaccctgcaggacgtgagaggccgggactaccagaacgccatgcgggtgtggtccaacatccctggactgaaaagcaagcacgcacctctgacccctaaagaagaggagtacctgcaggcccaggtgcggagcagaagcaagctggacgcccctaaggtggatctgctggtgaagaattgcctcctgcccctgagagagtacttcaagtatttcagccagaatagtctgcccctgggcggcccaagcagcggcgcccctcctcccagcggcggcagcccagccggctccccaacctctaccgaggagggcacctctgagtccgccacccccgagagcggccctggcacctccaccgagcccagcgagggcagcgcacccggcagccctgccggcagccccacctccacagaggagggaaccagcaccgagcccagcgaaggcagcgccccaggcaccagcaccgagcctagtgagggcggctctggcggcggcagcgcccaggagattaaacggatcaacaagatcagaagaagacttgtgaaagacagcaacaccaagaaggccggcaagacaggccccatgaaaaccctgctggttagagtgatgacacccgatctgagagagcggctggaaaacctgagaaagaagcctgaaaatatcccccagcccatcagcaatacatctagagccaacctgaataagctgctgaccgattacaccgaaatgaagaaggcgatcctgcatgtgtactgggaagagttccagaaggaccctgtgggcctgatgagccgggtggcccagcctgccagcaagaagatcgatcagaacaagctgaaacctgagatggacgagaagggcaacctgaccaccgccggctttgcctgctctcagtgtggccagcccctgttcgtgtacaagctggagcaggtgtctgagaagggcaaggcttacaccaactacttcggacggtgcaatgtggccgagcacgaaaagctgatcctgctggcccagctgaagcccgagaaggatagcgacgaagccgtgacatatagcctgggaaagtttgggcagagggccctggatttctacagcattcatgtgaccaaggagtccacccaccccgtgaagcccctggcccagatcgccggaaacagatacgcctccggacctgtgggaaaggccctgagcgacgcatgtatgggcacaatcgcctccttcctgtctaagtaccaggacatcatcatcgaacaccagaaggtggtgaagggcaaccagaagagactggagagcctgcgggagctggccggcaaggaaaacctggaataccctagcgtgaccctgccacctcagcctcacaccaaggagggcgttgatgcctacaacgaagtgatcgcccgggtgcgaatgtgggtgaacctgaacctgtggcagaagctgaagctaagcagagatgatgccaagcctctgctgagactgaagggattcccttcctttcctctggtcgagagacaggccaacgaagtggactggtgggacatggtgtgtaacgtgaagaagctgatcaacgagaaaaaggaggatggcaaggtgttttggcagaatctggctggctacaagagacaggaagccctgagaccatacctgagcagcgaggaagatcggaagaagggaaagaaattcgctcggtaccagctgggcgacctgctgctgcacctggaaaagaagcacggcgaggactggggaaaggtgtacgacgaggcctgggagcggattgacaagaaagtggaaggcctgagcaagcacatcaagctggaagaggaacggagaagcgaggacgcccagagcaaggccgccctgaccgactggctgcgggctaaggccagcttcgtgatcgagggcctgaaggaggccgacaaggacgagttctgcagatgcgagctgaagctgcagaagtggtacggggacctgcggggaaagcccttcgccatcgaagccgagaacagcatcctggacatcagcggcttcagcaagcagtacaactgtgccttcatctggcagaaggacggcgtgaagaagctgaacctgtacctgatcatcaactacttcaagggcggcaagctgcggttcaagaagatcaaacctgaagccttcgaagccaacagattctacaccgtgatcaacaaaaagagcggcgagatcgtgcccatggaggtgaacttcaacttcgacgaccccaacctgatcatcctgcctctggcctttggcaagagacagggcagagaattcatctggaacgacctgctgtccctggaaaccggcagcctgaagctggccaacggaagagtgatcgagaagacactgtacaacagaagaacccggcaggatgagcctgccctgttcgtggccctgaccttcgagcggcgggaggtcctggactcctccaatatcaaaccaatgaacctgatcggcgtggcaagaggcgaaaacatccccgccgtgatcgccctgaccgaccccgagggctgcccactgagccggtttaaggatagcctgggaaacccaacccacatcctgagaatcggcgagagctataaggagaagcagcggaccatccaggccaagaaggaggtggagcagcggagagccggcggctacagccggaagtacgccagcaaagccaagaatctggcagacgatatggtgagaaacaccgctagagatctgctgtactacgccgtgacccaggatgccatgctgatcttcgccaacctgagccggggcttcggccggcagggcaagcggaccttcatggccgagagacagtacacacggatggaggactggctgaccgccaagctggcctacgagggcctgagcaagacctacctgtccaagacactggcccagtacacctccaagacatgcagcaactgtgggtttaccatcaccagcgccgactacgacagggtgctggagaagctgaagaagacagcaacaggctggatgaccacaattaacggcaaggagctgaaggtggagggccagattacctactacaacagatacaagagacagaacgtagtcaaggacctgtccgtcgagctggatagactgagcgaagaatctgtgaacaacgacatctcctcctggacaaagggcagaagcggagaagctctgagcctcctgaagaaaagattctcccatagacccgtgcaggagaagttcgtgtgcctgaactgcggcttcgagacacacgcagccgagcaagccgccctgaacatcgccagatcctggctgttcctgcggagccaggagtacaagaaataccagacaaacaagacaaccggcaacaccgataagagagccttcgtcgagacctggcagtccttttaccggaagaagcttaaggaggtgtggaaacctgccgtgcggtctggcggatctggcggaggctccacaagcggcagcctggaggagggcagaagagccaccggcctgcccgccgcccaggtgcaggagcccgtgaccttcaaggacgtggccgtggacttcacccaggaggagtggggccagctggacctggtgcagagaaccctgtacagagacgtgatgctggagacctacggccacctgctgagcgtgggcaaccagatcgccaagcccgaggtgatcagcctgctggagcagggcgaggagccctggaccagccccaagaaaaagagaaaagtctaagctgccttctgcggggcttgccttctggccatgcccttcttctctcccttgcacctgtacctcttggtctttgaataaagcctgagtaggaaggctagcaaaaaaaaaaaaaaaaaaaaaaaaaaaaaaaaaaaaaaaaaaaaaaaaaaaaaaaaaaaaaaaaaaaaaaaaaaaaaaaa

SEQ ID NO: 6766 - RNA, 5797 nt, synthetic construct
  source 1..5797: mol_type = other RNA
aggaaataagagagaaaagaagagtaagaagaaatataagagccaccatggcccctaagaagaagcgtaaagtgagccggatggaacgcctcgtctacgaggtgcggcagaagtgcagaaacatcgaggacatctgcatctcctgcggatctctgaacgtgaccctggagcacccactgttcatcggcggcatgtgccagaactgtaaaaactgttttctggagtgtgcctatcaatacgacgatgacggctaccagagctactgcaccatctgttgcggcggaagagaggtgctgatgtgtggaaataacaactgctgccggtgcttctgcgtggaatgcgtggacctgctggtgggccccggcgccgcccaggccgctattaaggaagatccttggaactgctacatgtgcggccacaagggcacatacggcctgctgagacggagagaggactggcctagcagactgcagatgttcttcgccaataaccacgaccaggagttcgacccccctaaggtgtaccctcccgtccccgccgagaagagaaagcccatccgggtcctgagcctgttcgatggcatcgccaccggtctgctggtgctgaaggacctgggcatccaggtggataggtacattgcctccgaggtgtgcgaggactccatcaccgtgggaatggtgcgtcatcagggcaagatcatgtacgtgggcgacgtgcggagcgtgacacagaagcatatccaggagtggggccctttcgacctggtgatcggcggcagcccttgcaatgacctgagcatcgtgaacccagcccggaagggcctgtacgagggaaccggcagactgttcttcgagttttacagactgctgcacgacgcccggcctaaggaaggcgacgaccggcccttcttttggctgttcgagaatgtggtggccatgggagtcagcgacaagcgggatattagccggttcctggagagcaaccccgtgatgatcgatgccaaggaagtgagcgccgcccaccgggccagatacttctggggcaatctgcctggcatgaacagacccctggccagcaccgtgaacgacaagctggagctgcaggagtgcctggagcacggccggatcgccaagttcagcaaggtgagaaccatcaccacccgaagcaacagcatcaaacaaggcaaggaccagcactttcctgtgttcatgaacgagaaggaggacatcctgtggtgtaccgagatggagagagtgttcgggttcccagtccactacacagatgtcagcaacatgtctagactggccagacagagactgctgggaagaagctggtccgtccctgtgatcagacacctgttcgcccctctgaaggagtacttcgcctgcgtgagcagcggcaacagcaacgccaacagccggggccccagcttctctagcggcctggtgccactgtccctgagagggagccacatgggccccatggagatctacaaaaccgtgagcgcctggaagcggcagcctgtgcgcgtgctgagcctgtttcggaatatcgataaagtcctgaaaagcctgggattcctggagagcggctctggctccggcggtggcaccctgaagtacgtggaggatgtgacaaacgtggtcagacgggatgtggagaagtggggccccttcgatctggtgtacggcagcacccaacccctgggcagctcttgtgaccggtgccctggctggtacatgtttcagttccaccggatcctgcagtacgccctgccgagacaggagtcccagcggccattcttttggattttcatggacaacttgctgctgaccgaggatgaccaggaaactaccactcggttcctgcagaccgaagccgtgaccctgcaggacgtgagaggccgggactaccagaacgccatgcgggtgtggtccaacatccctggactgaaaagcaagcacgcacctctgacccctaaagaagaggagtacctgcaggcccaggtgcggagcagaagcaagctggacgcccctaaggtggatctgctggtgaagaattgcctcctgcccctgagagagtacttcaagtatttcagccagaatagtctgcccctgggcggcccaagcagcggcgcccctcctcccagcggcggcagcccagccggctccccaacctctaccgaggagggcacctctgagtccgccacccccgagagcggccctggcacctccaccgagcccagcgagggcagcgcacccggcagccctgccggcagccccacctccacagaggagggaaccagcaccgagcccagcgaaggcagcgccccaggcaccagcaccgagcctagtgagggcggctctggcggcggcagcgcccaggagattaaacggatcaacaagatcagaagaagacttgtgaaagacagcaacaccaagaaggccggcaagacaggccccatgaaaaccctgctggttagagtgatgacacccgatctgagagagcggctggaaaacctgagaaagaagcctgaaaatatcccccagcccatcagcaatacatctagagccaacctgaataagctgctgaccgattacaccgaaatgaagaaggcgatcctgcatgtgtactgggaagagttccagaaggaccctgtgggcctgatgagccgggtggcccagcctgccagcaagaagatcgatcagaacaagctgaaacctgagatggacgagaagggcaacctgaccaccgccggctttgcctgctctcagtgtggccagcccctgttcgtgtacaagctggagcaggtgtctgagaagggcaaggcttacaccaactacttcggacggtgcaatgtggccgagcacgaaaagctgatcctgctggcccagctgaagcccgagaaggatagcgacgaagccgtgacatatagcctgggaaagtttgggcagagggccctggatttctacagcattcatgtgaccaaggagtccacccaccccgtgaagcccctggcccagatcgccggaaacagatacgcctccggacctgtgggaaaggccctgagcgacgcatgtatgggcacaatcgcctccttcctgtctaagtaccaggacatcatcatcgaacaccagaaggtggtgaagggcaaccagaagagactggagagcctgcgggagctggccggcaaggaaaacctggaataccctagcgtgaccctgccacctcagcctcacaccaaggagggcgttgatgcctacaacgaagtgatcgcccgggtgcgaatgtgggtgaacctgaacctgtggcagaagctgaagctaagcagagatgatgccaagcctctgctgagactgaagggattcccttcctttcctctggtcgagagacaggccaacgaagtggactggtgggacatggtgtgtaacgtgaagaagctgatcaacgagaaaaaggaggatggcaaggtgttttggcagaatctggctggctacaagagacaggaagccctgagaccatacctgagcagcgaggaagatcggaagaagggaaagaaattcgctcggtaccagctgggcgacctgctgctgcacctggaaaagaagcacggcgaggactggggaaaggtgtacgacgaggcctgggagcggattgacaagaaagtggaaggcctgagcaagcacatcaagctggaagaggaacggagaagcgaggacgcccagagcaaggccgccctgaccgactggctgcgggctaaggccagcttcgtgatcgagggcctgaaggaggccgacaaggacgagttctgcagatgcgagctgaagctgcagaagtggtacggggacctgcggggaaagcccttcgccatcgaagccgagaacagcatcctggacatcagcggcttcagcaagcagtacaactgtgccttcatctggcagaaggacggcgtgaagaagctgaacctgtacctgatcatcaactacttcaagggcggcaagctgcggttcaagaagatcaaacctgaagccttcgaagccaacagattctacaccgtgatcaacaaaaagagcggcgagatcgtgcccatggaggtgaacttcaacttcgacgaccccaacctgatcatcctgcctctggcctttggcaagagacagggcagagaattcatctggaacgacctgctgtccctggaaaccggcagcctgaagctggccaacggaagagtgatcgagaagacactgtacaacagaagaacccggcaggatgagcctgccctgttcgtggccctgaccttcgagcggcgggaggtcctggactcctccaatatcaaaccaatgaacctgatcggcgtggcaagaggcgaaaacatccccgccgtgatcgccctgaccgaccccgagggctgcccactgagccggtttaaggatagcctgggaaacccaacccacatcctgagaatcggcgagagctataaggagaagcagcggaccatccaggccaagaaggaggtggagcagcggagagccggcggctacagccggaagtacgccagcaaagccaagaatctggcagacgatatggtgagaaacaccgctagagatctgctgtactacgccgtgacccaggatgccatgctgatcttcgccaacctgagccggggcttcggccggcagggcaagcggaccttcatggccgagagacagtacacacggatggaggactggctgaccgccaagctggcctacgagggcctgagcaagacctacctgtccaagacactggcccagtacacctccaagacatgcagcaactgtgggtttaccatcaccagcgccgactacgacagggtgctggagaagctgaagaagacagcaacaggctggatgaccacaattaacggcaaggagctgaaggtggagggccagattacctactacaacagatacaagagacagaacgtagtcaaggacctgtccgtcgagctggatagactgagcgaagaatctgtgaacaacgacatctcctcctggacaaagggcagaagcggagaagctctgagcctcctgaagaaaagattctcccatagacccgtgcaggagaagttcgtgtgcctgaactgcggcttcgagacacacgcagccgagcaagccgccctgaacatcgccagatcctggctgttcctgcggagccaggagtacaagaaataccagacaaacaagacaaccggcaacaccgataagagagccttcgtcgagacctggcagtccttttaccggaagaagcttaaggaggtgtggaaacctgccgtgcggtctggcggatctggcggaggctccacaagcggccccctgaccttcagggacgtggccatcgagttcagccaggaggagtggaagagcctggaccccgtgcagaaggccctgtactgggacgtgatgctggagaactacaggaacctggtgttcctgggcatcctgcccaagtgcatgaccaaggagctgccccccatcggcaacagcaacaccggcgagaagtgccagaccgtgatgctggagaggcacgagtgctacgacgtggagaacttcaccagccccaagaaaaagagaaaagtctaagctgccttctgcggggcttgccttctggccatgcccttcttctctcccttgcacctgtacctcttggtctttgaataaagcctgagtaggaaggctagcaaaaaaaaaaaaaaaaaaaaaaaaaaaaaaaaaaaaaaaaaaaaaaaaaaaaaaaaaaaaaaaaaaaaaaaaaaaaaaaa

SEQ ID NO: 6767 - RNA, 5797 nt, synthetic construct
  source 1..5797: mol_type = other RNA
aggaaataagagagaaaagaagagtaagaagaaatataagagccaccatggcccctaagaagaagcgtaaagtgagccggatggaacgcctcgtctacgaggtgcggcagaagtgcagaaacatcgaggacatctgcatctcctgcggatctctgaacgtgaccctggagcacccactgttcatcggcggcatgtgccagaactgtaaaaactgttttctggagtgtgcctatcaatacgacgatgacggctaccagagctactgcaccatctgttgcggcggaagagaggtgctgatgtgtggaaataacaactgctgccggtgcttctgcgtggaatgcgtggacctgctggtgggccccggcgccgcccaggccgctattaaggaagatccttggaactgctacatgtgcggccacaagggcacatacggcctgctgagacggagagaggactggcctagcagactgcagatgttcttcgccaataaccacgaccaggagttcgacccccctaaggtgtaccctcccgtccccgccgagaagagaaagcccatccgggtcctgagcctgttcgatggcatcgccaccggtctgctggtgctgaaggacctgggcatccaggtggataggtacattgcctccgaggtgtgcgaggactccatcaccgtgggaatggtgcgtcatcagggcaagatcatgtacgtgggcgacgtgcggagcgtgacacagaagcatatccaggagtggggccctttcgacctggtgatcggcggcagcccttgcaatgacctgagcatcgtgaacccagcccggaagggcctgtacgagggaaccggcagactgttcttcgagttttacagactgctgcacgacgcccggcctaaggaaggcgacgaccggcccttcttttggctgttcgagaatgtggtggccatgggagtcagcgacaagcgggatattagccggttcctggagagcaaccccgtgatgatcgatgccaaggaagtgagcgccgcccaccgggccagatacttctggggcaatctgcctggcatgaacagacccctggccagcaccgtgaacgacaagctggagctgcaggagtgcctggagcacggccggatcgccaagttcagcaaggtgagaaccatcaccacccgaagcaacagcatcaaacaaggcaaggaccagcactttcctgtgttcatgaacgagaaggaggacatcctgtggtgtaccgagatggagagagtgttcgggttcccagtccactacacagatgtcagcaacatgtctagactggccagacagagactgctgggaagaagctggtccgtccctgtgatcagacacctgttcgcccctctgaaggagtacttcgcctgcgtgagcagcggcaacagcaacgccaacagccggggccccagcttctctagcggcctggtgccactgtccctgagagggagccacatgggccccatggagatctacaaaaccgtgagcgcctggaagcggcagcctgtgcgcgtgctgagcctgtttcggaatatcgataaagtcctgaaaagcctgggattcctggagagcggctctggctccggcggtggcaccctgaagtacgtggaggatgtgacaaacgtggtcagacgggatgtggagaagtggggccccttcgatctggtgtacggcagcacccaacccctgggcagctcttgtgaccggtgccctggctggtacatgtttcagttccaccggatcctgcagtacgccctgccgagacaggagtcccagcggccattcttttggattttcatggacaacttgctgctgaccgaggatgaccaggaaactaccactcggttcctgcagaccgaagccgtgaccctgcaggacgtgagaggccgggactaccagaacgccatgcgggtgtggtccaacatccctggactgaaaagcaagcacgcacctctgacccctaaagaagaggagtacctgcaggcccaggtgcggagcagaagcaagctggacgcccctaaggtggatctgctggtgaagaattgcctcctgcccctgagagagtacttcaagtatttcagccagaatagtctgcccctgggcggcccaagcagcggcgcccctcctcccagcggcggcagcccagccggctccccaacctctaccgaggagggcacctctgagtccgccacccccgagagcggccctggcacctccaccgagcccagcgagggcagcgcacccggcagccctgccggcagccccacctccacagaggagggaaccagcaccgagcccagcgaaggcagcgccccaggcaccagcaccgagcctagtgagggcggctctggcggcggcagcgcccaggagattaaacggatcaacaagatcagaagaagacttgtgaaagacagcaacaccaagaaggccggcaagacaggccccatgaaaaccctgctggttagagtgatgacacccgatctgagagagcggctggaaaacctgagaaagaagcctgaaaatatcccccagcccatcagcaatacatctagagccaacctgaataagctgctgaccgattacaccgaaatgaagaaggcgatcctgcatgtgtactgggaagagttccagaaggaccctgtgggcctgatgagccgggtggcccagcctgccagcaagaagatcgatcagaacaagctgaaacctgagatggacgagaagggcaacctgaccaccgccggctttgcctgctctcagtgtggccagcccctgttcgtgtacaagctggagcaggtgtctgagaagggcaaggcttacaccaactacttcggacggtgcaatgtggccgagcacgaaaagctgatcctgctggcccagctgaagcccgagaaggatagcgacgaagccgtgacatatagcctgggaaagtttgggcagagggccctggatttctacagcattcatgtgaccaaggagtccacccaccccgtgaagcccctggcccagatcgccggaaacagatacgcctccggacctgtgggaaaggccctgagcgacgcatgtatgggcacaatcgcctccttcctgtctaagtaccaggacatcatcatcgaacaccagaaggtggtgaagggcaaccagaagagactggagagcctgcgggagctggccggcaaggaaaacctggaataccctagcgtgaccctgccacctcagcctcacaccaaggagggcgttgatgcctacaacgaagtgatcgcccgggtgcgaatgtgggtgaacctgaacctgtggcagaagctgaagctaagcagagatgatgccaagcctctgctgagactgaagggattcccttcctttcctctggtcgagagacaggccaacgaagtggactggtgggacatggtgtgtaacgtgaagaagctgatcaacgagaaaaaggaggatggcaaggtgttttggcagaatctggctggctacaagagacaggaagccctgagaccatacctgagcagcgaggaagatcggaagaagggaaagaaattcgctcggtaccagctgggcgacctgctgctgcacctggaaaagaagcacggcgaggactggggaaaggtgtacgacgaggcctgggagcggattgacaagaaagtggaaggcctgagcaagcacatcaagctggaagaggaacggagaagcgaggacgcccagagcaaggccgccctgaccgactggctgcgggctaaggccagcttcgtgatcgagggcctgaaggaggccgacaaggacgagttctgcagatgcgagctgaagctgcagaagtggtacggggacctgcggggaaagcccttcgccatcgaagccgagaacagcatcctggacatcagcggcttcagcaagcagtacaactgtgccttcatctggcagaaggacggcgtgaagaagctgaacctgtacctgatcatcaactacttcaagggcggcaagctgcggttcaagaagatcaaacctgaagccttcgaagccaacagattctacaccgtgatcaacaaaaagagcggcgagatcgtgcccatggaggtgaacttcaacttcgacgaccccaacctgatcatcctgcctctggcctttggcaagagacagggcagagaattcatctggaacgacctgctgtccctggaaaccggcagcctgaagctggccaacggaagagtgatcgagaagacactgtacaacagaagaacccggcaggatgagcctgccctgttcgtggccctgaccttcgagcggcgggaggtcctggactcctccaatatcaaaccaatgaacctgatcggcgtggcaagaggcgaaaacatccccgccgtgatcgccctgaccgaccccgagggctgcccactgagccggtttaaggatagcctgggaaacccaacccacatcctgagaatcggcgagagctataaggagaagcagcggaccatccaggccaagaaggaggtggagcagcggagagccggcggctacagccggaagtacgccagcaaagccaagaatctggcagacgatatggtgagaaacaccgctagagatctgctgtactacgccgtgacccaggatgccatgctgatcttcgccaacctgagccggggcttcggccggcagggcaagcggaccttcatggccgagagacagtacacacggatggaggactggctgaccgccaagctggcctacgagggcctgagcaagacctacctgtccaagacactggcccagtacacctccaagacatgcagcaactgtgggtttaccatcaccagcgccgactacgacagggtgctggagaagctgaagaagacagcaacaggctggatgaccacaattaacggcaaggagctgaaggtggagggccagattacctactacaacagatacaagagacagaacgtagtcaaggacctgtccgtcgagctggatagactgagcgaagaatctgtgaacaacgacatctcctcctggacaaagggcagaagcggagaagctctgagcctcctgaagaaaagattctcccatagacccgtgcaggagaagttcgtgtgcctgaactgcggcttcgagacacacgcagccgagcaagccgccctgaacatcgccagatcctggctgttcctgcggagccaggagtacaagaaataccagacaaacaagacaaccggcaacaccgataagagagccttcgtcgagacctggcagtccttttaccggaagaagcttaaggaggtgtggaaacctgccgtgcggtctggcggatctggcggaggctccacaagcgcccaggacgccctgaccttccaggacgtggccgtggacttcacctgggaggagtggggccagctggaccccgcccagcagaacctgtacagggacgtgatgctggagaactaccagaacctgatcagcctgggcttccccgtgagcaagcccgaggtgatcagccagctggagcagggcgaggtgccctgggccctgaagagggccgtggccgagggcagctgccccgactgggaggccaggaccagccccaagaaaaagagaaaagtctaagctgccttctgcggggcttgccttctggccatgcccttcttctctcccttgcacctgtacctcttggtctttgaataaagcctgagtaggaaggctagcaaaaaaaaaaaaaaaaaaaaaaaaaaaaaaaaaaaaaaaaaaaaaaaaaaaaaaaaaaaaaaaaaaaaaaaaaaaaaaaa

SEQ ID NO: 6768 - RNA, 5797 nt, synthetic construct
  source 1..5797: mol_type = other RNA
aggaaataagagagaaaagaagagtaagaagaaatataagagccaccatggcccctaagaagaagcgtaaagtgagccggatggaacgcctcgtctacgaggtgcggcagaagtgcagaaacatcgaggacatctgcatctcctgcggatctctgaacgtgaccctggagcacccactgttcatcggcggcatgtgccagaactgtaaaaactgttttctggagtgtgcctatcaatacgacgatgacggctaccagagctactgcaccatctgttgcggcggaagagaggtgctgatgtgtggaaataacaactgctgccggtgcttctgcgtggaatgcgtggacctgctggtgggccccggcgccgcccaggccgctattaaggaagatccttggaactgctacatgtgcggccacaagggcacatacggcctgctgagacggagagaggactggcctagcagactgcagatgttcttcgccaataaccacgaccaggagttcgacccccctaaggtgtaccctcccgtccccgccgagaagagaaagcccatccgggtcctgagcctgttcgatggcatcgccaccggtctgctggtgctgaaggacctgggcatccaggtggataggtacattgcctccgaggtgtgcgaggactccatcaccgtgggaatggtgcgtcatcagggcaagatcatgtacgtgggcgacgtgcggagcgtgacacagaagcatatccaggagtggggccctttcgacctggtgatcggcggcagcccttgcaatgacctgagcatcgtgaacccagcccggaagggcctgtacgagggaaccggcagactgttcttcgagttttacagactgctgcacgacgcccggcctaaggaaggcgacgaccggcccttcttttggctgttcgagaatgtggtggccatgggagtcagcgacaagcgggatattagccggttcctggagagcaaccccgtgatgatcgatgccaaggaagtgagcgccgcccaccgggccagatacttctggggcaatctgcctggcatgaacagacccctggccagcaccgtgaacgacaagctggagctgcaggagtgcctggagcacggccggatcgccaagttcagcaaggtgagaaccatcaccacccgaagcaacagcatcaaacaaggcaaggaccagcactttcctgtgttcatgaacgagaaggaggacatcctgtggtgtaccgagatggagagagtgttcgggttcccagtccactacacagatgtcagcaacatgtctagactggccagacagagactgctgggaagaagctggtccgtccctgtgatcagacacctgttcgcccctctgaaggagtacttcgcctgcgtgagcagcggcaacagcaacgccaacagccggggccccagcttctctagcggcctggtgccactgtccctgagagggagccacatgggccccatggagatctacaaaaccgtgagcgcctggaagcggcagcctgtgcgcgtgctgagcctgtttcggaatatcgataaagtcctgaaaagcctgggattcctggagagcggctctggctccggcggtggcaccctgaagtacgtggaggatgtgacaaacgtggtcagacgggatgtggagaagtggggccccttcgatctggtgtacggcagcacccaacccctgggcagctcttgtgaccggtgccctggctggtacatgtttcagttccaccggatcctgcagtacgccctgccgagacaggagtcccagcggccattcttttggattttcatggacaacttgctgctgaccgaggatgaccaggaaactaccactcggttcctgcagaccgaagccgtgaccctgcaggacgtgagaggccgggactaccagaacgccatgcgggtgtggtccaacatccctggactgaaaagcaagcacgcacctctgacccctaaagaagaggagtacctgcaggcccaggtgcggagcagaagcaagctggacgcccctaaggtggatctgctggtgaagaattgcctcctgcccctgagagagtacttcaagtatttcagccagaatagtctgcccctgggcggcccaagcagcggcgcccctcctcccagcggcggcagcccagccggctccccaacctctaccgaggagggcacctctgagtccgccacccccgagagcggccctggcacctccaccgagcccagcgagggcagcgcacccggcagccctgccggcagccccacctccacagaggagggaaccagcaccgagcccagcgaaggcagcgccccaggcaccagcaccgagcctagtgagggcggctctggcggcggcagcgcccaggagattaaacggatcaacaagatcagaagaagacttgtgaaagacagcaacaccaagaaggccggcaagacaggccccatgaaaaccctgctggttagagtgatgacacccgatctgagagagcggctggaaaacctgagaaagaagcctgaaaatatcccccagcccatcagcaatacatctagagccaacctgaataagctgctgaccgattacaccgaaatgaagaaggcgatcctgcatgtgtactgggaagagttccagaaggaccctgtgggcctgatgagccgggtggcccagcctgccagcaagaagatcgatcagaacaagctgaaacctgagatggacgagaagggcaacctgaccaccgccggctttgcctgctctcagtgtggccagcccctgttcgtgtacaagctggagcaggtgtctgagaagggcaaggcttacaccaactacttcggacggtgcaatgtggccgagcacgaaaagctgatcctgctggcccagctgaagcccgagaaggatagcgacgaagccgtgacatatagcctgggaaagtttgggcagagggccctggatttctacagcattcatgtgaccaaggagtccacccaccccgtgaagcccctggcccagatcgccggaaacagatacgcctccggacctgtgggaaaggccctgagcgacgcatgtatgggcacaatcgcctccttcctgtctaagtaccaggacatcatcatcgaacaccagaaggtggtgaagggcaaccagaagagactggagagcctgcgggagctggccggcaaggaaaacctggaataccctagcgtgaccctgccacctcagcctcacaccaaggagggcgttgatgcctacaacgaagtgatcgcccgggtgcgaatgtgggtgaacctgaacctgtggcagaagctgaagctaagcagagatgatgccaagcctctgctgagactgaagggattcccttcctttcctctggtcgagagacaggccaacgaagtggactggtgggacatggtgtgtaacgtgaagaagctgatcaacgagaaaaaggaggatggcaaggtgttttggcagaatctggctggctacaagagacaggaagccctgagaccatacctgagcagcgaggaagatcggaagaagggaaagaaattcgctcggtaccagctgggcgacctgctgctgcacctggaaaagaagcacggcgaggactggggaaaggtgtacgacgaggcctgggagcggattgacaagaaagtggaaggcctgagcaagcacatcaagctggaagaggaacggagaagcgaggacgcccagagcaaggccgccctgaccgactggctgcgggctaaggccagcttcgtgatcgagggcctgaaggaggccgacaaggacgagttctgcagatgcgagctgaagctgcagaagtggtacggggacctgcggggaaagcccttcgccatcgaagccgagaacagcatcctggacatcagcggcttcagcaagcagtacaactgtgccttcatctggcagaaggacggcgtgaagaagctgaacctgtacctgatcatcaactacttcaagggcggcaagctgcggttcaagaagatcaaacctgaagccttcgaagccaacagattctacaccgtgatcaacaaaaagagcggcgagatcgtgcccatggaggtgaacttcaacttcgacgaccccaacctgatcatcctgcctctggcctttggcaagagacagggcagagaattcatctggaacgacctgctgtccctggaaaccggcagcctgaagctggccaacggaagagtgatcgagaagacactgtacaacagaagaacccggcaggatgagcctgccctgttcgtggccctgaccttcgagcggcgggaggtcctggactcctccaatatcaaaccaatgaacctgatcggcgtggcaagaggcgaaaacatccccgccgtgatcgccctgaccgaccccgagggctgcccactgagccggtttaaggatagcctgggaaacccaacccacatcctgagaatcggcgagagctataaggagaagcagcggaccatccaggccaagaaggaggtggagcagcggagagccggcggctacagccggaagtacgccagcaaagccaagaatctggcagacgatatggtgagaaacaccgctagagatctgctgtactacgccgtgacccaggatgccatgctgatcttcgccaacctgagccggggcttcggccggcagggcaagcggaccttcatggccgagagacagtacacacggatggaggactggctgaccgccaagctggcctacgagggcctgagcaagacctacctgtccaagacactggcccagtacacctccaagacatgcagcaactgtgggtttaccatcaccagcgccgactacgacagggtgctggagaagctgaagaagacagcaacaggctggatgaccacaattaacggcaaggagctgaaggtggagggccagattacctactacaacagatacaagagacagaacgtagtcaaggacctgtccgtcgagctggatagactgagcgaagaatctgtgaacaacgacatctcctcctggacaaagggcagaagcggagaagctctgagcctcctgaagaaaagattctcccatagacccgtgcaggagaagttcgtgtgcctgaactgcggcttcgagacacacgcagccgagcaagccgccctgaacatcgccagatcctggctgttcctgcggagccaggagtacaagaaataccagacaaacaagacaaccggcaacaccgataagagagccttcgtcgagacctggcagtccttttaccggaagaagcttaaggaggtgtggaaacctgccgtgcggtctggcggatctggcggaggctccacaagccaggtgcccgtgatcttcgaggacgtggccgtgtacttctgggaggaggagtgggagatgctggaggagtggcagaaggagctgtacaaggagaccatgaaggagaactacaagaccctggtgagcctgggcatggagctgcccaccgagaagcccgacctgatcgtgaggatcgagagggaggagaacccctgcgtgaaggcccagtgggacagcagggacaagaccaggtggaggaacagcaccagccccaagaaaaagagaaaagtctaagctgccttctgcggggcttgccttctggccatgcccttcttctctcccttgcacctgtacctcttggtctttgaataaagcctgagtaggaaggctagcaaaaaaaaaaaaaaaaaaaaaaaaaaaaaaaaaaaaaaaaaaaaaaaaaaaaaaaaaaaaaaaaaaaaaaaaaaaaaaaa

SEQ ID NO: 6769 - RNA, 5797 nt, synthetic construct
  source 1..5797: mol_type = other RNA
aggaaataagagagaaaagaagagtaagaagaaatataagagccaccatggcccctaagaagaagcgtaaagtgagccggatggaacgcctcgtctacgaggtgcggcagaagtgcagaaacatcgaggacatctgcatctcctgcggatctctgaacgtgaccctggagcacccactgttcatcggcggcatgtgccagaactgtaaaaactgttttctggagtgtgcctatcaatacgacgatgacggctaccagagctactgcaccatctgttgcggcggaagagaggtgctgatgtgtggaaataacaactgctgccggtgcttctgcgtggaatgcgtggacctgctggtgggccccggcgccgcccaggccgctattaaggaagatccttggaactgctacatgtgcggccacaagggcacatacggcctgctgagacggagagaggactggcctagcagactgcagatgttcttcgccaataaccacgaccaggagttcgacccccctaaggtgtaccctcccgtccccgccgagaagagaaagcccatccgggtcctgagcctgttcgatggcatcgccaccggtctgctggtgctgaaggacctgggcatccaggtggataggtacattgcctccgaggtgtgcgaggactccatcaccgtgggaatggtgcgtcatcagggcaagatcatgtacgtgggcgacgtgcggagcgtgacacagaagcatatccaggagtggggccctttcgacctggtgatcggcggcagcccttgcaatgacctgagcatcgtgaacccagcccggaagggcctgtacgagggaaccggcagactgttcttcgagttttacagactgctgcacgacgcccggcctaaggaaggcgacgaccggcccttcttttggctgttcgagaatgtggtggccatgggagtcagcgacaagcgggatattagccggttcctggagagcaaccccgtgatgatcgatgccaaggaagtgagcgccgcccaccgggccagatacttctggggcaatctgcctggcatgaacagacccctggccagcaccgtgaacgacaagctggagctgcaggagtgcctggagcacggccggatcgccaagttcagcaaggtgagaaccatcaccacccgaagcaacagcatcaaacaaggcaaggaccagcactttcctgtgttcatgaacgagaaggaggacatcctgtggtgtaccgagatggagagagtgttcgggttcccagtccactacacagatgtcagcaacatgtctagactggccagacagagactgctgggaagaagctggtccgtccctgtgatcagacacctgttcgcccctctgaaggagtacttcgcctgcgtgagcagcggcaacagcaacgccaacagccggggccccagcttctctagcggcctggtgccactgtccctgagagggagccacatgggccccatggagatctacaaaaccgtgagcgcctggaagcggcagcctgtgcgcgtgctgagcctgtttcggaatatcgataaagtcctgaaaagcctgggattcctggagagcggctctggctccggcggtggcaccctgaagtacgtggaggatgtgacaaacgtggtcagacgggatgtggagaagtggggccccttcgatctggtgtacggcagcacccaacccctgggcagctcttgtgaccggtgccctggctggtacatgtttcagttccaccggatcctgcagtacgccctgccgagacaggagtcccagcggccattcttttggattttcatggacaacttgctgctgaccgaggatgaccaggaaactaccactcggttcctgcagaccgaagccgtgaccctgcaggacgtgagaggccgggactaccagaacgccatgcgggtgtggtccaacatccctggactgaaaagcaagcacgcacctctgacccctaaagaagaggagtacctgcaggcccaggtgcggagcagaagcaagctggacgcccctaaggtggatctgctggtgaagaattgcctcctgcccctgagagagtacttcaagtatttcagccagaatagtctgcccctgggcggcccaagcagcggcgcccctcctcccagcggcggcagcccagccggctccccaacctctaccgaggagggcacctctgagtccgccacccccgagagcggccctggcacctccaccgagcccagcgagggcagcgcacccggcagccctgccggcagccccacctccacagaggagggaaccagcaccgagcccagcgaaggcagcgccccaggcaccagcaccgagcctagtgagggcggctctggcggcggcagcgcccaggagattaaacggatcaacaagatcagaagaagacttgtgaaagacagcaacaccaagaaggccggcaagacaggccccatgaaaaccctgctggttagagtgatgacacccgatctgagagagcggctggaaaacctgagaaagaagcctgaaaatatcccccagcccatcagcaatacatctagagccaacctgaataagctgctgaccgattacaccgaaatgaagaaggcgatcctgcatgtgtactgggaagagttccagaaggaccctgtgggcctgatgagccgggtggcccagcctgccagcaagaagatcgatcagaacaagctgaaacctgagatggacgagaagggcaacctgaccaccgccggctttgcctgctctcagtgtggccagcccctgttcgtgtacaagctggagcaggtgtctgagaagggcaaggcttacaccaactacttcggacggtgcaatgtggccgagcacgaaaagctgatcctgctggcccagctgaagcccgagaaggatagcgacgaagccgtgacatatagcctgggaaagtttgggcagagggccctggatttctacagcattcatgtgaccaaggagtccacccaccccgtgaagcccctggcccagatcgccggaaacagatacgcctccggacctgtgggaaaggccctgagcgacgcatgtatgggcacaatcgcctccttcctgtctaagtaccaggacatcatcatcgaacaccagaaggtggtgaagggcaaccagaagagactggagagcctgcgggagctggccggcaaggaaaacctggaataccctagcgtgaccctgccacctcagcctcacaccaaggagggcgttgatgcctacaacgaagtgatcgcccgggtgcgaatgtgggtgaacctgaacctgtggcagaagctgaagctaagcagagatgatgccaagcctctgctgagactgaagggattcccttcctttcctctggtcgagagacaggccaacgaagtggactggtgggacatggtgtgtaacgtgaagaagctgatcaacgagaaaaaggaggatggcaaggtgttttggcagaatctggctggctacaagagacaggaagccctgagaccatacctgagcagcgaggaagatcggaagaagggaaagaaattcgctcggtaccagctgggcgacctgctgctgcacctggaaaagaagcacggcgaggactggggaaaggtgtacgacgaggcctgggagcggattgacaagaaagtggaaggcctgagcaagcacatcaagctggaagaggaacggagaagcgaggacgcccagagcaaggccgccctgaccgactggctgcgggctaaggccagcttcgtgatcgagggcctgaaggaggccgacaaggacgagttctgcagatgcgagctgaagctgcagaagtggtacggggacctgcggggaaagcccttcgccatcgaagccgagaacagcatcctggacatcagcggcttcagcaagcagtacaactgtgccttcatctggcagaaggacggcgtgaagaagctgaacctgtacctgatcatcaactacttcaagggcggcaagctgcggttcaagaagatcaaacctgaagccttcgaagccaacagattctacaccgtgatcaacaaaaagagcggcgagatcgtgcccatggaggtgaacttcaacttcgacgaccccaacctgatcatcctgcctctggcctttggcaagagacagggcagagaattcatctggaacgacctgctgtccctggaaaccggcagcctgaagctggccaacggaagagtgatcgagaagacactgtacaacagaagaacccggcaggatgagcctgccctgttcgtggccctgaccttcgagcggcgggaggtcctggactcctccaatatcaaaccaatgaacctgatcggcgtggcaagaggcgaaaacatccccgccgtgatcgccctgaccgaccccgagggctgcccactgagccggtttaaggatagcctgggaaacccaacccacatcctgagaatcggcgagagctataaggagaagcagcggaccatccaggccaagaaggaggtggagcagcggagagccggcggctacagccggaagtacgccagcaaagccaagaatctggcagacgatatggtgagaaacaccgctagagatctgctgtactacgccgtgacccaggatgccatgctgatcttcgccaacctgagccggggcttcggccggcagggcaagcggaccttcatggccgagagacagtacacacggatggaggactggctgaccgccaagctggcctacgagggcctgagcaagacctacctgtccaagacactggcccagtacacctccaagacatgcagcaactgtgggtttaccatcaccagcgccgactacgacagggtgctggagaagctgaagaagacagcaacaggctggatgaccacaattaacggcaaggagctgaaggtggagggccagattacctactacaacagatacaagagacagaacgtagtcaaggacctgtccgtcgagctggatagactgagcgaagaatctgtgaacaacgacatctcctcctggacaaagggcagaagcggagaagctctgagcctcctgaagaaaagattctcccatagacccgtgcaggagaagttcgtgtgcctgaactgcggcttcgagacacacgcagccgagcaagccgccctgaacatcgccagatcctggctgttcctgcggagccaggagtacaagaaataccagacaaacaagacaaccggcaacaccgataagagagccttcgtcgagacctggcagtccttttaccggaagaagcttaaggaggtgtggaaacctgccgtgcggtctggcggatctggcggaggctccacaagcgaggagctgcccgtggccttcgaggacgtggccgtgtacttcaccagggaggagtggggcatgctggacaagaggaggaaggagctgtacagggacgtgatgaggaggaactacgagctgctggccagcctgggccccgccgccgccaagcccgacctgatcagcaagctggagaggggcgccgccccctggatcaaggaccccaacggccccaagtggggcaagggcaagaagaagatggtgaccagccccaagaaaaagagaaaagtctaagctgccttctgcggggcttgccttctggccatgcccttcttctctcccttgcacctgtacctcttggtctttgaataaagcctgagtaggaaggctagcaaaaaaaaaaaaaaaaaaaaaaaaaaaaaaaaaaaaaaaaaaaaaaaaaaaaaaaaaaaaaaaaaaaaaaaaaaaaaaaa

SEQ ID NO: 6770 - RNA, 5797 nt, synthetic construct
  source 1..5797: mol_type = other RNA
aggaaataagagagaaaagaagagtaagaagaaatataagagccaccatggcccctaagaagaagcgtaaagtgagccggatggaacgcctcgtctacgaggtgcggcagaagtgcagaaacatcgaggacatctgcatctcctgcggatctctgaacgtgaccctggagcacccactgttcatcggcggcatgtgccagaactgtaaaaactgttttctggagtgtgcctatcaatacgacgatgacggctaccagagctactgcaccatctgttgcggcggaagagaggtgctgatgtgtggaaataacaactgctgccggtgcttctgcgtggaatgcgtggacctgctggtgggccccggcgccgcccaggccgctattaaggaagatccttggaactgctacatgtgcggccacaagggcacatacggcctgctgagacggagagaggactggcctagcagactgcagatgttcttcgccaataaccacgaccaggagttcgacccccctaaggtgtaccctcccgtccccgccgagaagagaaagcccatccgggtcctgagcctgttcgatggcatcgccaccggtctgctggtgctgaaggacctgggcatccaggtggataggtacattgcctccgaggtgtgcgaggactccatcaccgtgggaatggtgcgtcatcagggcaagatcatgtacgtgggcgacgtgcggagcgtgacacagaagcatatccaggagtggggccctttcgacctggtgatcggcggcagcccttgcaatgacctgagcatcgtgaacccagcccggaagggcctgtacgagggaaccggcagactgttcttcgagttttacagactgctgcacgacgcccggcctaaggaaggcgacgaccggcccttcttttggctgttcgagaatgtggtggccatgggagtcagcgacaagcgggatattagccggttcctggagagcaaccccgtgatgatcgatgccaaggaagtgagcgccgcccaccgggccagatacttctggggcaatctgcctggcatgaacagacccctggccagcaccgtgaacgacaagctggagctgcaggagtgcctggagcacggccggatcgccaagttcagcaaggtgagaaccatcaccacccgaagcaacagcatcaaacaaggcaaggaccagcactttcctgtgttcatgaacgagaaggaggacatcctgtggtgtaccgagatggagagagtgttcgggttcccagtccactacacagatgtcagcaacatgtctagactggccagacagagactgctgggaagaagctggtccgtccctgtgatcagacacctgttcgcccctctgaaggagtacttcgcctgcgtgagcagcggcaacagcaacgccaacagccggggccccagcttctctagcggcctggtgccactgtccctgagagggagccacatgggccccatggagatctacaaaaccgtgagcgcctggaagcggcagcctgtgcgcgtgctgagcctgtttcggaatatcgataaagtcctgaaaagcctgggattcctggagagcggctctggctccggcggtggcaccctgaagtacgtggaggatgtgacaaacgtggtcagacgggatgtggagaagtggggccccttcgatctggtgtacggcagcacccaacccctgggcagctcttgtgaccggtgccctggctggtacatgtttcagttccaccggatcctgcagtacgccctgccgagacaggagtcccagcggccattcttttggattttcatggacaacttgctgctgaccgaggatgaccaggaaactaccactcggttcctgcagaccgaagccgtgaccctgcaggacgtgagaggccgggactaccagaacgccatgcgggtgtggtccaacatccctggactgaaaagcaagcacgcacctctgacccctaaagaagaggagtacctgcaggcccaggtgcggagcagaagcaagctggacgcccctaaggtggatctgctggtgaagaattgcctcctgcccctgagagagtacttcaagtatttcagccagaatagtctgcccctgggcggcccaagcagcggcgcccctcctcccagcggcggcagcccagccggctccccaacctctaccgaggagggcacctctgagtccgccacccccgagagcggccctggcacctccaccgagcccagcgagggcagcgcacccggcagccctgccggcagccccacctccacagaggagggaaccagcaccgagcccagcgaaggcagcgccccaggcaccagcaccgagcctagtgagggcggctctggcggcggcagcgcccaggagattaaacggatcaacaagatcagaagaagacttgtgaaagacagcaacaccaagaaggccggcaagacaggccccatgaaaaccctgctggttagagtgatgacacccgatctgagagagcggctggaaaacctgagaaagaagcctgaaaatatcccccagcccatcagcaatacatctagagccaacctgaataagctgctgaccgattacaccgaaatgaagaaggcgatcctgcatgtgtactgggaagagttccagaaggaccctgtgggcctgatgagccgggtggcccagcctgccagcaagaagatcgatcagaacaagctgaaacctgagatggacgagaagggcaacctgaccaccgccggctttgcctgctctcagtgtggccagcccctgttcgtgtacaagctggagcaggtgtctgagaagggcaaggcttacaccaactacttcggacggtgcaatgtggccgagcacgaaaagctgatcctgctggcccagctgaagcccgagaaggatagcgacgaagccgtgacatatagcctgggaaagtttgggcagagggccctggatttctacagcattcatgtgaccaaggagtccacccaccccgtgaagcccctggcccagatcgccggaaacagatacgcctccggacctgtgggaaaggccctgagcgacgcatgtatgggcacaatcgcctccttcctgtctaagtaccaggacatcatcatcgaacaccagaaggtggtgaagggcaaccagaagagactggagagcctgcgggagctggccggcaaggaaaacctggaataccctagcgtgaccctgccacctcagcctcacaccaaggagggcgttgatgcctacaacgaagtgatcgcccgggtgcgaatgtgggtgaacctgaacctgtggcagaagctgaagctaagcagagatgatgccaagcctctgctgagactgaagggattcccttcctttcctctggtcgagagacaggccaacgaagtggactggtgggacatggtgtgtaacgtgaagaagctgatcaacgagaaaaaggaggatggcaaggtgttttggcagaatctggctggctacaagagacaggaagccctgagaccatacctgagcagcgaggaagatcggaagaagggaaagaaattcgctcggtaccagctgggcgacctgctgctgcacctggaaaagaagcacggcgaggactggggaaaggtgtacgacgaggcctgggagcggattgacaagaaagtggaaggcctgagcaagcacatcaagctggaagaggaacggagaagcgaggacgcccagagcaaggccgccctgaccgactggctgcgggctaaggccagcttcgtgatcgagggcctgaaggaggccgacaaggacgagttctgcagatgcgagctgaagctgcagaagtggtacggggacctgcggggaaagcccttcgccatcgaagccgagaacagcatcctggacatcagcggcttcagcaagcagtacaactgtgccttcatctggcagaaggacggcgtgaagaagctgaacctgtacctgatcatcaactacttcaagggcggcaagctgcggttcaagaagatcaaacctgaagccttcgaagccaacagattctacaccgtgatcaacaaaaagagcggcgagatcgtgcccatggaggtgaacttcaacttcgacgaccccaacctgatcatcctgcctctggcctttggcaagagacagggcagagaattcatctggaacgacctgctgtccctggaaaccggcagcctgaagctggccaacggaagagtgatcgagaagacactgtacaacagaagaacccggcaggatgagcctgccctgttcgtggccctgaccttcgagcggcgggaggtcctggactcctccaatatcaaaccaatgaacctgatcggcgtggcaagaggcgaaaacatccccgccgtgatcgccctgaccgaccccgagggctgcccactgagccggtttaaggatagcctgggaaacccaacccacatcctgagaatcggcgagagctataaggagaagcagcggaccatccaggccaagaaggaggtggagcagcggagagccggcggctacagccggaagtacgccagcaaagccaagaatctggcagacgatatggtgagaaacaccgctagagatctgctgtactacgccgtgacccaggatgccatgctgatcttcgccaacctgagccggggcttcggccggcagggcaagcggaccttcatggccgagagacagtacacacggatggaggactggctgaccgccaagctggcctacgagggcctgagcaagacctacctgtccaagacactggcccagtacacctccaagacatgcagcaactgtgggtttaccatcaccagcgccgactacgacagggtgctggagaagctgaagaagacagcaacaggctggatgaccacaattaacggcaaggagctgaaggtggagggccagattacctactacaacagatacaagagacagaacgtagtcaaggacctgtccgtcgagctggatagactgagcgaagaatctgtgaacaacgacatctcctcctggacaaagggcagaagcggagaagctctgagcctcctgaagaaaagattctcccatagacccgtgcaggagaagttcgtgtgcctgaactgcggcttcgagacacacgcagccgagcaagccgccctgaacatcgccagatcctggctgttcctgcggagccaggagtacaagaaataccagacaaacaagacaaccggcaacaccgataagagagccttcgtcgagacctggcagtccttttaccggaagaagcttaaggaggtgtggaaacctgccgtgcggtctggcggatctggcggaggctccacaagccccctggagctggtgaccttcaaggacgtggccgtggacttcagctgggaggagtggggccacctggagcccagccagaaggagctgtacagggaggtgatgctggagaactacaggaacctggtgtgcctgggcctggccatcagcaagcccgacgtgatcttccagctggagcagggcgaggccccctggatgcccgagagggagggccccaagtgcaggtgcgccgactggaagaccaggaccagccccaagaaaaagagaaaagtctaagctgccttctgcggggcttgccttctggccatgcccttcttctctcccttgcacctgtacctcttggtctttgaataaagcctgagtaggaaggctagcaaaaaaaaaaaaaaaaaaaaaaaaaaaaaaaaaaaaaaaaaaaaaaaaaaaaaaaaaaaaaaaaaaaaaaaaaaaaaaaa

SEQ ID NO: 6771 - RNA, 5797 nt, synthetic construct
  source 1..5797: mol_type = other RNA
aggaaataagagagaaaagaagagtaagaagaaatataagagccaccatggcccctaagaagaagcgtaaagtgagccggatggaacgcctcgtctacgaggtgcggcagaagtgcagaaacatcgaggacatctgcatctcctgcggatctctgaacgtgaccctggagcacccactgttcatcggcggcatgtgccagaactgtaaaaactgttttctggagtgtgcctatcaatacgacgatgacggctaccagagctactgcaccatctgttgcggcggaagagaggtgctgatgtgtggaaataacaactgctgccggtgcttctgcgtggaatgcgtggacctgctggtgggccccggcgccgcccaggccgctattaaggaagatccttggaactgctacatgtgcggccacaagggcacatacggcctgctgagacggagagaggactggcctagcagactgcagatgttcttcgccaataaccacgaccaggagttcgacccccctaaggtgtaccctcccgtccccgccgagaagagaaagcccatccgggtcctgagcctgttcgatggcatcgccaccggtctgctggtgctgaaggacctgggcatccaggtggataggtacattgcctccgaggtgtgcgaggactccatcaccgtgggaatggtgcgtcatcagggcaagatcatgtacgtgggcgacgtgcggagcgtgacacagaagcatatccaggagtggggccctttcgacctggtgatcggcggcagcccttgcaatgacctgagcatcgtgaacccagcccggaagggcctgtacgagggaaccggcagactgttcttcgagttttacagactgctgcacgacgcccggcctaaggaaggcgacgaccggcccttcttttggctgttcgagaatgtggtggccatgggagtcagcgacaagcgggatattagccggttcctggagagcaaccccgtgatgatcgatgccaaggaagtgagcgccgcccaccgggccagatacttctggggcaatctgcctggcatgaacagacccctggccagcaccgtgaacgacaagctggagctgcaggagtgcctggagcacggccggatcgccaagttcagcaaggtgagaaccatcaccacccgaagcaacagcatcaaacaaggcaaggaccagcactttcctgtgttcatgaacgagaaggaggacatcctgtggtgtaccgagatggagagagtgttcgggttcccagtccactacacagatgtcagcaacatgtctagactggccagacagagactgctgggaagaagctggtccgtccctgtgatcagacacctgttcgcccctctgaaggagtacttcgcctgcgtgagcagcggcaacagcaacgccaacagccggggccccagcttctctagcggcctggtgccactgtccctgagagggagccacatgggccccatggagatctacaaaaccgtgagcgcctggaagcggcagcctgtgcgcgtgctgagcctgtttcggaatatcgataaagtcctgaaaagcctgggattcctggagagcggctctggctccggcggtggcaccctgaagtacgtggaggatgtgacaaacgtggtcagacgggatgtggagaagtggggccccttcgatctggtgtacggcagcacccaacccctgggcagctcttgtgaccggtgccctggctggtacatgtttcagttccaccggatcctgcagtacgccctgccgagacaggagtcccagcggccattcttttggattttcatggacaacttgctgctgaccgaggatgaccaggaaactaccactcggttcctgcagaccgaagccgtgaccctgcaggacgtgagaggccgggactaccagaacgccatgcgggtgtggtccaacatccctggactgaaaagcaagcacgcacctctgacccctaaagaagaggagtacctgcaggcccaggtgcggagcagaagcaagctggacgcccctaaggtggatctgctggtgaagaattgcctcctgcccctgagagagtacttcaagtatttcagccagaatagtctgcccctgggcggcccaagcagcggcgcccctcctcccagcggcggcagcccagccggctccccaacctctaccgaggagggcacctctgagtccgccacccccgagagcggccctggcacctccaccgagcccagcgagggcagcgcacccggcagccctgccggcagccccacctccacagaggagggaaccagcaccgagcccagcgaaggcagcgccccaggcaccagcaccgagcctagtgagggcggctctggcggcggcagcgcccaggagattaaacggatcaacaagatcagaagaagacttgtgaaagacagcaacaccaagaaggccggcaagacaggccccatgaaaaccctgctggttagagtgatgacacccgatctgagagagcggctggaaaacctgagaaagaagcctgaaaatatcccccagcccatcagcaatacatctagagccaacctgaataagctgctgaccgattacaccgaaatgaagaaggcgatcctgcatgtgtactgggaagagttccagaaggaccctgtgggcctgatgagccgggtggcccagcctgccagcaagaagatcgatcagaacaagctgaaacctgagatggacgagaagggcaacctgaccaccgccggctttgcctgctctcagtgtggccagcccctgttcgtgtacaagctggagcaggtgtctgagaagggcaaggcttacaccaactacttcggacggtgcaatgtggccgagcacgaaaagctgatcctgctggcccagctgaagcccgagaaggatagcgacgaagccgtgacatatagcctgggaaagtttgggcagagggccctggatttctacagcattcatgtgaccaaggagtccacccaccccgtgaagcccctggcccagatcgccggaaacagatacgcctccggacctgtgggaaaggccctgagcgacgcatgtatgggcacaatcgcctccttcctgtctaagtaccaggacatcatcatcgaacaccagaaggtggtgaagggcaaccagaagagactggagagcctgcgggagctggccggcaaggaaaacctggaataccctagcgtgaccctgccacctcagcctcacaccaaggagggcgttgatgcctacaacgaagtgatcgcccgggtgcgaatgtgggtgaacctgaacctgtggcagaagctgaagctaagcagagatgatgccaagcctctgctgagactgaagggattcccttcctttcctctggtcgagagacaggccaacgaagtggactggtgggacatggtgtgtaacgtgaagaagctgatcaacgagaaaaaggaggatggcaaggtgttttggcagaatctggctggctacaagagacaggaagccctgagaccatacctgagcagcgaggaagatcggaagaagggaaagaaattcgctcggtaccagctgggcgacctgctgctgcacctggaaaagaagcacggcgaggactggggaaaggtgtacgacgaggcctgggagcggattgacaagaaagtggaaggcctgagcaagcacatcaagctggaagaggaacggagaagcgaggacgcccagagcaaggccgccctgaccgactggctgcgggctaaggccagcttcgtgatcgagggcctgaaggaggccgacaaggacgagttctgcagatgcgagctgaagctgcagaagtggtacggggacctgcggggaaagcccttcgccatcgaagccgagaacagcatcctggacatcagcggcttcagcaagcagtacaactgtgccttcatctggcagaaggacggcgtgaagaagctgaacctgtacctgatcatcaactacttcaagggcggcaagctgcggttcaagaagatcaaacctgaagccttcgaagccaacagattctacaccgtgatcaacaaaaagagcggcgagatcgtgcccatggaggtgaacttcaacttcgacgaccccaacctgatcatcctgcctctggcctttggcaagagacagggcagagaattcatctggaacgacctgctgtccctggaaaccggcagcctgaagctggccaacggaagagtgatcgagaagacactgtacaacagaagaacccggcaggatgagcctgccctgttcgtggccctgaccttcgagcggcgggaggtcctggactcctccaatatcaaaccaatgaacctgatcggcgtggcaagaggcgaaaacatccccgccgtgatcgccctgaccgaccccgagggctgcccactgagccggtttaaggatagcctgggaaacccaacccacatcctgagaatcggcgagagctataaggagaagcagcggaccatccaggccaagaaggaggtggagcagcggagagccggcggctacagccggaagtacgccagcaaagccaagaatctggcagacgatatggtgagaaacaccgctagagatctgctgtactacgccgtgacccaggatgccatgctgatcttcgccaacctgagccggggcttcggccggcagggcaagcggaccttcatggccgagagacagtacacacggatggaggactggctgaccgccaagctggcctacgagggcctgagcaagacctacctgtccaagacactggcccagtacacctccaagacatgcagcaactgtgggtttaccatcaccagcgccgactacgacagggtgctggagaagctgaagaagacagcaacaggctggatgaccacaattaacggcaaggagctgaaggtggagggccagattacctactacaacagatacaagagacagaacgtagtcaaggacctgtccgtcgagctggatagactgagcgaagaatctgtgaacaacgacatctcctcctggacaaagggcagaagcggagaagctctgagcctcctgaagaaaagattctcccatagacccgtgcaggagaagttcgtgtgcctgaactgcggcttcgagacacacgcagccgagcaagccgccctgaacatcgccagatcctggctgttcctgcggagccaggagtacaagaaataccagacaaacaagacaaccggcaacaccgataagagagccttcgtcgagacctggcagtccttttaccggaagaagcttaaggaggtgtggaaacctgccgtgcggtctggcggatctggcggaggctccacaagcgagatgggcctgctgaccttcagggacatcgccatcgagttcagcctggccgagtggcagtgcctggaccacgcccagaggaacctgtacagggacgtgatgctggagaactacaggaacctggtgagcctgggcatcgccgtgagcaagcccgacctgatcacctgcctggagcagaacaaggagcccaggaacatcaagaggaacgagatggtggccaagcaccccggcagggagaagagcaccagccccaagaaaaagagaaaagtctaagctgccttctgcggggcttgccttctggccatgcccttcttctctcccttgcacctgtacctcttggtctttgaataaagcctgagtaggaaggctagcaaaaaaaaaaaaaaaaaaaaaaaaaaaaaaaaaaaaaaaaaaaaaaaaaaaaaaaaaaaaaaaaaaaaaaaaaaaaaaaa

SEQ ID NO: 6772 - RNA, 5797 nt, synthetic construct
  source 1..5797: mol_type = other RNA
aggaaataagagagaaaagaagagtaagaagaaatataagagccaccatggcccctaagaagaagcgtaaagtgagccggatggaacgcctcgtctacgaggtgcggcagaagtgcagaaacatcgaggacatctgcatctcctgcggatctctgaacgtgaccctggagcacccactgttcatcggcggcatgtgccagaactgtaaaaactgttttctggagtgtgcctatcaatacgacgatgacggctaccagagctactgcaccatctgttgcggcggaagagaggtgctgatgtgtggaaataacaactgctgccggtgcttctgcgtggaatgcgtggacctgctggtgggccccggcgccgcccaggccgctattaaggaagatccttggaactgctacatgtgcggccacaagggcacatacggcctgctgagacggagagaggactggcctagcagactgcagatgttcttcgccaataaccacgaccaggagttcgacccccctaaggtgtaccctcccgtccccgccgagaagagaaagcccatccgggtcctgagcctgttcgatggcatcgccaccggtctgctggtgctgaaggacctgggcatccaggtggataggtacattgcctccgaggtgtgcgaggactccatcaccgtgggaatggtgcgtcatcagggcaagatcatgtacgtgggcgacgtgcggagcgtgacacagaagcatatccaggagtggggccctttcgacctggtgatcggcggcagcccttgcaatgacctgagcatcgtgaacccagcccggaagggcctgtacgagggaaccggcagactgttcttcgagttttacagactgctgcacgacgcccggcctaaggaaggcgacgaccggcccttcttttggctgttcgagaatgtggtggccatgggagtcagcgacaagcgggatattagccggttcctggagagcaaccccgtgatgatcgatgccaaggaagtgagcgccgcccaccgggccagatacttctggggcaatctgcctggcatgaacagacccctggccagcaccgtgaacgacaagctggagctgcaggagtgcctggagcacggccggatcgccaagttcagcaaggtgagaaccatcaccacccgaagcaacagcatcaaacaaggcaaggaccagcactttcctgtgttcatgaacgagaaggaggacatcctgtggtgtaccgagatggagagagtgttcgggttcccagtccactacacagatgtcagcaacatgtctagactggccagacagagactgctgggaagaagctggtccgtccctgtgatcagacacctgttcgcccctctgaaggagtacttcgcctgcgtgagcagcggcaacagcaacgccaacagccggggccccagcttctctagcggcctggtgccactgtccctgagagggagccacatgggccccatggagatctacaaaaccgtgagcgcctggaagcggcagcctgtgcgcgtgctgagcctgtttcggaatatcgataaagtcctgaaaagcctgggattcctggagagcggctctggctccggcggtggcaccctgaagtacgtggaggatgtgacaaacgtggtcagacgggatgtggagaagtggggccccttcgatctggtgtacggcagcacccaacccctgggcagctcttgtgaccggtgccctggctggtacatgtttcagttccaccggatcctgcagtacgccctgccgagacaggagtcccagcggccattcttttggattttcatggacaacttgctgctgaccgaggatgaccaggaaactaccactcggttcctgcagaccgaagccgtgaccctgcaggacgtgagaggccgggactaccagaacgccatgcgggtgtggtccaacatccctggactgaaaagcaagcacgcacctctgacccctaaagaagaggagtacctgcaggcccaggtgcggagcagaagcaagctggacgcccctaaggtggatctgctggtgaagaattgcctcctgcccctgagagagtacttcaagtatttcagccagaatagtctgcccctgggcggcccaagcagcggcgcccctcctcccagcggcggcagcccagccggctccccaacctctaccgaggagggcacctctgagtccgccacccccgagagcggccctggcacctccaccgagcccagcgagggcagcgcacccggcagccctgccggcagccccacctccacagaggagggaaccagcaccgagcccagcgaaggcagcgccccaggcaccagcaccgagcctagtgagggcggctctggcggcggcagcgcccaggagattaaacggatcaacaagatcagaagaagacttgtgaaagacagcaacaccaagaaggccggcaagacaggccccatgaaaaccctgctggttagagtgatgacacccgatctgagagagcggctggaaaacctgagaaagaagcctgaaaatatcccccagcccatcagcaatacatctagagccaacctgaataagctgctgaccgattacaccgaaatgaagaaggcgatcctgcatgtgtactgggaagagttccagaaggaccctgtgggcctgatgagccgggtggcccagcctgccagcaagaagatcgatcagaacaagctgaaacctgagatggacgagaagggcaacctgaccaccgccggctttgcctgctctcagtgtggccagcccctgttcgtgtacaagctggagcaggtgtctgagaagggcaaggcttacaccaactacttcggacggtgcaatgtggccgagcacgaaaagctgatcctgctggcccagctgaagcccgagaaggatagcgacgaagccgtgacatatagcctgggaaagtttgggcagagggccctggatttctacagcattcatgtgaccaaggagtccacccaccccgtgaagcccctggcccagatcgccggaaacagatacgcctccggacctgtgggaaaggccctgagcgacgcatgtatgggcacaatcgcctccttcctgtctaagtaccaggacatcatcatcgaacaccagaaggtggtgaagggcaaccagaagagactggagagcctgcgggagctggccggcaaggaaaacctggaataccctagcgtgaccctgccacctcagcctcacaccaaggagggcgttgatgcctacaacgaagtgatcgcccgggtgcgaatgtgggtgaacctgaacctgtggcagaagctgaagctaagcagagatgatgccaagcctctgctgagactgaagggattcccttcctttcctctggtcgagagacaggccaacgaagtggactggtgggacatggtgtgtaacgtgaagaagctgatcaacgagaaaaaggaggatggcaaggtgttttggcagaatctggctggctacaagagacaggaagccctgagaccatacctgagcagcgaggaagatcggaagaagggaaagaaattcgctcggtaccagctgggcgacctgctgctgcacctggaaaagaagcacggcgaggactggggaaaggtgtacgacgaggcctgggagcggattgacaagaaagtggaaggcctgagcaagcacatcaagctggaagaggaacggagaagcgaggacgcccagagcaaggccgccctgaccgactggctgcgggctaaggccagcttcgtgatcgagggcctgaaggaggccgacaaggacgagttctgcagatgcgagctgaagctgcagaagtggtacggggacctgcggggaaagcccttcgccatcgaagccgagaacagcatcctggacatcagcggcttcagcaagcagtacaactgtgccttcatctggcagaaggacggcgtgaagaagctgaacctgtacctgatcatcaactacttcaagggcggcaagctgcggttcaagaagatcaaacctgaagccttcgaagccaacagattctacaccgtgatcaacaaaaagagcggcgagatcgtgcccatggaggtgaacttcaacttcgacgaccccaacctgatcatcctgcctctggcctttggcaagagacagggcagagaattcatctggaacgacctgctgtccctggaaaccggcagcctgaagctggccaacggaagagtgatcgagaagacactgtacaacagaagaacccggcaggatgagcctgccctgttcgtggccctgaccttcgagcggcgggaggtcctggactcctccaatatcaaaccaatgaacctgatcggcgtggcaagaggcgaaaacatccccgccgtgatcgccctgaccgaccccgagggctgcccactgagccggtttaaggatagcctgggaaacccaacccacatcctgagaatcggcgagagctataaggagaagcagcggaccatccaggccaagaaggaggtggagcagcggagagccggcggctacagccggaagtacgccagcaaagccaagaatctggcagacgatatggtgagaaacaccgctagagatctgctgtactacgccgtgacccaggatgccatgctgatcttcgccaacctgagccggggcttcggccggcagggcaagcggaccttcatggccgagagacagtacacacggatggaggactggctgaccgccaagctggcctacgagggcctgagcaagacctacctgtccaagacactggcccagtacacctccaagacatgcagcaactgtgggtttaccatcaccagcgccgactacgacagggtgctggagaagctgaagaagacagcaacaggctggatgaccacaattaacggcaaggagctgaaggtggagggccagattacctactacaacagatacaagagacagaacgtagtcaaggacctgtccgtcgagctggatagactgagcgaagaatctgtgaacaacgacatctcctcctggacaaagggcagaagcggagaagctctgagcctcctgaagaaaagattctcccatagacccgtgcaggagaagttcgtgtgcctgaactgcggcttcgagacacacgcagccgagcaagccgccctgaacatcgccagatcctggctgttcctgcggagccaggagtacaagaaataccagacaaacaagacaaccggcaacaccgataagagagccttcgtcgagacctggcagtccttttaccggaagaagcttaaggaggtgtggaaacctgccgtgcggtctggcggatctggcggaggctccacaagcagccagggcctggtgaccttcagggacgtggccctggacttcagccaggaggagtgggagtggctggaccccagccagaaggacctgtacagggacgtgatgctggagaactacaggaacctggtgtgcctgggcctgagcatcagcaagcccaacatgatcagcctgctggagcagggcaaggagccctggatggtgcagagggagatgagcgacgacccctacaccgactgggagagctggaccagccccaagaaaaagagaaaagtctaagctgccttctgcggggcttgccttctggccatgcccttcttctctcccttgcacctgtacctcttggtctttgaataaagcctgagtaggaaggctagcaaaaaaaaaaaaaaaaaaaaaaaaaaaaaaaaaaaaaaaaaaaaaaaaaaaaaaaaaaaaaaaaaaaaaaaaaaaaaaaa

SEQ ID NO: 6773 - RNA, 5797 nt, synthetic construct
  source 1..5797: mol_type = other RNA
aggaaataagagagaaaagaagagtaagaagaaatataagagccaccatggcccctaagaagaagcgtaaagtgagccggatggaacgcctcgtctacgaggtgcggcagaagtgcagaaacatcgaggacatctgcatctcctgcggatctctgaacgtgaccctggagcacccactgttcatcggcggcatgtgccagaactgtaaaaactgttttctggagtgtgcctatcaatacgacgatgacggctaccagagctactgcaccatctgttgcggcggaagagaggtgctgatgtgtggaaataacaactgctgccggtgcttctgcgtggaatgcgtggacctgctggtgggccccggcgccgcccaggccgctattaaggaagatccttggaactgctacatgtgcggccacaagggcacatacggcctgctgagacggagagaggactggcctagcagactgcagatgttcttcgccaataaccacgaccaggagttcgacccccctaaggtgtaccctcccgtccccgccgagaagagaaagcccatccgggtcctgagcctgttcgatggcatcgccaccggtctgctggtgctgaaggacctgggcatccaggtggataggtacattgcctccgaggtgtgcgaggactccatcaccgtgggaatggtgcgtcatcagggcaagatcatgtacgtgggcgacgtgcggagcgtgacacagaagcatatccaggagtggggccctttcgacctggtgatcggcggcagcccttgcaatgacctgagcatcgtgaacccagcccggaagggcctgtacgagggaaccggcagactgttcttcgagttttacagactgctgcacgacgcccggcctaaggaaggcgacgaccggcccttcttttggctgttcgagaatgtggtggccatgggagtcagcgacaagcgggatattagccggttcctggagagcaaccccgtgatgatcgatgccaaggaagtgagcgccgcccaccgggccagatacttctggggcaatctgcctggcatgaacagacccctggccagcaccgtgaacgacaagctggagctgcaggagtgcctggagcacggccggatcgccaagttcagcaaggtgagaaccatcaccacccgaagcaacagcatcaaacaaggcaaggaccagcactttcctgtgttcatgaacgagaaggaggacatcctgtggtgtaccgagatggagagagtgttcgggttcccagtccactacacagatgtcagcaacatgtctagactggccagacagagactgctgggaagaagctggtccgtccctgtgatcagacacctgttcgcccctctgaaggagtacttcgcctgcgtgagcagcggcaacagcaacgccaacagccggggccccagcttctctagcggcctggtgccactgtccctgagagggagccacatgggccccatggagatctacaaaaccgtgagcgcctggaagcggcagcctgtgcgcgtgctgagcctgtttcggaatatcgataaagtcctgaaaagcctgggattcctggagagcggctctggctccggcggtggcaccctgaagtacgtggaggatgtgacaaacgtggtcagacgggatgtggagaagtggggccccttcgatctggtgtacggcagcacccaacccctgggcagctcttgtgaccggtgccctggctggtacatgtttcagttccaccggatcctgcagtacgccctgccgagacaggagtcccagcggccattcttttggattttcatggacaacttgctgctgaccgaggatgaccaggaaactaccactcggttcctgcagaccgaagccgtgaccctgcaggacgtgagaggccgggactaccagaacgccatgcgggtgtggtccaacatccctggactgaaaagcaagcacgcacctctgacccctaaagaagaggagtacctgcaggcccaggtgcggagcagaagcaagctggacgcccctaaggtggatctgctggtgaagaattgcctcctgcccctgagagagtacttcaagtatttcagccagaatagtctgcccctgggcggcccaagcagcggcgcccctcctcccagcggcggcagcccagccggctccccaacctctaccgaggagggcacctctgagtccgccacccccgagagcggccctggcacctccaccgagcccagcgagggcagcgcacccggcagccctgccggcagccccacctccacagaggagggaaccagcaccgagcccagcgaaggcagcgccccaggcaccagcaccgagcctagtgagggcggctctggcggcggcagcgcccaggagattaaacggatcaacaagatcagaagaagacttgtgaaagacagcaacaccaagaaggccggcaagacaggccccatgaaaaccctgctggttagagtgatgacacccgatctgagagagcggctggaaaacctgagaaagaagcctgaaaatatcccccagcccatcagcaatacatctagagccaacctgaataagctgctgaccgattacaccgaaatgaagaaggcgatcctgcatgtgtactgggaagagttccagaaggaccctgtgggcctgatgagccgggtggcccagcctgccagcaagaagatcgatcagaacaagctgaaacctgagatggacgagaagggcaacctgaccaccgccggctttgcctgctctcagtgtggccagcccctgttcgtgtacaagctggagcaggtgtctgagaagggcaaggcttacaccaactacttcggacggtgcaatgtggccgagcacgaaaagctgatcctgctggcccagctgaagcccgagaaggatagcgacgaagccgtgacatatagcctgggaaagtttgggcagagggccctggatttctacagcattcatgtgaccaaggagtccacccaccccgtgaagcccctggcccagatcgccggaaacagatacgcctccggacctgtgggaaaggccctgagcgacgcatgtatgggcacaatcgcctccttcctgtctaagtaccaggacatcatcatcgaacaccagaaggtggtgaagggcaaccagaagagactggagagcctgcgggagctggccggcaaggaaaacctggaataccctagcgtgaccctgccacctcagcctcacaccaaggagggcgttgatgcctacaacgaagtgatcgcccgggtgcgaatgtgggtgaacctgaacctgtggcagaagctgaagctaagcagagatgatgccaagcctctgctgagactgaagggattcccttcctttcctctggtcgagagacaggccaacgaagtggactggtgggacatggtgtgtaacgtgaagaagctgatcaacgagaaaaaggaggatggcaaggtgttttggcagaatctggctggctacaagagacaggaagccctgagaccatacctgagcagcgaggaagatcggaagaagggaaagaaattcgctcggtaccagctgggcgacctgctgctgcacctggaaaagaagcacggcgaggactggggaaaggtgtacgacgaggcctgggagcggattgacaagaaagtggaaggcctgagcaagcacatcaagctggaagaggaacggagaagcgaggacgcccagagcaaggccgccctgaccgactggctgcgggctaaggccagcttcgtgatcgagggcctgaaggaggccgacaaggacgagttctgcagatgcgagctgaagctgcagaagtggtacggggacctgcggggaaagcccttcgccatcgaagccgagaacagcatcctggacatcagcggcttcagcaagcagtacaactgtgccttcatctggcagaaggacggcgtgaagaagctgaacctgtacctgatcatcaactacttcaagggcggcaagctgcggttcaagaagatcaaacctgaagccttcgaagccaacagattctacaccgtgatcaacaaaaagagcggcgagatcgtgcccatggaggtgaacttcaacttcgacgaccccaacctgatcatcctgcctctggcctttggcaagagacagggcagagaattcatctggaacgacctgctgtccctggaaaccggcagcctgaagctggccaacggaagagtgatcgagaagacactgtacaacagaagaacccggcaggatgagcctgccctgttcgtggccctgaccttcgagcggcgggaggtcctggactcctccaatatcaaaccaatgaacctgatcggcgtggcaagaggcgaaaacatccccgccgtgatcgccctgaccgaccccgagggctgcccactgagccggtttaaggatagcctgggaaacccaacccacatcctgagaatcggcgagagctataaggagaagcagcggaccatccaggccaagaaggaggtggagcagcggagagccggcggctacagccggaagtacgccagcaaagccaagaatctggcagacgatatggtgagaaacaccgctagagatctgctgtactacgccgtgacccaggatgccatgctgatcttcgccaacctgagccggggcttcggccggcagggcaagcggaccttcatggccgagagacagtacacacggatggaggactggctgaccgccaagctggcctacgagggcctgagcaagacctacctgtccaagacactggcccagtacacctccaagacatgcagcaactgtgggtttaccatcaccagcgccgactacgacagggtgctggagaagctgaagaagacagcaacaggctggatgaccacaattaacggcaaggagctgaaggtggagggccagattacctactacaacagatacaagagacagaacgtagtcaaggacctgtccgtcgagctggatagactgagcgaagaatctgtgaacaacgacatctcctcctggacaaagggcagaagcggagaagctctgagcctcctgaagaaaagattctcccatagacccgtgcaggagaagttcgtgtgcctgaactgcggcttcgagacacacgcagccgagcaagccgccctgaacatcgccagatcctggctgttcctgcggagccaggagtacaagaaataccagacaaacaagacaaccggcaacaccgataagagagccttcgtcgagacctggcagtccttttaccggaagaagcttaaggaggtgtggaaacctgccgtgcggtctggcggatctggcggaggctccacaagcctgtggctgcccctgaccttcgaggacatcgccatctacttcagcgagcaggagtggcagaacctggaggcctggcagaaggacctgtacaggaacgtgatgagggccaactacgagatcctggtgagcctggacgacggcctgcccaagcccgagctgatcagccacatcgagcagggcaaggagctgttctggaacctgggcgagacccagaagagcggcaacatcatctgcagcagcgccaccagccccaagaaaaagagaaaagtctaagctgccttctgcggggcttgccttctggccatgcccttcttctctcccttgcacctgtacctcttggtctttgaataaagcctgagtaggaaggctagcaaaaaaaaaaaaaaaaaaaaaaaaaaaaaaaaaaaaaaaaaaaaaaaaaaaaaaaaaaaaaaaaaaaaaaaaaaaaaaaa

SEQ ID NO: 6774 - RNA, 5797 nt, synthetic construct
  source 1..5797: mol_type = other RNA
aggaaataagagagaaaagaagagtaagaagaaatataagagccaccatggcccctaagaagaagcgtaaagtgagccggatggaacgcctcgtctacgaggtgcggcagaagtgcagaaacatcgaggacatctgcatctcctgcggatctctgaacgtgaccctggagcacccactgttcatcggcggcatgtgccagaactgtaaaaactgttttctggagtgtgcctatcaatacgacgatgacggctaccagagctactgcaccatctgttgcggcggaagagaggtgctgatgtgtggaaataacaactgctgccggtgcttctgcgtggaatgcgtggacctgctggtgggccccggcgccgcccaggccgctattaaggaagatccttggaactgctacatgtgcggccacaagggcacatacggcctgctgagacggagagaggactggcctagcagactgcagatgttcttcgccaataaccacgaccaggagttcgacccccctaaggtgtaccctcccgtccccgccgagaagagaaagcccatccgggtcctgagcctgttcgatggcatcgccaccggtctgctggtgctgaaggacctgggcatccaggtggataggtacattgcctccgaggtgtgcgaggactccatcaccgtgggaatggtgcgtcatcagggcaagatcatgtacgtgggcgacgtgcggagcgtgacacagaagcatatccaggagtggggccctttcgacctggtgatcggcggcagcccttgcaatgacctgagcatcgtgaacccagcccggaagggcctgtacgagggaaccggcagactgttcttcgagttttacagactgctgcacgacgcccggcctaaggaaggcgacgaccggcccttcttttggctgttcgagaatgtggtggccatgggagtcagcgacaagcgggatattagccggttcctggagagcaaccccgtgatgatcgatgccaaggaagtgagcgccgcccaccgggccagatacttctggggcaatctgcctggcatgaacagacccctggccagcaccgtgaacgacaagctggagctgcaggagtgcctggagcacggccggatcgccaagttcagcaaggtgagaaccatcaccacccgaagcaacagcatcaaacaaggcaaggaccagcactttcctgtgttcatgaacgagaaggaggacatcctgtggtgtaccgagatggagagagtgttcgggttcccagtccactacacagatgtcagcaacatgtctagactggccagacagagactgctgggaagaagctggtccgtccctgtgatcagacacctgttcgcccctctgaaggagtacttcgcctgcgtgagcagcggcaacagcaacgccaacagccggggccccagcttctctagcggcctggtgccactgtccctgagagggagccacatgggccccatggagatctacaaaaccgtgagcgcctggaagcggcagcctgtgcgcgtgctgagcctgtttcggaatatcgataaagtcctgaaaagcctgggattcctggagagcggctctggctccggcggtggcaccctgaagtacgtggaggatgtgacaaacgtggtcagacgggatgtggagaagtggggccccttcgatctggtgtacggcagcacccaacccctgggcagctcttgtgaccggtgccctggctggtacatgtttcagttccaccggatcctgcagtacgccctgccgagacaggagtcccagcggccattcttttggattttcatggacaacttgctgctgaccgaggatgaccaggaaactaccactcggttcctgcagaccgaagccgtgaccctgcaggacgtgagaggccgggactaccagaacgccatgcgggtgtggtccaacatccctggactgaaaagcaagcacgcacctctgacccctaaagaagaggagtacctgcaggcccaggtgcggagcagaagcaagctggacgcccctaaggtggatctgctggtgaagaattgcctcctgcccctgagagagtacttcaagtatttcagccagaatagtctgcccctgggcggcccaagcagcggcgcccctcctcccagcggcggcagcccagccggctccccaacctctaccgaggagggcacctctgagtccgccacccccgagagcggccctggcacctccaccgagcccagcgagggcagcgcacccggcagccctgccggcagccccacctccacagaggagggaaccagcaccgagcccagcgaaggcagcgccccaggcaccagcaccgagcctagtgagggcggctctggcggcggcagcgcccaggagattaaacggatcaacaagatcagaagaagacttgtgaaagacagcaacaccaagaaggccggcaagacaggccccatgaaaaccctgctggttagagtgatgacacccgatctgagagagcggctggaaaacctgagaaagaagcctgaaaatatcccccagcccatcagcaatacatctagagccaacctgaataagctgctgaccgattacaccgaaatgaagaaggcgatcctgcatgtgtactgggaagagttccagaaggaccctgtgggcctgatgagccgggtggcccagcctgccagcaagaagatcgatcagaacaagctgaaacctgagatggacgagaagggcaacctgaccaccgccggctttgcctgctctcagtgtggccagcccctgttcgtgtacaagctggagcaggtgtctgagaagggcaaggcttacaccaactacttcggacggtgcaatgtggccgagcacgaaaagctgatcctgctggcccagctgaagcccgagaaggatagcgacgaagccgtgacatatagcctgggaaagtttgggcagagggccctggatttctacagcattcatgtgaccaaggagtccacccaccccgtgaagcccctggcccagatcgccggaaacagatacgcctccggacctgtgggaaaggccctgagcgacgcatgtatgggcacaatcgcctccttcctgtctaagtaccaggacatcatcatcgaacaccagaaggtggtgaagggcaaccagaagagactggagagcctgcgggagctggccggcaaggaaaacctggaataccctagcgtgaccctgccacctcagcctcacaccaaggagggcgttgatgcctacaacgaagtgatcgcccgggtgcgaatgtgggtgaacctgaacctgtggcagaagctgaagctaagcagagatgatgccaagcctctgctgagactgaagggattcccttcctttcctctggtcgagagacaggccaacgaagtggactggtgggacatggtgtgtaacgtgaagaagctgatcaacgagaaaaaggaggatggcaaggtgttttggcagaatctggctggctacaagagacaggaagccctgagaccatacctgagcagcgaggaagatcggaagaagggaaagaaattcgctcggtaccagctgggcgacctgctgctgcacctggaaaagaagcacggcgaggactggggaaaggtgtacgacgaggcctgggagcggattgacaagaaagtggaaggcctgagcaagcacatcaagctggaagaggaacggagaagcgaggacgcccagagcaaggccgccctgaccgactggctgcgggctaaggccagcttcgtgatcgagggcctgaaggaggccgacaaggacgagttctgcagatgcgagctgaagctgcagaagtggtacggggacctgcggggaaagcccttcgccatcgaagccgagaacagcatcctggacatcagcggcttcagcaagcagtacaactgtgccttcatctggcagaaggacggcgtgaagaagctgaacctgtacctgatcatcaactacttcaagggcggcaagctgcggttcaagaagatcaaacctgaagccttcgaagccaacagattctacaccgtgatcaacaaaaagagcggcgagatcgtgcccatggaggtgaacttcaacttcgacgaccccaacctgatcatcctgcctctggcctttggcaagagacagggcagagaattcatctggaacgacctgctgtccctggaaaccggcagcctgaagctggccaacggaagagtgatcgagaagacactgtacaacagaagaacccggcaggatgagcctgccctgttcgtggccctgaccttcgagcggcgggaggtcctggactcctccaatatcaaaccaatgaacctgatcggcgtggcaagaggcgaaaacatccccgccgtgatcgccctgaccgaccccgagggctgcccactgagccggtttaaggatagcctgggaaacccaacccacatcctgagaatcggcgagagctataaggagaagcagcggaccatccaggccaagaaggaggtggagcagcggagagccggcggctacagccggaagtacgccagcaaagccaagaatctggcagacgatatggtgagaaacaccgctagagatctgctgtactacgccgtgacccaggatgccatgctgatcttcgccaacctgagccggggcttcggccggcagggcaagcggaccttcatggccgagagacagtacacacggatggaggactggctgaccgccaagctggcctacgagggcctgagcaagacctacctgtccaagacactggcccagtacacctccaagacatgcagcaactgtgggtttaccatcaccagcgccgactacgacagggtgctggagaagctgaagaagacagcaacaggctggatgaccacaattaacggcaaggagctgaaggtggagggccagattacctactacaacagatacaagagacagaacgtagtcaaggacctgtccgtcgagctggatagactgagcgaagaatctgtgaacaacgacatctcctcctggacaaagggcagaagcggagaagctctgagcctcctgaagaaaagattctcccatagacccgtgcaggagaagttcgtgtgcctgaactgcggcttcgagacacacgcagccgagcaagccgccctgaacatcgccagatcctggctgttcctgcggagccaggagtacaagaaataccagacaaacaagacaaccggcaacaccgataagagagccttcgtcgagacctggcagtccttttaccggaagaagcttaaggaggtgtggaaacctgccgtgcggtctggcggatctggcggaggctccacaagcatgaacgtggaggtggtgaaggtgatgccccaggacctggtgaccttcaaggacgtggccatcgacttcagccaggaggagtggcagtggatgaaccccgcccagaagtgcctgtacaggagcatgatgctggagaactaccagagcctggtgagcctgggcctgtgcatcagcaagccctacgtgatcagcctgctggagcagggcagggagccctgggagatgaccagcgagatgaccaggaccagccccaagaaaaagagaaaagtctaagctgccttctgcggggcttgccttctggccatgcccttcttctctcccttgcacctgtacctcttggtctttgaataaagcctgagtaggaaggctagcaaaaaaaaaaaaaaaaaaaaaaaaaaaaaaaaaaaaaaaaaaaaaaaaaaaaaaaaaaaaaaaaaaaaaaaaaaaaaaaa

SEQ ID NO: 6775 - RNA, 5797 nt, synthetic construct
  source 1..5797: mol_type = other RNA
aggaaataagagagaaaagaagagtaagaagaaatataagagccaccatggcccctaagaagaagcgtaaagtgagccggatggaacgcctcgtctacgaggtgcggcagaagtgcagaaacatcgaggacatctgcatctcctgcggatctctgaacgtgaccctggagcacccactgttcatcggcggcatgtgccagaactgtaaaaactgttttctggagtgtgcctatcaatacgacgatgacggctaccagagctactgcaccatctgttgcggcggaagagaggtgctgatgtgtggaaataacaactgctgccggtgcttctgcgtggaatgcgtggacctgctggtgggccccggcgccgcccaggccgctattaaggaagatccttggaactgctacatgtgcggccacaagggcacatacggcctgctgagacggagagaggactggcctagcagactgcagatgttcttcgccaataaccacgaccaggagttcgacccccctaaggtgtaccctcccgtccccgccgagaagagaaagcccatccgggtcctgagcctgttcgatggcatcgccaccggtctgctggtgctgaaggacctgggcatccaggtggataggtacattgcctccgaggtgtgcgaggactccatcaccgtgggaatggtgcgtcatcagggcaagatcatgtacgtgggcgacgtgcggagcgtgacacagaagcatatccaggagtggggccctttcgacctggtgatcggcggcagcccttgcaatgacctgagcatcgtgaacccagcccggaagggcctgtacgagggaaccggcagactgttcttcgagttttacagactgctgcacgacgcccggcctaaggaaggcgacgaccggcccttcttttggctgttcgagaatgtggtggccatgggagtcagcgacaagcgggatattagccggttcctggagagcaaccccgtgatgatcgatgccaaggaagtgagcgccgcccaccgggccagatacttctggggcaatctgcctggcatgaacagacccctggccagcaccgtgaacgacaagctggagctgcaggagtgcctggagcacggccggatcgccaagttcagcaaggtgagaaccatcaccacccgaagcaacagcatcaaacaaggcaaggaccagcactttcctgtgttcatgaacgagaaggaggacatcctgtggtgtaccgagatggagagagtgttcgggttcccagtccactacacagatgtcagcaacatgtctagactggccagacagagactgctgggaagaagctggtccgtccctgtgatcagacacctgttcgcccctctgaaggagtacttcgcctgcgtgagcagcggcaacagcaacgccaacagccggggccccagcttctctagcggcctggtgccactgtccctgagagggagccacatgggccccatggagatctacaaaaccgtgagcgcctggaagcggcagcctgtgcgcgtgctgagcctgtttcggaatatcgataaagtcctgaaaagcctgggattcctggagagcggctctggctccggcggtggcaccctgaagtacgtggaggatgtgacaaacgtggtcagacgggatgtggagaagtggggccccttcgatctggtgtacggcagcacccaacccctgggcagctcttgtgaccggtgccctggctggtacatgtttcagttccaccggatcctgcagtacgccctgccgagacaggagtcccagcggccattcttttggattttcatggacaacttgctgctgaccgaggatgaccaggaaactaccactcggttcctgcagaccgaagccgtgaccctgcaggacgtgagaggccgggactaccagaacgccatgcgggtgtggtccaacatccctggactgaaaagcaagcacgcacctctgacccctaaagaagaggagtacctgcaggcccaggtgcggagcagaagcaagctggacgcccctaaggtggatctgctggtgaagaattgcctcctgcccctgagagagtacttcaagtatttcagccagaatagtctgcccctgggcggcccaagcagcggcgcccctcctcccagcggcggcagcccagccggctccccaacctctaccgaggagggcacctctgagtccgccacccccgagagcggccctggcacctccaccgagcccagcgagggcagcgcacccggcagccctgccggcagccccacctccacagaggagggaaccagcaccgagcccagcgaaggcagcgccccaggcaccagcaccgagcctagtgagggcggctctggcggcggcagcgcccaggagattaaacggatcaacaagatcagaagaagacttgtgaaagacagcaacaccaagaaggccggcaagacaggccccatgaaaaccctgctggttagagtgatgacacccgatctgagagagcggctggaaaacctgagaaagaagcctgaaaatatcccccagcccatcagcaatacatctagagccaacctgaataagctgctgaccgattacaccgaaatgaagaaggcgatcctgcatgtgtactgggaagagttccagaaggaccctgtgggcctgatgagccgggtggcccagcctgccagcaagaagatcgatcagaacaagctgaaacctgagatggacgagaagggcaacctgaccaccgccggctttgcctgctctcagtgtggccagcccctgttcgtgtacaagctggagcaggtgtctgagaagggcaaggcttacaccaactacttcggacggtgcaatgtggccgagcacgaaaagctgatcctgctggcccagctgaagcccgagaaggatagcgacgaagccgtgacatatagcctgggaaagtttgggcagagggccctggatttctacagcattcatgtgaccaaggagtccacccaccccgtgaagcccctggcccagatcgccggaaacagatacgcctccggacctgtgggaaaggccctgagcgacgcatgtatgggcacaatcgcctccttcctgtctaagtaccaggacatcatcatcgaacaccagaaggtggtgaagggcaaccagaagagactggagagcctgcgggagctggccggcaaggaaaacctggaataccctagcgtgaccctgccacctcagcctcacaccaaggagggcgttgatgcctacaacgaagtgatcgcccgggtgcgaatgtgggtgaacctgaacctgtggcagaagctgaagctaagcagagatgatgccaagcctctgctgagactgaagggattcccttcctttcctctggtcgagagacaggccaacgaagtggactggtgggacatggtgtgtaacgtgaagaagctgatcaacgagaaaaaggaggatggcaaggtgttttggcagaatctggctggctacaagagacaggaagccctgagaccatacctgagcagcgaggaagatcggaagaagggaaagaaattcgctcggtaccagctgggcgacctgctgctgcacctggaaaagaagcacggcgaggactggggaaaggtgtacgacgaggcctgggagcggattgacaagaaagtggaaggcctgagcaagcacatcaagctggaagaggaacggagaagcgaggacgcccagagcaaggccgccctgaccgactggctgcgggctaaggccagcttcgtgatcgagggcctgaaggaggccgacaaggacgagttctgcagatgcgagctgaagctgcagaagtggtacggggacctgcggggaaagcccttcgccatcgaagccgagaacagcatcctggacatcagcggcttcagcaagcagtacaactgtgccttcatctggcagaaggacggcgtgaagaagctgaacctgtacctgatcatcaactacttcaagggcggcaagctgcggttcaagaagatcaaacctgaagccttcgaagccaacagattctacaccgtgatcaacaaaaagagcggcgagatcgtgcccatggaggtgaacttcaacttcgacgaccccaacctgatcatcctgcctctggcctttggcaagagacagggcagagaattcatctggaacgacctgctgtccctggaaaccggcagcctgaagctggccaacggaagagtgatcgagaagacactgtacaacagaagaacccggcaggatgagcctgccctgttcgtggccctgaccttcgagcggcgggaggtcctggactcctccaatatcaaaccaatgaacctgatcggcgtggcaagaggcgaaaacatccccgccgtgatcgccctgaccgaccccgagggctgcccactgagccggtttaaggatagcctgggaaacccaacccacatcctgagaatcggcgagagctataaggagaagcagcggaccatccaggccaagaaggaggtggagcagcggagagccggcggctacagccggaagtacgccagcaaagccaagaatctggcagacgatatggtgagaaacaccgctagagatctgctgtactacgccgtgacccaggatgccatgctgatcttcgccaacctgagccggggcttcggccggcagggcaagcggaccttcatggccgagagacagtacacacggatggaggactggctgaccgccaagctggcctacgagggcctgagcaagacctacctgtccaagacactggcccagtacacctccaagacatgcagcaactgtgggtttaccatcaccagcgccgactacgacagggtgctggagaagctgaagaagacagcaacaggctggatgaccacaattaacggcaaggagctgaaggtggagggccagattacctactacaacagatacaagagacagaacgtagtcaaggacctgtccgtcgagctggatagactgagcgaagaatctgtgaacaacgacatctcctcctggacaaagggcagaagcggagaagctctgagcctcctgaagaaaagattctcccatagacccgtgcaggagaagttcgtgtgcctgaactgcggcttcgagacacacgcagccgagcaagccgccctgaacatcgccagatcctggctgttcctgcggagccaggagtacaagaaataccagacaaacaagacaaccggcaacaccgataagagagccttcgtcgagacctggcagtccttttaccggaagaagcttaaggaggtgtggaaacctgccgtgcggtctggcggatctggcggaggctccacaagcgaggagctgcccgccgtgttcgaggacgtggccgtgtacttcaccagggaggagtggggcatgctggacaagaggcagaaggagctgtacagggacgtgatgaggctgaactacgagctgctggccagcctgggccccgccgccgccaagcccgacctgatcagcaagctggagaggagggccgccccctggatcaaggaccccaacggccccaagtggggcaagggcggcccccccggcaagaccagccccaagaaaaagagaaaagtctaagctgccttctgcggggcttgccttctggccatgcccttcttctctcccttgcacctgtacctcttggtctttgaataaagcctgagtaggaaggctagcaaaaaaaaaaaaaaaaaaaaaaaaaaaaaaaaaaaaaaaaaaaaaaaaaaaaaaaaaaaaaaaaaaaaaaaaaaaaaaaa

SEQ ID NO: 6776 - RNA, 5797 nt, synthetic construct
  source 1..5797: mol_type = other RNA
aggaaataagagagaaaagaagagtaagaagaaatataagagccaccatggcccctaagaagaagcgtaaagtgagccggatggaacgcctcgtctacgaggtgcggcagaagtgcagaaacatcgaggacatctgcatctcctgcggatctctgaacgtgaccctggagcacccactgttcatcggcggcatgtgccagaactgtaaaaactgttttctggagtgtgcctatcaatacgacgatgacggctaccagagctactgcaccatctgttgcggcggaagagaggtgctgatgtgtggaaataacaactgctgccggtgcttctgcgtggaatgcgtggacctgctggtgggccccggcgccgcccaggccgctattaaggaagatccttggaactgctacatgtgcggccacaagggcacatacggcctgctgagacggagagaggactggcctagcagactgcagatgttcttcgccaataaccacgaccaggagttcgacccccctaaggtgtaccctcccgtccccgccgagaagagaaagcccatccgggtcctgagcctgttcgatggcatcgccaccggtctgctggtgctgaaggacctgggcatccaggtggataggtacattgcctccgaggtgtgcgaggactccatcaccgtgggaatggtgcgtcatcagggcaagatcatgtacgtgggcgacgtgcggagcgtgacacagaagcatatccaggagtggggccctttcgacctggtgatcggcggcagcccttgcaatgacctgagcatcgtgaacccagcccggaagggcctgtacgagggaaccggcagactgttcttcgagttttacagactgctgcacgacgcccggcctaaggaaggcgacgaccggcccttcttttggctgttcgagaatgtggtggccatgggagtcagcgacaagcgggatattagccggttcctggagagcaaccccgtgatgatcgatgccaaggaagtgagcgccgcccaccgggccagatacttctggggcaatctgcctggcatgaacagacccctggccagcaccgtgaacgacaagctggagctgcaggagtgcctggagcacggccggatcgccaagttcagcaaggtgagaaccatcaccacccgaagcaacagcatcaaacaaggcaaggaccagcactttcctgtgttcatgaacgagaaggaggacatcctgtggtgtaccgagatggagagagtgttcgggttcccagtccactacacagatgtcagcaacatgtctagactggccagacagagactgctgggaagaagctggtccgtccctgtgatcagacacctgttcgcccctctgaaggagtacttcgcctgcgtgagcagcggcaacagcaacgccaacagccggggccccagcttctctagcggcctggtgccactgtccctgagagggagccacatgggccccatggagatctacaaaaccgtgagcgcctggaagcggcagcctgtgcgcgtgctgagcctgtttcggaatatcgataaagtcctgaaaagcctgggattcctggagagcggctctggctccggcggtggcaccctgaagtacgtggaggatgtgacaaacgtggtcagacgggatgtggagaagtggggccccttcgatctggtgtacggcagcacccaacccctgggcagctcttgtgaccggtgccctggctggtacatgtttcagttccaccggatcctgcagtacgccctgccgagacaggagtcccagcggccattcttttggattttcatggacaacttgctgctgaccgaggatgaccaggaaactaccactcggttcctgcagaccgaagccgtgaccctgcaggacgtgagaggccgggactaccagaacgccatgcgggtgtggtccaacatccctggactgaaaagcaagcacgcacctctgacccctaaagaagaggagtacctgcaggcccaggtgcggagcagaagcaagctggacgcccctaaggtggatctgctggtgaagaattgcctcctgcccctgagagagtacttcaagtatttcagccagaatagtctgcccctgggcggcccaagcagcggcgcccctcctcccagcggcggcagcccagccggctccccaacctctaccgaggagggcacctctgagtccgccacccccgagagcggccctggcacctccaccgagcccagcgagggcagcgcacccggcagccctgccggcagccccacctccacagaggagggaaccagcaccgagcccagcgaaggcagcgccccaggcaccagcaccgagcctagtgagggcggctctggcggcggcagcgcccaggagattaaacggatcaacaagatcagaagaagacttgtgaaagacagcaacaccaagaaggccggcaagacaggccccatgaaaaccctgctggttagagtgatgacacccgatctgagagagcggctggaaaacctgagaaagaagcctgaaaatatcccccagcccatcagcaatacatctagagccaacctgaataagctgctgaccgattacaccgaaatgaagaaggcgatcctgcatgtgtactgggaagagttccagaaggaccctgtgggcctgatgagccgggtggcccagcctgccagcaagaagatcgatcagaacaagctgaaacctgagatggacgagaagggcaacctgaccaccgccggctttgcctgctctcagtgtggccagcccctgttcgtgtacaagctggagcaggtgtctgagaagggcaaggcttacaccaactacttcggacggtgcaatgtggccgagcacgaaaagctgatcctgctggcccagctgaagcccgagaaggatagcgacgaagccgtgacatatagcctgggaaagtttgggcagagggccctggatttctacagcattcatgtgaccaaggagtccacccaccccgtgaagcccctggcccagatcgccggaaacagatacgcctccggacctgtgggaaaggccctgagcgacgcatgtatgggcacaatcgcctccttcctgtctaagtaccaggacatcatcatcgaacaccagaaggtggtgaagggcaaccagaagagactggagagcctgcgggagctggccggcaaggaaaacctggaataccctagcgtgaccctgccacctcagcctcacaccaaggagggcgttgatgcctacaacgaagtgatcgcccgggtgcgaatgtgggtgaacctgaacctgtggcagaagctgaagctaagcagagatgatgccaagcctctgctgagactgaagggattcccttcctttcctctggtcgagagacaggccaacgaagtggactggtgggacatggtgtgtaacgtgaagaagctgatcaacgagaaaaaggaggatggcaaggtgttttggcagaatctggctggctacaagagacaggaagccctgagaccatacctgagcagcgaggaagatcggaagaagggaaagaaattcgctcggtaccagctgggcgacctgctgctgcacctggaaaagaagcacggcgaggactggggaaaggtgtacgacgaggcctgggagcggattgacaagaaagtggaaggcctgagcaagcacatcaagctggaagaggaacggagaagcgaggacgcccagagcaaggccgccctgaccgactggctgcgggctaaggccagcttcgtgatcgagggcctgaaggaggccgacaaggacgagttctgcagatgcgagctgaagctgcagaagtggtacggggacctgcggggaaagcccttcgccatcgaagccgagaacagcatcctggacatcagcggcttcagcaagcagtacaactgtgccttcatctggcagaaggacggcgtgaagaagctgaacctgtacctgatcatcaactacttcaagggcggcaagctgcggttcaagaagatcaaacctgaagccttcgaagccaacagattctacaccgtgatcaacaaaaagagcggcgagatcgtgcccatggaggtgaacttcaacttcgacgaccccaacctgatcatcctgcctctggcctttggcaagagacagggcagagaattcatctggaacgacctgctgtccctggaaaccggcagcctgaagctggccaacggaagagtgatcgagaagacactgtacaacagaagaacccggcaggatgagcctgccctgttcgtggccctgaccttcgagcggcgggaggtcctggactcctccaatatcaaaccaatgaacctgatcggcgtggcaagaggcgaaaacatccccgccgtgatcgccctgaccgaccccgagggctgcccactgagccggtttaaggatagcctgggaaacccaacccacatcctgagaatcggcgagagctataaggagaagcagcggaccatccaggccaagaaggaggtggagcagcggagagccggcggctacagccggaagtacgccagcaaagccaagaatctggcagacgatatggtgagaaacaccgctagagatctgctgtactacgccgtgacccaggatgccatgctgatcttcgccaacctgagccggggcttcggccggcagggcaagcggaccttcatggccgagagacagtacacacggatggaggactggctgaccgccaagctggcctacgagggcctgagcaagacctacctgtccaagacactggcccagtacacctccaagacatgcagcaactgtgggtttaccatcaccagcgccgactacgacagggtgctggagaagctgaagaagacagcaacaggctggatgaccacaattaacggcaaggagctgaaggtggagggccagattacctactacaacagatacaagagacagaacgtagtcaaggacctgtccgtcgagctggatagactgagcgaagaatctgtgaacaacgacatctcctcctggacaaagggcagaagcggagaagctctgagcctcctgaagaaaagattctcccatagacccgtgcaggagaagttcgtgtgcctgaactgcggcttcgagacacacgcagccgagcaagccgccctgaacatcgccagatcctggctgttcctgcggagccaggagtacaagaaataccagacaaacaagacaaccggcaacaccgataagagagccttcgtcgagacctggcagtccttttaccggaagaagcttaaggaggtgtggaaacctgccgtgcggtctggcggatctggcggaggctccacaagcatggcccacatggccttcagggacgtggccgtggacttcacccaggacgagtggaggctgctgagccccgcccagaggaccctgtacagggaggtgatgctggagaactacagcaacctggtgagcctgggcatcagcttcagcaagcccgagatcatcacccagctggagcagggcaaggagacctggagggaggagaagaagtgcccccccgccacctgccccgccgaccccgagcccgagaccagccccaagaaaaagagaaaagtctaagctgccttctgcggggcttgccttctggccatgcccttcttctctcccttgcacctgtacctcttggtctttgaataaagcctgagtaggaaggctagcaaaaaaaaaaaaaaaaaaaaaaaaaaaaaaaaaaaaaaaaaaaaaaaaaaaaaaaaaaaaaaaaaaaaaaaaaaaaaaaa

SEQ ID NO: 6777 - RNA, 5797 nt, synthetic construct
  source 1..5797: mol_type = other RNA
aggaaataagagagaaaagaagagtaagaagaaatataagagccaccatggcccctaagaagaagcgtaaagtgagccggatggaacgcctcgtctacgaggtgcggcagaagtgcagaaacatcgaggacatctgcatctcctgcggatctctgaacgtgaccctggagcacccactgttcatcggcggcatgtgccagaactgtaaaaactgttttctggagtgtgcctatcaatacgacgatgacggctaccagagctactgcaccatctgttgcggcggaagagaggtgctgatgtgtggaaataacaactgctgccggtgcttctgcgtggaatgcgtggacctgctggtgggccccggcgccgcccaggccgctattaaggaagatccttggaactgctacatgtgcggccacaagggcacatacggcctgctgagacggagagaggactggcctagcagactgcagatgttcttcgccaataaccacgaccaggagttcgacccccctaaggtgtaccctcccgtccccgccgagaagagaaagcccatccgggtcctgagcctgttcgatggcatcgccaccggtctgctggtgctgaaggacctgggcatccaggtggataggtacattgcctccgaggtgtgcgaggactccatcaccgtgggaatggtgcgtcatcagggcaagatcatgtacgtgggcgacgtgcggagcgtgacacagaagcatatccaggagtggggccctttcgacctggtgatcggcggcagcccttgcaatgacctgagcatcgtgaacccagcccggaagggcctgtacgagggaaccggcagactgttcttcgagttttacagactgctgcacgacgcccggcctaaggaaggcgacgaccggcccttcttttggctgttcgagaatgtggtggccatgggagtcagcgacaagcgggatattagccggttcctggagagcaaccccgtgatgatcgatgccaaggaagtgagcgccgcccaccgggccagatacttctggggcaatctgcctggcatgaacagacccctggccagcaccgtgaacgacaagctggagctgcaggagtgcctggagcacggccggatcgccaagttcagcaaggtgagaaccatcaccacccgaagcaacagcatcaaacaaggcaaggaccagcactttcctgtgttcatgaacgagaaggaggacatcctgtggtgtaccgagatggagagagtgttcgggttcccagtccactacacagatgtcagcaacatgtctagactggccagacagagactgctgggaagaagctggtccgtccctgtgatcagacacctgttcgcccctctgaaggagtacttcgcctgcgtgagcagcggcaacagcaacgccaacagccggggccccagcttctctagcggcctggtgccactgtccctgagagggagccacatgggccccatggagatctacaaaaccgtgagcgcctggaagcggcagcctgtgcgcgtgctgagcctgtttcggaatatcgataaagtcctgaaaagcctgggattcctggagagcggctctggctccggcggtggcaccctgaagtacgtggaggatgtgacaaacgtggtcagacgggatgtggagaagtggggccccttcgatctggtgtacggcagcacccaacccctgggcagctcttgtgaccggtgccctggctggtacatgtttcagttccaccggatcctgcagtacgccctgccgagacaggagtcccagcggccattcttttggattttcatggacaacttgctgctgaccgaggatgaccaggaaactaccactcggttcctgcagaccgaagccgtgaccctgcaggacgtgagaggccgggactaccagaacgccatgcgggtgtggtccaacatccctggactgaaaagcaagcacgcacctctgacccctaaagaagaggagtacctgcaggcccaggtgcggagcagaagcaagctggacgcccctaaggtggatctgctggtgaagaattgcctcctgcccctgagagagtacttcaagtatttcagccagaatagtctgcccctgggcggcccaagcagcggcgcccctcctcccagcggcggcagcccagccggctccccaacctctaccgaggagggcacctctgagtccgccacccccgagagcggccctggcacctccaccgagcccagcgagggcagcgcacccggcagccctgccggcagccccacctccacagaggagggaaccagcaccgagcccagcgaaggcagcgccccaggcaccagcaccgagcctagtgagggcggctctggcggcggcagcgcccaggagattaaacggatcaacaagatcagaagaagacttgtgaaagacagcaacaccaagaaggccggcaagacaggccccatgaaaaccctgctggttagagtgatgacacccgatctgagagagcggctggaaaacctgagaaagaagcctgaaaatatcccccagcccatcagcaatacatctagagccaacctgaataagctgctgaccgattacaccgaaatgaagaaggcgatcctgcatgtgtactgggaagagttccagaaggaccctgtgggcctgatgagccgggtggcccagcctgccagcaagaagatcgatcagaacaagctgaaacctgagatggacgagaagggcaacctgaccaccgccggctttgcctgctctcagtgtggccagcccctgttcgtgtacaagctggagcaggtgtctgagaagggcaaggcttacaccaactacttcggacggtgcaatgtggccgagcacgaaaagctgatcctgctggcccagctgaagcccgagaaggatagcgacgaagccgtgacatatagcctgggaaagtttgggcagagggccctggatttctacagcattcatgtgaccaaggagtccacccaccccgtgaagcccctggcccagatcgccggaaacagatacgcctccggacctgtgggaaaggccctgagcgacgcatgtatgggcacaatcgcctccttcctgtctaagtaccaggacatcatcatcgaacaccagaaggtggtgaagggcaaccagaagagactggagagcctgcgggagctggccggcaaggaaaacctggaataccctagcgtgaccctgccacctcagcctcacaccaaggagggcgttgatgcctacaacgaagtgatcgcccgggtgcgaatgtgggtgaacctgaacctgtggcagaagctgaagctaagcagagatgatgccaagcctctgctgagactgaagggattcccttcctttcctctggtcgagagacaggccaacgaagtggactggtgggacatggtgtgtaacgtgaagaagctgatcaacgagaaaaaggaggatggcaaggtgttttggcagaatctggctggctacaagagacaggaagccctgagaccatacctgagcagcgaggaagatcggaagaagggaaagaaattcgctcggtaccagctgggcgacctgctgctgcacctggaaaagaagcacggcgaggactggggaaaggtgtacgacgaggcctgggagcggattgacaagaaagtggaaggcctgagcaagcacatcaagctggaagaggaacggagaagcgaggacgcccagagcaaggccgccctgaccgactggctgcgggctaaggccagcttcgtgatcgagggcctgaaggaggccgacaaggacgagttctgcagatgcgagctgaagctgcagaagtggtacggggacctgcggggaaagcccttcgccatcgaagccgagaacagcatcctggacatcagcggcttcagcaagcagtacaactgtgccttcatctggcagaaggacggcgtgaagaagctgaacctgtacctgatcatcaactacttcaagggcggcaagctgcggttcaagaagatcaaacctgaagccttcgaagccaacagattctacaccgtgatcaacaaaaagagcggcgagatcgtgcccatggaggtgaacttcaacttcgacgaccccaacctgatcatcctgcctctggcctttggcaagagacagggcagagaattcatctggaacgacctgctgtccctggaaaccggcagcctgaagctggccaacggaagagtgatcgagaagacactgtacaacagaagaacccggcaggatgagcctgccctgttcgtggccctgaccttcgagcggcgggaggtcctggactcctccaatatcaaaccaatgaacctgatcggcgtggcaagaggcgaaaacatccccgccgtgatcgccctgaccgaccccgagggctgcccactgagccggtttaaggatagcctgggaaacccaacccacatcctgagaatcggcgagagctataaggagaagcagcggaccatccaggccaagaaggaggtggagcagcggagagccggcggctacagccggaagtacgccagcaaagccaagaatctggcagacgatatggtgagaaacaccgctagagatctgctgtactacgccgtgacccaggatgccatgctgatcttcgccaacctgagccggggcttcggccggcagggcaagcggaccttcatggccgagagacagtacacacggatggaggactggctgaccgccaagctggcctacgagggcctgagcaagacctacctgtccaagacactggcccagtacacctccaagacatgcagcaactgtgggtttaccatcaccagcgccgactacgacagggtgctggagaagctgaagaagacagcaacaggctggatgaccacaattaacggcaaggagctgaaggtggagggccagattacctactacaacagatacaagagacagaacgtagtcaaggacctgtccgtcgagctggatagactgagcgaagaatctgtgaacaacgacatctcctcctggacaaagggcagaagcggagaagctctgagcctcctgaagaaaagattctcccatagacccgtgcaggagaagttcgtgtgcctgaactgcggcttcgagacacacgcagccgagcaagccgccctgaacatcgccagatcctggctgttcctgcggagccaggagtacaagaaataccagacaaacaagacaaccggcaacaccgataagagagccttcgtcgagacctggcagtccttttaccggaagaagcttaaggaggtgtggaaacctgccgtgcggtctggcggatctggcggaggctccacaagcagcctgggcatggtgagcttcgaggacgtggccgtgaccttcagcagggaggagtggcagcagctggacgaggcccagaggaccctgtacagggaggtgatgctggaggcctacagcaacctgaagaccgtgggctgctgctggagcaagcccgaggtgatcatcaggctggagcagggcgtggagccctggaccgtggagggcgtgaccaaccagaggttcagcgacgtgctgaccgtggacaccagccccaagaaaaagagaaaagtctaagctgccttctgcggggcttgccttctggccatgcccttcttctctcccttgcacctgtacctcttggtctttgaataaagcctgagtaggaaggctagcaaaaaaaaaaaaaaaaaaaaaaaaaaaaaaaaaaaaaaaaaaaaaaaaaaaaaaaaaaaaaaaaaaaaaaaaaaaaaaaa

SEQ ID NO: 6778 - RNA, 5797 nt, synthetic construct
  source 1..5797: mol_type = other RNA
aggaaataagagagaaaagaagagtaagaagaaatataagagccaccatggcccctaagaagaagcgtaaagtgagccggatggaacgcctcgtctacgaggtgcggcagaagtgcagaaacatcgaggacatctgcatctcctgcggatctctgaacgtgaccctggagcacccactgttcatcggcggcatgtgccagaactgtaaaaactgttttctggagtgtgcctatcaatacgacgatgacggctaccagagctactgcaccatctgttgcggcggaagagaggtgctgatgtgtggaaataacaactgctgccggtgcttctgcgtggaatgcgtggacctgctggtgggccccggcgccgcccaggccgctattaaggaagatccttggaactgctacatgtgcggccacaagggcacatacggcctgctgagacggagagaggactggcctagcagactgcagatgttcttcgccaataaccacgaccaggagttcgacccccctaaggtgtaccctcccgtccccgccgagaagagaaagcccatccgggtcctgagcctgttcgatggcatcgccaccggtctgctggtgctgaaggacctgggcatccaggtggataggtacattgcctccgaggtgtgcgaggactccatcaccgtgggaatggtgcgtcatcagggcaagatcatgtacgtgggcgacgtgcggagcgtgacacagaagcatatccaggagtggggccctttcgacctggtgatcggcggcagcccttgcaatgacctgagcatcgtgaacccagcccggaagggcctgtacgagggaaccggcagactgttcttcgagttttacagactgctgcacgacgcccggcctaaggaaggcgacgaccggcccttcttttggctgttcgagaatgtggtggccatgggagtcagcgacaagcgggatattagccggttcctggagagcaaccccgtgatgatcgatgccaaggaagtgagcgccgcccaccgggccagatacttctggggcaatctgcctggcatgaacagacccctggccagcaccgtgaacgacaagctggagctgcaggagtgcctggagcacggccggatcgccaagttcagcaaggtgagaaccatcaccacccgaagcaacagcatcaaacaaggcaaggaccagcactttcctgtgttcatgaacgagaaggaggacatcctgtggtgtaccgagatggagagagtgttcgggttcccagtccactacacagatgtcagcaacatgtctagactggccagacagagactgctgggaagaagctggtccgtccctgtgatcagacacctgttcgcccctctgaaggagtacttcgcctgcgtgagcagcggcaacagcaacgccaacagccggggccccagcttctctagcggcctggtgccactgtccctgagagggagccacatgggccccatggagatctacaaaaccgtgagcgcctggaagcggcagcctgtgcgcgtgctgagcctgtttcggaatatcgataaagtcctgaaaagcctgggattcctggagagcggctctggctccggcggtggcaccctgaagtacgtggaggatgtgacaaacgtggtcagacgggatgtggagaagtggggccccttcgatctggtgtacggcagcacccaacccctgggcagctcttgtgaccggtgccctggctggtacatgtttcagttccaccggatcctgcagtacgccctgccgagacaggagtcccagcggccattcttttggattttcatggacaacttgctgctgaccgaggatgaccaggaaactaccactcggttcctgcagaccgaagccgtgaccctgcaggacgtgagaggccgggactaccagaacgccatgcgggtgtggtccaacatccctggactgaaaagcaagcacgcacctctgacccctaaagaagaggagtacctgcaggcccaggtgcggagcagaagcaagctggacgcccctaaggtggatctgctggtgaagaattgcctcctgcccctgagagagtacttcaagtatttcagccagaatagtctgcccctgggcggcccaagcagcggcgcccctcctcccagcggcggcagcccagccggctccccaacctctaccgaggagggcacctctgagtccgccacccccgagagcggccctggcacctccaccgagcccagcgagggcagcgcacccggcagccctgccggcagccccacctccacagaggagggaaccagcaccgagcccagcgaaggcagcgccccaggcaccagcaccgagcctagtgagggcggctctggcggcggcagcgcccaggagattaaacggatcaacaagatcagaagaagacttgtgaaagacagcaacaccaagaaggccggcaagacaggccccatgaaaaccctgctggttagagtgatgacacccgatctgagagagcggctggaaaacctgagaaagaagcctgaaaatatcccccagcccatcagcaatacatctagagccaacctgaataagctgctgaccgattacaccgaaatgaagaaggcgatcctgcatgtgtactgggaagagttccagaaggaccctgtgggcctgatgagccgggtggcccagcctgccagcaagaagatcgatcagaacaagctgaaacctgagatggacgagaagggcaacctgaccaccgccggctttgcctgctctcagtgtggccagcccctgttcgtgtacaagctggagcaggtgtctgagaagggcaaggcttacaccaactacttcggacggtgcaatgtggccgagcacgaaaagctgatcctgctggcccagctgaagcccgagaaggatagcgacgaagccgtgacatatagcctgggaaagtttgggcagagggccctggatttctacagcattcatgtgaccaaggagtccacccaccccgtgaagcccctggcccagatcgccggaaacagatacgcctccggacctgtgggaaaggccctgagcgacgcatgtatgggcacaatcgcctccttcctgtctaagtaccaggacatcatcatcgaacaccagaaggtggtgaagggcaaccagaagagactggagagcctgcgggagctggccggcaaggaaaacctggaataccctagcgtgaccctgccacctcagcctcacaccaaggagggcgttgatgcctacaacgaagtgatcgcccgggtgcgaatgtgggtgaacctgaacctgtggcagaagctgaagctaagcagagatgatgccaagcctctgctgagactgaagggattcccttcctttcctctggtcgagagacaggccaacgaagtggactggtgggacatggtgtgtaacgtgaagaagctgatcaacgagaaaaaggaggatggcaaggtgttttggcagaatctggctggctacaagagacaggaagccctgagaccatacctgagcagcgaggaagatcggaagaagggaaagaaattcgctcggtaccagctgggcgacctgctgctgcacctggaaaagaagcacggcgaggactggggaaaggtgtacgacgaggcctgggagcggattgacaagaaagtggaaggcctgagcaagcacatcaagctggaagaggaacggagaagcgaggacgcccagagcaaggccgccctgaccgactggctgcgggctaaggccagcttcgtgatcgagggcctgaaggaggccgacaaggacgagttctgcagatgcgagctgaagctgcagaagtggtacggggacctgcggggaaagcccttcgccatcgaagccgagaacagcatcctggacatcagcggcttcagcaagcagtacaactgtgccttcatctggcagaaggacggcgtgaagaagctgaacctgtacctgatcatcaactacttcaagggcggcaagctgcggttcaagaagatcaaacctgaagccttcgaagccaacagattctacaccgtgatcaacaaaaagagcggcgagatcgtgcccatggaggtgaacttcaacttcgacgaccccaacctgatcatcctgcctctggcctttggcaagagacagggcagagaattcatctggaacgacctgctgtccctggaaaccggcagcctgaagctggccaacggaagagtgatcgagaagacactgtacaacagaagaacccggcaggatgagcctgccctgttcgtggccctgaccttcgagcggcgggaggtcctggactcctccaatatcaaaccaatgaacctgatcggcgtggcaagaggcgaaaacatccccgccgtgatcgccctgaccgaccccgagggctgcccactgagccggtttaaggatagcctgggaaacccaacccacatcctgagaatcggcgagagctataaggagaagcagcggaccatccaggccaagaaggaggtggagcagcggagagccggcggctacagccggaagtacgccagcaaagccaagaatctggcagacgatatggtgagaaacaccgctagagatctgctgtactacgccgtgacccaggatgccatgctgatcttcgccaacctgagccggggcttcggccggcagggcaagcggaccttcatggccgagagacagtacacacggatggaggactggctgaccgccaagctggcctacgagggcctgagcaagacctacctgtccaagacactggcccagtacacctccaagacatgcagcaactgtgggtttaccatcaccagcgccgactacgacagggtgctggagaagctgaagaagacagcaacaggctggatgaccacaattaacggcaaggagctgaaggtggagggccagattacctactacaacagatacaagagacagaacgtagtcaaggacctgtccgtcgagctggatagactgagcgaagaatctgtgaacaacgacatctcctcctggacaaagggcagaagcggagaagctctgagcctcctgaagaaaagattctcccatagacccgtgcaggagaagttcgtgtgcctgaactgcggcttcgagacacacgcagccgagcaagccgccctgaacatcgccagatcctggctgttcctgcggagccaggagtacaagaaataccagacaaacaagacaaccggcaacaccgataagagagccttcgtcgagacctggcagtccttttaccggaagaagcttaaggaggtgtggaaacctgccgtgcggtctggcggatctggcggaggctccacaagcaagcccggcgtgctgaccttcgccgacgtggccgtgtacttcagcagcgaggagtggggctgcctgaggcccgcccagagggccctgtacagggacgtgatgagggagacctacggccacctgggcgccctgggcttccccggccccaagcccgccctgatcagctggatggagcaggagagcgaggagagcgaggcctggagccccgccgccaaggaccccgaggagggcgagagcctgggcaccagccccaagaaaaagagaaaagtctaagctgccttctgcggggcttgccttctggccatgcccttcttctctcccttgcacctgtacctcttggtctttgaataaagcctgagtaggaaggctagcaaaaaaaaaaaaaaaaaaaaaaaaaaaaaaaaaaaaaaaaaaaaaaaaaaaaaaaaaaaaaaaaaaaaaaaaaaaaaaaa

SEQ ID NO: 6779 - RNA, 5797 nt, synthetic construct
  source 1..5797: mol_type = other RNA
aggaaataagagagaaaagaagagtaagaagaaatataagagccaccatggcccctaagaagaagcgtaaagtgagccggatggaacgcctcgtctacgaggtgcggcagaagtgcagaaacatcgaggacatctgcatctcctgcggatctctgaacgtgaccctggagcacccactgttcatcggcggcatgtgccagaactgtaaaaactgttttctggagtgtgcctatcaatacgacgatgacggctaccagagctactgcaccatctgttgcggcggaagagaggtgctgatgtgtggaaataacaactgctgccggtgcttctgcgtggaatgcgtggacctgctggtgggccccggcgccgcccaggccgctattaaggaagatccttggaactgctacatgtgcggccacaagggcacatacggcctgctgagacggagagaggactggcctagcagactgcagatgttcttcgccaataaccacgaccaggagttcgacccccctaaggtgtaccctcccgtccccgccgagaagagaaagcccatccgggtcctgagcctgttcgatggcatcgccaccggtctgctggtgctgaaggacctgggcatccaggtggataggtacattgcctccgaggtgtgcgaggactccatcaccgtgggaatggtgcgtcatcagggcaagatcatgtacgtgggcgacgtgcggagcgtgacacagaagcatatccaggagtggggccctttcgacctggtgatcggcggcagcccttgcaatgacctgagcatcgtgaacccagcccggaagggcctgtacgagggaaccggcagactgttcttcgagttttacagactgctgcacgacgcccggcctaaggaaggcgacgaccggcccttcttttggctgttcgagaatgtggtggccatgggagtcagcgacaagcgggatattagccggttcctggagagcaaccccgtgatgatcgatgccaaggaagtgagcgccgcccaccgggccagatacttctggggcaatctgcctggcatgaacagacccctggccagcaccgtgaacgacaagctggagctgcaggagtgcctggagcacggccggatcgccaagttcagcaaggtgagaaccatcaccacccgaagcaacagcatcaaacaaggcaaggaccagcactttcctgtgttcatgaacgagaaggaggacatcctgtggtgtaccgagatggagagagtgttcgggttcccagtccactacacagatgtcagcaacatgtctagactggccagacagagactgctgggaagaagctggtccgtccctgtgatcagacacctgttcgcccctctgaaggagtacttcgcctgcgtgagcagcggcaacagcaacgccaacagccggggccccagcttctctagcggcctggtgccactgtccctgagagggagccacatgggccccatggagatctacaaaaccgtgagcgcctggaagcggcagcctgtgcgcgtgctgagcctgtttcggaatatcgataaagtcctgaaaagcctgggattcctggagagcggctctggctccggcggtggcaccctgaagtacgtggaggatgtgacaaacgtggtcagacgggatgtggagaagtggggccccttcgatctggtgtacggcagcacccaacccctgggcagctcttgtgaccggtgccctggctggtacatgtttcagttccaccggatcctgcagtacgccctgccgagacaggagtcccagcggccattcttttggattttcatggacaacttgctgctgaccgaggatgaccaggaaactaccactcggttcctgcagaccgaagccgtgaccctgcaggacgtgagaggccgggactaccagaacgccatgcgggtgtggtccaacatccctggactgaaaagcaagcacgcacctctgacccctaaagaagaggagtacctgcaggcccaggtgcggagcagaagcaagctggacgcccctaaggtggatctgctggtgaagaattgcctcctgcccctgagagagtacttcaagtatttcagccagaatagtctgcccctgggcggcccaagcagcggcgcccctcctcccagcggcggcagcccagccggctccccaacctctaccgaggagggcacctctgagtccgccacccccgagagcggccctggcacctccaccgagcccagcgagggcagcgcacccggcagccctgccggcagccccacctccacagaggagggaaccagcaccgagcccagcgaaggcagcgccccaggcaccagcaccgagcctagtgagggcggctctggcggcggcagcgcccaggagattaaacggatcaacaagatcagaagaagacttgtgaaagacagcaacaccaagaaggccggcaagacaggccccatgaaaaccctgctggttagagtgatgacacccgatctgagagagcggctggaaaacctgagaaagaagcctgaaaatatcccccagcccatcagcaatacatctagagccaacctgaataagctgctgaccgattacaccgaaatgaagaaggcgatcctgcatgtgtactgggaagagttccagaaggaccctgtgggcctgatgagccgggtggcccagcctgccagcaagaagatcgatcagaacaagctgaaacctgagatggacgagaagggcaacctgaccaccgccggctttgcctgctctcagtgtggccagcccctgttcgtgtacaagctggagcaggtgtctgagaagggcaaggcttacaccaactacttcggacggtgcaatgtggccgagcacgaaaagctgatcctgctggcccagctgaagcccgagaaggatagcgacgaagccgtgacatatagcctgggaaagtttgggcagagggccctggatttctacagcattcatgtgaccaaggagtccacccaccccgtgaagcccctggcccagatcgccggaaacagatacgcctccggacctgtgggaaaggccctgagcgacgcatgtatgggcacaatcgcctccttcctgtctaagtaccaggacatcatcatcgaacaccagaaggtggtgaagggcaaccagaagagactggagagcctgcgggagctggccggcaaggaaaacctggaataccctagcgtgaccctgccacctcagcctcacaccaaggagggcgttgatgcctacaacgaagtgatcgcccgggtgcgaatgtgggtgaacctgaacctgtggcagaagctgaagctaagcagagatgatgccaagcctctgctgagactgaagggattcccttcctttcctctggtcgagagacaggccaacgaagtggactggtgggacatggtgtgtaacgtgaagaagctgatcaacgagaaaaaggaggatggcaaggtgttttggcagaatctggctggctacaagagacaggaagccctgagaccatacctgagcagcgaggaagatcggaagaagggaaagaaattcgctcggtaccagctgggcgacctgctgctgcacctggaaaagaagcacggcgaggactggggaaaggtgtacgacgaggcctgggagcggattgacaagaaagtggaaggcctgagcaagcacatcaagctggaagaggaacggagaagcgaggacgcccagagcaaggccgccctgaccgactggctgcgggctaaggccagcttcgtgatcgagggcctgaaggaggccgacaaggacgagttctgcagatgcgagctgaagctgcagaagtggtacggggacctgcggggaaagcccttcgccatcgaagccgagaacagcatcctggacatcagcggcttcagcaagcagtacaactgtgccttcatctggcagaaggacggcgtgaagaagctgaacctgtacctgatcatcaactacttcaagggcggcaagctgcggttcaagaagatcaaacctgaagccttcgaagccaacagattctacaccgtgatcaacaaaaagagcggcgagatcgtgcccatggaggtgaacttcaacttcgacgaccccaacctgatcatcctgcctctggcctttggcaagagacagggcagagaattcatctggaacgacctgctgtccctggaaaccggcagcctgaagctggccaacggaagagtgatcgagaagacactgtacaacagaagaacccggcaggatgagcctgccctgttcgtggccctgaccttcgagcggcgggaggtcctggactcctccaatatcaaaccaatgaacctgatcggcgtggcaagaggcgaaaacatccccgccgtgatcgccctgaccgaccccgagggctgcccactgagccggtttaaggatagcctgggaaacccaacccacatcctgagaatcggcgagagctataaggagaagcagcggaccatccaggccaagaaggaggtggagcagcggagagccggcggctacagccggaagtacgccagcaaagccaagaatctggcagacgatatggtgagaaacaccgctagagatctgctgtactacgccgtgacccaggatgccatgctgatcttcgccaacctgagccggggcttcggccggcagggcaagcggaccttcatggccgagagacagtacacacggatggaggactggctgaccgccaagctggcctacgagggcctgagcaagacctacctgtccaagacactggcccagtacacctccaagacatgcagcaactgtgggtttaccatcaccagcgccgactacgacagggtgctggagaagctgaagaagacagcaacaggctggatgaccacaattaacggcaaggagctgaaggtggagggccagattacctactacaacagatacaagagacagaacgtagtcaaggacctgtccgtcgagctggatagactgagcgaagaatctgtgaacaacgacatctcctcctggacaaagggcagaagcggagaagctctgagcctcctgaagaaaagattctcccatagacccgtgcaggagaagttcgtgtgcctgaactgcggcttcgagacacacgcagccgagcaagccgccctgaacatcgccagatcctggctgttcctgcggagccaggagtacaagaaataccagacaaacaagacaaccggcaacaccgataagagagccttcgtcgagacctggcagtccttttaccggaagaagcttaaggaggtgtggaaacctgccgtgcggtctggcggatctggcggaggctccacaagccaggtgcccgtgaccttcgaggacatcgccgtgtacttcagccaggaggagtgggaggacctggaggagcagcagagggagctgtacaaggacgtgatgaaggagaactacgagaccctgagcagcctgggcaccggcccccccgccgtgacccccgacatcatcagccacatcgagaggggcgaggagccctacatcaggttcgagagcggccccgaggagagggagatcggcaagagcagcaccagccccaagaaaaagagaaaagtctaagctgccttctgcggggcttgccttctggccatgcccttcttctctcccttgcacctgtacctcttggtctttgaataaagcctgagtaggaaggctagcaaaaaaaaaaaaaaaaaaaaaaaaaaaaaaaaaaaaaaaaaaaaaaaaaaaaaaaaaaaaaaaaaaaaaaaaaaaaaaaa

SEQ ID NO: 6780 - RNA, 5797 nt, synthetic construct
  source 1..5797: mol_type = other RNA
aggaaataagagagaaaagaagagtaagaagaaatataagagccaccatggcccctaagaagaagcgtaaagtgagccggatggaacgcctcgtctacgaggtgcggcagaagtgcagaaacatcgaggacatctgcatctcctgcggatctctgaacgtgaccctggagcacccactgttcatcggcggcatgtgccagaactgtaaaaactgttttctggagtgtgcctatcaatacgacgatgacggctaccagagctactgcaccatctgttgcggcggaagagaggtgctgatgtgtggaaataacaactgctgccggtgcttctgcgtggaatgcgtggacctgctggtgggccccggcgccgcccaggccgctattaaggaagatccttggaactgctacatgtgcggccacaagggcacatacggcctgctgagacggagagaggactggcctagcagactgcagatgttcttcgccaataaccacgaccaggagttcgacccccctaaggtgtaccctcccgtccccgccgagaagagaaagcccatccgggtcctgagcctgttcgatggcatcgccaccggtctgctggtgctgaaggacctgggcatccaggtggataggtacattgcctccgaggtgtgcgaggactccatcaccgtgggaatggtgcgtcatcagggcaagatcatgtacgtgggcgacgtgcggagcgtgacacagaagcatatccaggagtggggccctttcgacctggtgatcggcggcagcccttgcaatgacctgagcatcgtgaacccagcccggaagggcctgtacgagggaaccggcagactgttcttcgagttttacagactgctgcacgacgcccggcctaaggaaggcgacgaccggcccttcttttggctgttcgagaatgtggtggccatgggagtcagcgacaagcgggatattagccggttcctggagagcaaccccgtgatgatcgatgccaaggaagtgagcgccgcccaccgggccagatacttctggggcaatctgcctggcatgaacagacccctggccagcaccgtgaacgacaagctggagctgcaggagtgcctggagcacggccggatcgccaagttcagcaaggtgagaaccatcaccacccgaagcaacagcatcaaacaaggcaaggaccagcactttcctgtgttcatgaacgagaaggaggacatcctgtggtgtaccgagatggagagagtgttcgggttcccagtccactacacagatgtcagcaacatgtctagactggccagacagagactgctgggaagaagctggtccgtccctgtgatcagacacctgttcgcccctctgaaggagtacttcgcctgcgtgagcagcggcaacagcaacgccaacagccggggccccagcttctctagcggcctggtgccactgtccctgagagggagccacatgggccccatggagatctacaaaaccgtgagcgcctggaagcggcagcctgtgcgcgtgctgagcctgtttcggaatatcgataaagtcctgaaaagcctgggattcctggagagcggctctggctccggcggtggcaccctgaagtacgtggaggatgtgacaaacgtggtcagacgggatgtggagaagtggggccccttcgatctggtgtacggcagcacccaacccctgggcagctcttgtgaccggtgccctggctggtacatgtttcagttccaccggatcctgcagtacgccctgccgagacaggagtcccagcggccattcttttggattttcatggacaacttgctgctgaccgaggatgaccaggaaactaccactcggttcctgcagaccgaagccgtgaccctgcaggacgtgagaggccgggactaccagaacgccatgcgggtgtggtccaacatccctggactgaaaagcaagcacgcacctctgacccctaaagaagaggagtacctgcaggcccaggtgcggagcagaagcaagctggacgcccctaaggtggatctgctggtgaagaattgcctcctgcccctgagagagtacttcaagtatttcagccagaatagtctgcccctgggcggcccaagcagcggcgcccctcctcccagcggcggcagcccagccggctccccaacctctaccgaggagggcacctctgagtccgccacccccgagagcggccctggcacctccaccgagcccagcgagggcagcgcacccggcagccctgccggcagccccacctccacagaggagggaaccagcaccgagcccagcgaaggcagcgccccaggcaccagcaccgagcctagtgagggcggctctggcggcggcagcgcccaggagattaaacggatcaacaagatcagaagaagacttgtgaaagacagcaacaccaagaaggccggcaagacaggccccatgaaaaccctgctggttagagtgatgacacccgatctgagagagcggctggaaaacctgagaaagaagcctgaaaatatcccccagcccatcagcaatacatctagagccaacctgaataagctgctgaccgattacaccgaaatgaagaaggcgatcctgcatgtgtactgggaagagttccagaaggaccctgtgggcctgatgagccgggtggcccagcctgccagcaagaagatcgatcagaacaagctgaaacctgagatggacgagaagggcaacctgaccaccgccggctttgcctgctctcagtgtggccagcccctgttcgtgtacaagctggagcaggtgtctgagaagggcaaggcttacaccaactacttcggacggtgcaatgtggccgagcacgaaaagctgatcctgctggcccagctgaagcccgagaaggatagcgacgaagccgtgacatatagcctgggaaagtttgggcagagggccctggatttctacagcattcatgtgaccaaggagtccacccaccccgtgaagcccctggcccagatcgccggaaacagatacgcctccggacctgtgggaaaggccctgagcgacgcatgtatgggcacaatcgcctccttcctgtctaagtaccaggacatcatcatcgaacaccagaaggtggtgaagggcaaccagaagagactggagagcctgcgggagctggccggcaaggaaaacctggaataccctagcgtgaccctgccacctcagcctcacaccaaggagggcgttgatgcctacaacgaagtgatcgcccgggtgcgaatgtgggtgaacctgaacctgtggcagaagctgaagctaagcagagatgatgccaagcctctgctgagactgaagggattcccttcctttcctctggtcgagagacaggccaacgaagtggactggtgggacatggtgtgtaacgtgaagaagctgatcaacgagaaaaaggaggatggcaaggtgttttggcagaatctggctggctacaagagacaggaagccctgagaccatacctgagcagcgaggaagatcggaagaagggaaagaaattcgctcggtaccagctgggcgacctgctgctgcacctggaaaagaagcacggcgaggactggggaaaggtgtacgacgaggcctgggagcggattgacaagaaagtggaaggcctgagcaagcacatcaagctggaagaggaacggagaagcgaggacgcccagagcaaggccgccctgaccgactggctgcgggctaaggccagcttcgtgatcgagggcctgaaggaggccgacaaggacgagttctgcagatgcgagctgaagctgcagaagtggtacggggacctgcggggaaagcccttcgccatcgaagccgagaacagcatcctggacatcagcggcttcagcaagcagtacaactgtgccttcatctggcagaaggacggcgtgaagaagctgaacctgtacctgatcatcaactacttcaagggcggcaagctgcggttcaagaagatcaaacctgaagccttcgaagccaacagattctacaccgtgatcaacaaaaagagcggcgagatcgtgcccatggaggtgaacttcaacttcgacgaccccaacctgatcatcctgcctctggcctttggcaagagacagggcagagaattcatctggaacgacctgctgtccctggaaaccggcagcctgaagctggccaacggaagagtgatcgagaagacactgtacaacagaagaacccggcaggatgagcctgccctgttcgtggccctgaccttcgagcggcgggaggtcctggactcctccaatatcaaaccaatgaacctgatcggcgtggcaagaggcgaaaacatccccgccgtgatcgccctgaccgaccccgagggctgcccactgagccggtttaaggatagcctgggaaacccaacccacatcctgagaatcggcgagagctataaggagaagcagcggaccatccaggccaagaaggaggtggagcagcggagagccggcggctacagccggaagtacgccagcaaagccaagaatctggcagacgatatggtgagaaacaccgctagagatctgctgtactacgccgtgacccaggatgccatgctgatcttcgccaacctgagccggggcttcggccggcagggcaagcggaccttcatggccgagagacagtacacacggatggaggactggctgaccgccaagctggcctacgagggcctgagcaagacctacctgtccaagacactggcccagtacacctccaagacatgcagcaactgtgggtttaccatcaccagcgccgactacgacagggtgctggagaagctgaagaagacagcaacaggctggatgaccacaattaacggcaaggagctgaaggtggagggccagattacctactacaacagatacaagagacagaacgtagtcaaggacctgtccgtcgagctggatagactgagcgaagaatctgtgaacaacgacatctcctcctggacaaagggcagaagcggagaagctctgagcctcctgaagaaaagattctcccatagacccgtgcaggagaagttcgtgtgcctgaactgcggcttcgagacacacgcagccgagcaagccgccctgaacatcgccagatcctggctgttcctgcggagccaggagtacaagaaataccagacaaacaagacaaccggcaacaccgataagagagccttcgtcgagacctggcagtccttttaccggaagaagcttaaggaggtgtggaaacctgccgtgcggtctggcggatctggcggaggctccacaagcgaggagcccgtgagcttcgccgaggtggccgtgtacttcagcagggaggagtgggccctgctggaccccgcccagagggccctgtacagggacgtgatgctggagacctaccagtgcgtggccagcatggagagcctgctgcccgcccccaagcccatcgtgatcagcctgctggagggcggcgaggacctgtggatccccgacatgcagagccccgaggacgtggccggcgacctgaggcccaccagccccaagaaaaagagaaaagtctaagctgccttctgcggggcttgccttctggccatgcccttcttctctcccttgcacctgtacctcttggtctttgaataaagcctgagtaggaaggctagcaaaaaaaaaaaaaaaaaaaaaaaaaaaaaaaaaaaaaaaaaaaaaaaaaaaaaaaaaaaaaaaaaaaaaaaaaaaaaaaa

SEQ ID NO: 6781 - RNA, 5797 nt, synthetic construct
  source 1..5797: mol_type = other RNA
aggaaataagagagaaaagaagagtaagaagaaatataagagccaccatggcccctaagaagaagcgtaaagtgagccggatggaacgcctcgtctacgaggtgcggcagaagtgcagaaacatcgaggacatctgcatctcctgcggatctctgaacgtgaccctggagcacccactgttcatcggcggcatgtgccagaactgtaaaaactgttttctggagtgtgcctatcaatacgacgatgacggctaccagagctactgcaccatctgttgcggcggaagagaggtgctgatgtgtggaaataacaactgctgccggtgcttctgcgtggaatgcgtggacctgctggtgggccccggcgccgcccaggccgctattaaggaagatccttggaactgctacatgtgcggccacaagggcacatacggcctgctgagacggagagaggactggcctagcagactgcagatgttcttcgccaataaccacgaccaggagttcgacccccctaaggtgtaccctcccgtccccgccgagaagagaaagcccatccgggtcctgagcctgttcgatggcatcgccaccggtctgctggtgctgaaggacctgggcatccaggtggataggtacattgcctccgaggtgtgcgaggactccatcaccgtgggaatggtgcgtcatcagggcaagatcatgtacgtgggcgacgtgcggagcgtgacacagaagcatatccaggagtggggccctttcgacctggtgatcggcggcagcccttgcaatgacctgagcatcgtgaacccagcccggaagggcctgtacgagggaaccggcagactgttcttcgagttttacagactgctgcacgacgcccggcctaaggaaggcgacgaccggcccttcttttggctgttcgagaatgtggtggccatgggagtcagcgacaagcgggatattagccggttcctggagagcaaccccgtgatgatcgatgccaaggaagtgagcgccgcccaccgggccagatacttctggggcaatctgcctggcatgaacagacccctggccagcaccgtgaacgacaagctggagctgcaggagtgcctggagcacggccggatcgccaagttcagcaaggtgagaaccatcaccacccgaagcaacagcatcaaacaaggcaaggaccagcactttcctgtgttcatgaacgagaaggaggacatcctgtggtgtaccgagatggagagagtgttcgggttcccagtccactacacagatgtcagcaacatgtctagactggccagacagagactgctgggaagaagctggtccgtccctgtgatcagacacctgttcgcccctctgaaggagtacttcgcctgcgtgagcagcggcaacagcaacgccaacagccggggccccagcttctctagcggcctggtgccactgtccctgagagggagccacatgggccccatggagatctacaaaaccgtgagcgcctggaagcggcagcctgtgcgcgtgctgagcctgtttcggaatatcgataaagtcctgaaaagcctgggattcctggagagcggctctggctccggcggtggcaccctgaagtacgtggaggatgtgacaaacgtggtcagacgggatgtggagaagtggggccccttcgatctggtgtacggcagcacccaacccctgggcagctcttgtgaccggtgccctggctggtacatgtttcagttccaccggatcctgcagtacgccctgccgagacaggagtcccagcggccattcttttggattttcatggacaacttgctgctgaccgaggatgaccaggaaactaccactcggttcctgcagaccgaagccgtgaccctgcaggacgtgagaggccgggactaccagaacgccatgcgggtgtggtccaacatccctggactgaaaagcaagcacgcacctctgacccctaaagaagaggagtacctgcaggcccaggtgcggagcagaagcaagctggacgcccctaaggtggatctgctggtgaagaattgcctcctgcccctgagagagtacttcaagtatttcagccagaatagtctgcccctgggcggcccaagcagcggcgcccctcctcccagcggcggcagcccagccggctccccaacctctaccgaggagggcacctctgagtccgccacccccgagagcggccctggcacctccaccgagcccagcgagggcagcgcacccggcagccctgccggcagccccacctccacagaggagggaaccagcaccgagcccagcgaaggcagcgccccaggcaccagcaccgagcctagtgagggcggctctggcggcggcagcgcccaggagattaaacggatcaacaagatcagaagaagacttgtgaaagacagcaacaccaagaaggccggcaagacaggccccatgaaaaccctgctggttagagtgatgacacccgatctgagagagcggctggaaaacctgagaaagaagcctgaaaatatcccccagcccatcagcaatacatctagagccaacctgaataagctgctgaccgattacaccgaaatgaagaaggcgatcctgcatgtgtactgggaagagttccagaaggaccctgtgggcctgatgagccgggtggcccagcctgccagcaagaagatcgatcagaacaagctgaaacctgagatggacgagaagggcaacctgaccaccgccggctttgcctgctctcagtgtggccagcccctgttcgtgtacaagctggagcaggtgtctgagaagggcaaggcttacaccaactacttcggacggtgcaatgtggccgagcacgaaaagctgatcctgctggcccagctgaagcccgagaaggatagcgacgaagccgtgacatatagcctgggaaagtttgggcagagggccctggatttctacagcattcatgtgaccaaggagtccacccaccccgtgaagcccctggcccagatcgccggaaacagatacgcctccggacctgtgggaaaggccctgagcgacgcatgtatgggcacaatcgcctccttcctgtctaagtaccaggacatcatcatcgaacaccagaaggtggtgaagggcaaccagaagagactggagagcctgcgggagctggccggcaaggaaaacctggaataccctagcgtgaccctgccacctcagcctcacaccaaggagggcgttgatgcctacaacgaagtgatcgcccgggtgcgaatgtgggtgaacctgaacctgtggcagaagctgaagctaagcagagatgatgccaagcctctgctgagactgaagggattcccttcctttcctctggtcgagagacaggccaacgaagtggactggtgggacatggtgtgtaacgtgaagaagctgatcaacgagaaaaaggaggatggcaaggtgttttggcagaatctggctggctacaagagacaggaagccctgagaccatacctgagcagcgaggaagatcggaagaagggaaagaaattcgctcggtaccagctgggcgacctgctgctgcacctggaaaagaagcacggcgaggactggggaaaggtgtacgacgaggcctgggagcggattgacaagaaagtggaaggcctgagcaagcacatcaagctggaagaggaacggagaagcgaggacgcccagagcaaggccgccctgaccgactggctgcgggctaaggccagcttcgtgatcgagggcctgaaggaggccgacaaggacgagttctgcagatgcgagctgaagctgcagaagtggtacggggacctgcggggaaagcccttcgccatcgaagccgagaacagcatcctggacatcagcggcttcagcaagcagtacaactgtgccttcatctggcagaaggacggcgtgaagaagctgaacctgtacctgatcatcaactacttcaagggcggcaagctgcggttcaagaagatcaaacctgaagccttcgaagccaacagattctacaccgtgatcaacaaaaagagcggcgagatcgtgcccatggaggtgaacttcaacttcgacgaccccaacctgatcatcctgcctctggcctttggcaagagacagggcagagaattcatctggaacgacctgctgtccctggaaaccggcagcctgaagctggccaacggaagagtgatcgagaagacactgtacaacagaagaacccggcaggatgagcctgccctgttcgtggccctgaccttcgagcggcgggaggtcctggactcctccaatatcaaaccaatgaacctgatcggcgtggcaagaggcgaaaacatccccgccgtgatcgccctgaccgaccccgagggctgcccactgagccggtttaaggatagcctgggaaacccaacccacatcctgagaatcggcgagagctataaggagaagcagcggaccatccaggccaagaaggaggtggagcagcggagagccggcggctacagccggaagtacgccagcaaagccaagaatctggcagacgatatggtgagaaacaccgctagagatctgctgtactacgccgtgacccaggatgccatgctgatcttcgccaacctgagccggggcttcggccggcagggcaagcggaccttcatggccgagagacagtacacacggatggaggactggctgaccgccaagctggcctacgagggcctgagcaagacctacctgtccaagacactggcccagtacacctccaagacatgcagcaactgtgggtttaccatcaccagcgccgactacgacagggtgctggagaagctgaagaagacagcaacaggctggatgaccacaattaacggcaaggagctgaaggtggagggccagattacctactacaacagatacaagagacagaacgtagtcaaggacctgtccgtcgagctggatagactgagcgaagaatctgtgaacaacgacatctcctcctggacaaagggcagaagcggagaagctctgagcctcctgaagaaaagattctcccatagacccgtgcaggagaagttcgtgtgcctgaactgcggcttcgagacacacgcagccgagcaagccgccctgaacatcgccagatcctggctgttcctgcggagccaggagtacaagaaataccagacaaacaagacaaccggcaacaccgataagagagccttcgtcgagacctggcagtccttttaccggaagaagcttaaggaggtgtggaaacctgccgtgcggtctggcggatctggcggaggctccacaagcatgagcctgggcagcgagctgttcagggacgtggccatcgtgttcagccaggaggagtggcagtggctggcccccgcccagagggacctgtacagggacgtgatgctggagacctacagcaacctggtgagcctgggcctggccgtgagcaagcccgacgtgatcagcttcctggagcagggcaaggagccctggatggtggagagggtggtgagcggcggcctgtgccccgtgctggagagcaccagccccaagaaaaagagaaaagtctaagctgccttctgcggggcttgccttctggccatgcccttcttctctcccttgcacctgtacctcttggtctttgaataaagcctgagtaggaaggctagcaaaaaaaaaaaaaaaaaaaaaaaaaaaaaaaaaaaaaaaaaaaaaaaaaaaaaaaaaaaaaaaaaaaaaaaaaaaaaaaa

SEQ ID NO: 6782 - RNA, 5797 nt, synthetic construct
  source 1..5797: mol_type = other RNA
aggaaataagagagaaaagaagagtaagaagaaatataagagccaccatggcccctaagaagaagcgtaaagtgagccggatggaacgcctcgtctacgaggtgcggcagaagtgcagaaacatcgaggacatctgcatctcctgcggatctctgaacgtgaccctggagcacccactgttcatcggcggcatgtgccagaactgtaaaaactgttttctggagtgtgcctatcaatacgacgatgacggctaccagagctactgcaccatctgttgcggcggaagagaggtgctgatgtgtggaaataacaactgctgccggtgcttctgcgtggaatgcgtggacctgctggtgggccccggcgccgcccaggccgctattaaggaagatccttggaactgctacatgtgcggccacaagggcacatacggcctgctgagacggagagaggactggcctagcagactgcagatgttcttcgccaataaccacgaccaggagttcgacccccctaaggtgtaccctcccgtccccgccgagaagagaaagcccatccgggtcctgagcctgttcgatggcatcgccaccggtctgctggtgctgaaggacctgggcatccaggtggataggtacattgcctccgaggtgtgcgaggactccatcaccgtgggaatggtgcgtcatcagggcaagatcatgtacgtgggcgacgtgcggagcgtgacacagaagcatatccaggagtggggccctttcgacctggtgatcggcggcagcccttgcaatgacctgagcatcgtgaacccagcccggaagggcctgtacgagggaaccggcagactgttcttcgagttttacagactgctgcacgacgcccggcctaaggaaggcgacgaccggcccttcttttggctgttcgagaatgtggtggccatgggagtcagcgacaagcgggatattagccggttcctggagagcaaccccgtgatgatcgatgccaaggaagtgagcgccgcccaccgggccagatacttctggggcaatctgcctggcatgaacagacccctggccagcaccgtgaacgacaagctggagctgcaggagtgcctggagcacggccggatcgccaagttcagcaaggtgagaaccatcaccacccgaagcaacagcatcaaacaaggcaaggaccagcactttcctgtgttcatgaacgagaaggaggacatcctgtggtgtaccgagatggagagagtgttcgggttcccagtccactacacagatgtcagcaacatgtctagactggccagacagagactgctgggaagaagctggtccgtccctgtgatcagacacctgttcgcccctctgaaggagtacttcgcctgcgtgagcagcggcaacagcaacgccaacagccggggccccagcttctctagcggcctggtgccactgtccctgagagggagccacatgggccccatggagatctacaaaaccgtgagcgcctggaagcggcagcctgtgcgcgtgctgagcctgtttcggaatatcgataaagtcctgaaaagcctgggattcctggagagcggctctggctccggcggtggcaccctgaagtacgtggaggatgtgacaaacgtggtcagacgggatgtggagaagtggggccccttcgatctggtgtacggcagcacccaacccctgggcagctcttgtgaccggtgccctggctggtacatgtttcagttccaccggatcctgcagtacgccctgccgagacaggagtcccagcggccattcttttggattttcatggacaacttgctgctgaccgaggatgaccaggaaactaccactcggttcctgcagaccgaagccgtgaccctgcaggacgtgagaggccgggactaccagaacgccatgcgggtgtggtccaacatccctggactgaaaagcaagcacgcacctctgacccctaaagaagaggagtacctgcaggcccaggtgcggagcagaagcaagctggacgcccctaaggtggatctgctggtgaagaattgcctcctgcccctgagagagtacttcaagtatttcagccagaatagtctgcccctgggcggcccaagcagcggcgcccctcctcccagcggcggcagcccagccggctccccaacctctaccgaggagggcacctctgagtccgccacccccgagagcggccctggcacctccaccgagcccagcgagggcagcgcacccggcagccctgccggcagccccacctccacagaggagggaaccagcaccgagcccagcgaaggcagcgccccaggcaccagcaccgagcctagtgagggcggctctggcggcggcagcgcccaggagattaaacggatcaacaagatcagaagaagacttgtgaaagacagcaacaccaagaaggccggcaagacaggccccatgaaaaccctgctggttagagtgatgacacccgatctgagagagcggctggaaaacctgagaaagaagcctgaaaatatcccccagcccatcagcaatacatctagagccaacctgaataagctgctgaccgattacaccgaaatgaagaaggcgatcctgcatgtgtactgggaagagttccagaaggaccctgtgggcctgatgagccgggtggcccagcctgccagcaagaagatcgatcagaacaagctgaaacctgagatggacgagaagggcaacctgaccaccgccggctttgcctgctctcagtgtggccagcccctgttcgtgtacaagctggagcaggtgtctgagaagggcaaggcttacaccaactacttcggacggtgcaatgtggccgagcacgaaaagctgatcctgctggcccagctgaagcccgagaaggatagcgacgaagccgtgacatatagcctgggaaagtttgggcagagggccctggatttctacagcattcatgtgaccaaggagtccacccaccccgtgaagcccctggcccagatcgccggaaacagatacgcctccggacctgtgggaaaggccctgagcgacgcatgtatgggcacaatcgcctccttcctgtctaagtaccaggacatcatcatcgaacaccagaaggtggtgaagggcaaccagaagagactggagagcctgcgggagctggccggcaaggaaaacctggaataccctagcgtgaccctgccacctcagcctcacaccaaggagggcgttgatgcctacaacgaagtgatcgcccgggtgcgaatgtgggtgaacctgaacctgtggcagaagctgaagctaagcagagatgatgccaagcctctgctgagactgaagggattcccttcctttcctctggtcgagagacaggccaacgaagtggactggtgggacatggtgtgtaacgtgaagaagctgatcaacgagaaaaaggaggatggcaaggtgttttggcagaatctggctggctacaagagacaggaagccctgagaccatacctgagcagcgaggaagatcggaagaagggaaagaaattcgctcggtaccagctgggcgacctgctgctgcacctggaaaagaagcacggcgaggactggggaaaggtgtacgacgaggcctgggagcggattgacaagaaagtggaaggcctgagcaagcacatcaagctggaagaggaacggagaagcgaggacgcccagagcaaggccgccctgaccgactggctgcgggctaaggccagcttcgtgatcgagggcctgaaggaggccgacaaggacgagttctgcagatgcgagctgaagctgcagaagtggtacggggacctgcggggaaagcccttcgccatcgaagccgagaacagcatcctggacatcagcggcttcagcaagcagtacaactgtgccttcatctggcagaaggacggcgtgaagaagctgaacctgtacctgatcatcaactacttcaagggcggcaagctgcggttcaagaagatcaaacctgaagccttcgaagccaacagattctacaccgtgatcaacaaaaagagcggcgagatcgtgcccatggaggtgaacttcaacttcgacgaccccaacctgatcatcctgcctctggcctttggcaagagacagggcagagaattcatctggaacgacctgctgtccctggaaaccggcagcctgaagctggccaacggaagagtgatcgagaagacactgtacaacagaagaacccggcaggatgagcctgccctgttcgtggccctgaccttcgagcggcgggaggtcctggactcctccaatatcaaaccaatgaacctgatcggcgtggcaagaggcgaaaacatccccgccgtgatcgccctgaccgaccccgagggctgcccactgagccggtttaaggatagcctgggaaacccaacccacatcctgagaatcggcgagagctataaggagaagcagcggaccatccaggccaagaaggaggtggagcagcggagagccggcggctacagccggaagtacgccagcaaagccaagaatctggcagacgatatggtgagaaacaccgctagagatctgctgtactacgccgtgacccaggatgccatgctgatcttcgccaacctgagccggggcttcggccggcagggcaagcggaccttcatggccgagagacagtacacacggatggaggactggctgaccgccaagctggcctacgagggcctgagcaagacctacctgtccaagacactggcccagtacacctccaagacatgcagcaactgtgggtttaccatcaccagcgccgactacgacagggtgctggagaagctgaagaagacagcaacaggctggatgaccacaattaacggcaaggagctgaaggtggagggccagattacctactacaacagatacaagagacagaacgtagtcaaggacctgtccgtcgagctggatagactgagcgaagaatctgtgaacaacgacatctcctcctggacaaagggcagaagcggagaagctctgagcctcctgaagaaaagattctcccatagacccgtgcaggagaagttcgtgtgcctgaactgcggcttcgagacacacgcagccgagcaagccgccctgaacatcgccagatcctggctgttcctgcggagccaggagtacaagaaataccagacaaacaagacaaccggcaacaccgataagagagccttcgtcgagacctggcagtccttttaccggaagaagcttaaggaggtgtggaaacctgccgtgcggtctggcggatctggcggaggctccacaagcagccccgagagcgtggccttcgaggacgtggccgtgtacttcaccaagaaggagtgggccagcctgctgcccgcccagagggccctgtacaaggaggtgatgctggagaactacggcatggtggccagcctggcccccccccccatcagcaagcccgccctgatcagccagctggagcagggcaaggagccctggttcaccaggccccagggcgccctgaacaggagggccaggagggtggtgaccagccccaagaaaaagagaaaagtctaagctgccttctgcggggcttgccttctggccatgcccttcttctctcccttgcacctgtacctcttggtctttgaataaagcctgagtaggaaggctagcaaaaaaaaaaaaaaaaaaaaaaaaaaaaaaaaaaaaaaaaaaaaaaaaaaaaaaaaaaaaaaaaaaaaaaaaaaaaaaaa

SEQ ID NO: 6783 - RNA, 5797 nt, synthetic construct
  source 1..5797: mol_type = other RNA
aggaaataagagagaaaagaagagtaagaagaaatataagagccaccatggcccctaagaagaagcgtaaagtgagccggatggaacgcctcgtctacgaggtgcggcagaagtgcagaaacatcgaggacatctgcatctcctgcggatctctgaacgtgaccctggagcacccactgttcatcggcggcatgtgccagaactgtaaaaactgttttctggagtgtgcctatcaatacgacgatgacggctaccagagctactgcaccatctgttgcggcggaagagaggtgctgatgtgtggaaataacaactgctgccggtgcttctgcgtggaatgcgtggacctgctggtgggccccggcgccgcccaggccgctattaaggaagatccttggaactgctacatgtgcggccacaagggcacatacggcctgctgagacggagagaggactggcctagcagactgcagatgttcttcgccaataaccacgaccaggagttcgacccccctaaggtgtaccctcccgtccccgccgagaagagaaagcccatccgggtcctgagcctgttcgatggcatcgccaccggtctgctggtgctgaaggacctgggcatccaggtggataggtacattgcctccgaggtgtgcgaggactccatcaccgtgggaatggtgcgtcatcagggcaagatcatgtacgtgggcgacgtgcggagcgtgacacagaagcatatccaggagtggggccctttcgacctggtgatcggcggcagcccttgcaatgacctgagcatcgtgaacccagcccggaagggcctgtacgagggaaccggcagactgttcttcgagttttacagactgctgcacgacgcccggcctaaggaaggcgacgaccggcccttcttttggctgttcgagaatgtggtggccatgggagtcagcgacaagcgggatattagccggttcctggagagcaaccccgtgatgatcgatgccaaggaagtgagcgccgcccaccgggccagatacttctggggcaatctgcctggcatgaacagacccctggccagcaccgtgaacgacaagctggagctgcaggagtgcctggagcacggccggatcgccaagttcagcaaggtgagaaccatcaccacccgaagcaacagcatcaaacaaggcaaggaccagcactttcctgtgttcatgaacgagaaggaggacatcctgtggtgtaccgagatggagagagtgttcgggttcccagtccactacacagatgtcagcaacatgtctagactggccagacagagactgctgggaagaagctggtccgtccctgtgatcagacacctgttcgcccctctgaaggagtacttcgcctgcgtgagcagcggcaacagcaacgccaacagccggggccccagcttctctagcggcctggtgccactgtccctgagagggagccacatgggccccatggagatctacaaaaccgtgagcgcctggaagcggcagcctgtgcgcgtgctgagcctgtttcggaatatcgataaagtcctgaaaagcctgggattcctggagagcggctctggctccggcggtggcaccctgaagtacgtggaggatgtgacaaacgtggtcagacgggatgtggagaagtggggccccttcgatctggtgtacggcagcacccaacccctgggcagctcttgtgaccggtgccctggctggtacatgtttcagttccaccggatcctgcagtacgccctgccgagacaggagtcccagcggccattcttttggattttcatggacaacttgctgctgaccgaggatgaccaggaaactaccactcggttcctgcagaccgaagccgtgaccctgcaggacgtgagaggccgggactaccagaacgccatgcgggtgtggtccaacatccctggactgaaaagcaagcacgcacctctgacccctaaagaagaggagtacctgcaggcccaggtgcggagcagaagcaagctggacgcccctaaggtggatctgctggtgaagaattgcctcctgcccctgagagagtacttcaagtatttcagccagaatagtctgcccctgggcggcccaagcagcggcgcccctcctcccagcggcggcagcccagccggctccccaacctctaccgaggagggcacctctgagtccgccacccccgagagcggccctggcacctccaccgagcccagcgagggcagcgcacccggcagccctgccggcagccccacctccacagaggagggaaccagcaccgagcccagcgaaggcagcgccccaggcaccagcaccgagcctagtgagggcggctctggcggcggcagcgcccaggagattaaacggatcaacaagatcagaagaagacttgtgaaagacagcaacaccaagaaggccggcaagacaggccccatgaaaaccctgctggttagagtgatgacacccgatctgagagagcggctggaaaacctgagaaagaagcctgaaaatatcccccagcccatcagcaatacatctagagccaacctgaataagctgctgaccgattacaccgaaatgaagaaggcgatcctgcatgtgtactgggaagagttccagaaggaccctgtgggcctgatgagccgggtggcccagcctgccagcaagaagatcgatcagaacaagctgaaacctgagatggacgagaagggcaacctgaccaccgccggctttgcctgctctcagtgtggccagcccctgttcgtgtacaagctggagcaggtgtctgagaagggcaaggcttacaccaactacttcggacggtgcaatgtggccgagcacgaaaagctgatcctgctggcccagctgaagcccgagaaggatagcgacgaagccgtgacatatagcctgggaaagtttgggcagagggccctggatttctacagcattcatgtgaccaaggagtccacccaccccgtgaagcccctggcccagatcgccggaaacagatacgcctccggacctgtgggaaaggccctgagcgacgcatgtatgggcacaatcgcctccttcctgtctaagtaccaggacatcatcatcgaacaccagaaggtggtgaagggcaaccagaagagactggagagcctgcgggagctggccggcaaggaaaacctggaataccctagcgtgaccctgccacctcagcctcacaccaaggagggcgttgatgcctacaacgaagtgatcgcccgggtgcgaatgtgggtgaacctgaacctgtggcagaagctgaagctaagcagagatgatgccaagcctctgctgagactgaagggattcccttcctttcctctggtcgagagacaggccaacgaagtggactggtgggacatggtgtgtaacgtgaagaagctgatcaacgagaaaaaggaggatggcaaggtgttttggcagaatctggctggctacaagagacaggaagccctgagaccatacctgagcagcgaggaagatcggaagaagggaaagaaattcgctcggtaccagctgggcgacctgctgctgcacctggaaaagaagcacggcgaggactggggaaaggtgtacgacgaggcctgggagcggattgacaagaaagtggaaggcctgagcaagcacatcaagctggaagaggaacggagaagcgaggacgcccagagcaaggccgccctgaccgactggctgcgggctaaggccagcttcgtgatcgagggcctgaaggaggccgacaaggacgagttctgcagatgcgagctgaagctgcagaagtggtacggggacctgcggggaaagcccttcgccatcgaagccgagaacagcatcctggacatcagcggcttcagcaagcagtacaactgtgccttcatctggcagaaggacggcgtgaagaagctgaacctgtacctgatcatcaactacttcaagggcggcaagctgcggttcaagaagatcaaacctgaagccttcgaagccaacagattctacaccgtgatcaacaaaaagagcggcgagatcgtgcccatggaggtgaacttcaacttcgacgaccccaacctgatcatcctgcctctggcctttggcaagagacagggcagagaattcatctggaacgacctgctgtccctggaaaccggcagcctgaagctggccaacggaagagtgatcgagaagacactgtacaacagaagaacccggcaggatgagcctgccctgttcgtggccctgaccttcgagcggcgggaggtcctggactcctccaatatcaaaccaatgaacctgatcggcgtggcaagaggcgaaaacatccccgccgtgatcgccctgaccgaccccgagggctgcccactgagccggtttaaggatagcctgggaaacccaacccacatcctgagaatcggcgagagctataaggagaagcagcggaccatccaggccaagaaggaggtggagcagcggagagccggcggctacagccggaagtacgccagcaaagccaagaatctggcagacgatatggtgagaaacaccgctagagatctgctgtactacgccgtgacccaggatgccatgctgatcttcgccaacctgagccggggcttcggccggcagggcaagcggaccttcatggccgagagacagtacacacggatggaggactggctgaccgccaagctggcctacgagggcctgagcaagacctacctgtccaagacactggcccagtacacctccaagacatgcagcaactgtgggtttaccatcaccagcgccgactacgacagggtgctggagaagctgaagaagacagcaacaggctggatgaccacaattaacggcaaggagctgaaggtggagggccagattacctactacaacagatacaagagacagaacgtagtcaaggacctgtccgtcgagctggatagactgagcgaagaatctgtgaacaacgacatctcctcctggacaaagggcagaagcggagaagctctgagcctcctgaagaaaagattctcccatagacccgtgcaggagaagttcgtgtgcctgaactgcggcttcgagacacacgcagccgagcaagccgccctgaacatcgccagatcctggctgttcctgcggagccaggagtacaagaaataccagacaaacaagacaaccggcaacaccgataagagagccttcgtcgagacctggcagtccttttaccggaagaagcttaaggaggtgtggaaacctgccgtgcggtctggcggatctggcggaggctccacaagcccccaggagcccgtgaccttcgaggacgtggccgtgtacttcacccagaaccagtgggccagcctggaccccatgcagagggccctgtacagggaggtgatgctggagaactacgccagcgtggccagcctggccttccccttccccaagcccgacctggtgagccagctggagaggggcgaggccccctggagccccgacccctgggaggccgaggtgctgaagggcacctgccccggcggcaccagccccaagaaaaagagaaaagtctaagctgccttctgcggggcttgccttctggccatgcccttcttctctcccttgcacctgtacctcttggtctttgaataaagcctgagtaggaaggctagcaaaaaaaaaaaaaaaaaaaaaaaaaaaaaaaaaaaaaaaaaaaaaaaaaaaaaaaaaaaaaaaaaaaaaaaaaaaaaaaa

SEQ ID NO: 6784 - RNA, 5797 nt, synthetic construct
  source 1..5797: mol_type = other RNA
aggaaataagagagaaaagaagagtaagaagaaatataagagccaccatggcccctaagaagaagcgtaaagtgagccggatggaacgcctcgtctacgaggtgcggcagaagtgcagaaacatcgaggacatctgcatctcctgcggatctctgaacgtgaccctggagcacccactgttcatcggcggcatgtgccagaactgtaaaaactgttttctggagtgtgcctatcaatacgacgatgacggctaccagagctactgcaccatctgttgcggcggaagagaggtgctgatgtgtggaaataacaactgctgccggtgcttctgcgtggaatgcgtggacctgctggtgggccccggcgccgcccaggccgctattaaggaagatccttggaactgctacatgtgcggccacaagggcacatacggcctgctgagacggagagaggactggcctagcagactgcagatgttcttcgccaataaccacgaccaggagttcgacccccctaaggtgtaccctcccgtccccgccgagaagagaaagcccatccgggtcctgagcctgttcgatggcatcgccaccggtctgctggtgctgaaggacctgggcatccaggtggataggtacattgcctccgaggtgtgcgaggactccatcaccgtgggaatggtgcgtcatcagggcaagatcatgtacgtgggcgacgtgcggagcgtgacacagaagcatatccaggagtggggccctttcgacctggtgatcggcggcagcccttgcaatgacctgagcatcgtgaacccagcccggaagggcctgtacgagggaaccggcagactgttcttcgagttttacagactgctgcacgacgcccggcctaaggaaggcgacgaccggcccttcttttggctgttcgagaatgtggtggccatgggagtcagcgacaagcgggatattagccggttcctggagagcaaccccgtgatgatcgatgccaaggaagtgagcgccgcccaccgggccagatacttctggggcaatctgcctggcatgaacagacccctggccagcaccgtgaacgacaagctggagctgcaggagtgcctggagcacggccggatcgccaagttcagcaaggtgagaaccatcaccacccgaagcaacagcatcaaacaaggcaaggaccagcactttcctgtgttcatgaacgagaaggaggacatcctgtggtgtaccgagatggagagagtgttcgggttcccagtccactacacagatgtcagcaacatgtctagactggccagacagagactgctgggaagaagctggtccgtccctgtgatcagacacctgttcgcccctctgaaggagtacttcgcctgcgtgagcagcggcaacagcaacgccaacagccggggccccagcttctctagcggcctggtgccactgtccctgagagggagccacatgggccccatggagatctacaaaaccgtgagcgcctggaagcggcagcctgtgcgcgtgctgagcctgtttcggaatatcgataaagtcctgaaaagcctgggattcctggagagcggctctggctccggcggtggcaccctgaagtacgtggaggatgtgacaaacgtggtcagacgggatgtggagaagtggggccccttcgatctggtgtacggcagcacccaacccctgggcagctcttgtgaccggtgccctggctggtacatgtttcagttccaccggatcctgcagtacgccctgccgagacaggagtcccagcggccattcttttggattttcatggacaacttgctgctgaccgaggatgaccaggaaactaccactcggttcctgcagaccgaagccgtgaccctgcaggacgtgagaggccgggactaccagaacgccatgcgggtgtggtccaacatccctggactgaaaagcaagcacgcacctctgacccctaaagaagaggagtacctgcaggcccaggtgcggagcagaagcaagctggacgcccctaaggtggatctgctggtgaagaattgcctcctgcccctgagagagtacttcaagtatttcagccagaatagtctgcccctgggcggcccaagcagcggcgcccctcctcccagcggcggcagcccagccggctccccaacctctaccgaggagggcacctctgagtccgccacccccgagagcggccctggcacctccaccgagcccagcgagggcagcgcacccggcagccctgccggcagccccacctccacagaggagggaaccagcaccgagcccagcgaaggcagcgccccaggcaccagcaccgagcctagtgagggcggctctggcggcggcagcgcccaggagattaaacggatcaacaagatcagaagaagacttgtgaaagacagcaacaccaagaaggccggcaagacaggccccatgaaaaccctgctggttagagtgatgacacccgatctgagagagcggctggaaaacctgagaaagaagcctgaaaatatcccccagcccatcagcaatacatctagagccaacctgaataagctgctgaccgattacaccgaaatgaagaaggcgatcctgcatgtgtactgggaagagttccagaaggaccctgtgggcctgatgagccgggtggcccagcctgccagcaagaagatcgatcagaacaagctgaaacctgagatggacgagaagggcaacctgaccaccgccggctttgcctgctctcagtgtggccagcccctgttcgtgtacaagctggagcaggtgtctgagaagggcaaggcttacaccaactacttcggacggtgcaatgtggccgagcacgaaaagctgatcctgctggcccagctgaagcccgagaaggatagcgacgaagccgtgacatatagcctgggaaagtttgggcagagggccctggatttctacagcattcatgtgaccaaggagtccacccaccccgtgaagcccctggcccagatcgccggaaacagatacgcctccggacctgtgggaaaggccctgagcgacgcatgtatgggcacaatcgcctccttcctgtctaagtaccaggacatcatcatcgaacaccagaaggtggtgaagggcaaccagaagagactggagagcctgcgggagctggccggcaaggaaaacctggaataccctagcgtgaccctgccacctcagcctcacaccaaggagggcgttgatgcctacaacgaagtgatcgcccgggtgcgaatgtgggtgaacctgaacctgtggcagaagctgaagctaagcagagatgatgccaagcctctgctgagactgaagggattcccttcctttcctctggtcgagagacaggccaacgaagtggactggtgggacatggtgtgtaacgtgaagaagctgatcaacgagaaaaaggaggatggcaaggtgttttggcagaatctggctggctacaagagacaggaagccctgagaccatacctgagcagcgaggaagatcggaagaagggaaagaaattcgctcggtaccagctgggcgacctgctgctgcacctggaaaagaagcacggcgaggactggggaaaggtgtacgacgaggcctgggagcggattgacaagaaagtggaaggcctgagcaagcacatcaagctggaagaggaacggagaagcgaggacgcccagagcaaggccgccctgaccgactggctgcgggctaaggccagcttcgtgatcgagggcctgaaggaggccgacaaggacgagttctgcagatgcgagctgaagctgcagaagtggtacggggacctgcggggaaagcccttcgccatcgaagccgagaacagcatcctggacatcagcggcttcagcaagcagtacaactgtgccttcatctggcagaaggacggcgtgaagaagctgaacctgtacctgatcatcaactacttcaagggcggcaagctgcggttcaagaagatcaaacctgaagccttcgaagccaacagattctacaccgtgatcaacaaaaagagcggcgagatcgtgcccatggaggtgaacttcaacttcgacgaccccaacctgatcatcctgcctctggcctttggcaagagacagggcagagaattcatctggaacgacctgctgtccctggaaaccggcagcctgaagctggccaacggaagagtgatcgagaagacactgtacaacagaagaacccggcaggatgagcctgccctgttcgtggccctgaccttcgagcggcgggaggtcctggactcctccaatatcaaaccaatgaacctgatcggcgtggcaagaggcgaaaacatccccgccgtgatcgccctgaccgaccccgagggctgcccactgagccggtttaaggatagcctgggaaacccaacccacatcctgagaatcggcgagagctataaggagaagcagcggaccatccaggccaagaaggaggtggagcagcggagagccggcggctacagccggaagtacgccagcaaagccaagaatctggcagacgatatggtgagaaacaccgctagagatctgctgtactacgccgtgacccaggatgccatgctgatcttcgccaacctgagccggggcttcggccggcagggcaagcggaccttcatggccgagagacagtacacacggatggaggactggctgaccgccaagctggcctacgagggcctgagcaagacctacctgtccaagacactggcccagtacacctccaagacatgcagcaactgtgggtttaccatcaccagcgccgactacgacagggtgctggagaagctgaagaagacagcaacaggctggatgaccacaattaacggcaaggagctgaaggtggagggccagattacctactacaacagatacaagagacagaacgtagtcaaggacctgtccgtcgagctggatagactgagcgaagaatctgtgaacaacgacatctcctcctggacaaagggcagaagcggagaagctctgagcctcctgaagaaaagattctcccatagacccgtgcaggagaagttcgtgtgcctgaactgcggcttcgagacacacgcagccgagcaagccgccctgaacatcgccagatcctggctgttcctgcggagccaggagtacaagaaataccagacaaacaagacaaccggcaacaccgataagagagccttcgtcgagacctggcagtccttttaccggaagaagcttaaggaggtgtggaaacctgccgtgcggtctggcggatctggcggaggctccacaagccccagggtgagcctgaccttcgaggacgtggccgtgctgttcaccagggacgagtggaggaagctgggccccagcgagaggaacctgtaccaggacgtgatgctggagaactacagcaacctggtgagcctgggcctgctgttcagcaagcccaaggtgatcagcctgctgcagcagggcgaggacccctggaaggtggagaaggagagccccggcggccccagcctgggctacaagagcagcaccagccccaagaaaaagagaaaagtctaagctgccttctgcggggcttgccttctggccatgcccttcttctctcccttgcacctgtacctcttggtctttgaataaagcctgagtaggaaggctagcaaaaaaaaaaaaaaaaaaaaaaaaaaaaaaaaaaaaaaaaaaaaaaaaaaaaaaaaaaaaaaaaaaaaaaaaaaaaaaaa

SEQ ID NO: 6785 - RNA, 5797 nt, synthetic construct
  source 1..5797: mol_type = other RNA
aggaaataagagagaaaagaagagtaagaagaaatataagagccaccatggcccctaagaagaagcgtaaagtgagccggatggaacgcctcgtctacgaggtgcggcagaagtgcagaaacatcgaggacatctgcatctcctgcggatctctgaacgtgaccctggagcacccactgttcatcggcggcatgtgccagaactgtaaaaactgttttctggagtgtgcctatcaatacgacgatgacggctaccagagctactgcaccatctgttgcggcggaagagaggtgctgatgtgtggaaataacaactgctgccggtgcttctgcgtggaatgcgtggacctgctggtgggccccggcgccgcccaggccgctattaaggaagatccttggaactgctacatgtgcggccacaagggcacatacggcctgctgagacggagagaggactggcctagcagactgcagatgttcttcgccaataaccacgaccaggagttcgacccccctaaggtgtaccctcccgtccccgccgagaagagaaagcccatccgggtcctgagcctgttcgatggcatcgccaccggtctgctggtgctgaaggacctgggcatccaggtggataggtacattgcctccgaggtgtgcgaggactccatcaccgtgggaatggtgcgtcatcagggcaagatcatgtacgtgggcgacgtgcggagcgtgacacagaagcatatccaggagtggggccctttcgacctggtgatcggcggcagcccttgcaatgacctgagcatcgtgaacccagcccggaagggcctgtacgagggaaccggcagactgttcttcgagttttacagactgctgcacgacgcccggcctaaggaaggcgacgaccggcccttcttttggctgttcgagaatgtggtggccatgggagtcagcgacaagcgggatattagccggttcctggagagcaaccccgtgatgatcgatgccaaggaagtgagcgccgcccaccgggccagatacttctggggcaatctgcctggcatgaacagacccctggccagcaccgtgaacgacaagctggagctgcaggagtgcctggagcacggccggatcgccaagttcagcaaggtgagaaccatcaccacccgaagcaacagcatcaaacaaggcaaggaccagcactttcctgtgttcatgaacgagaaggaggacatcctgtggtgtaccgagatggagagagtgttcgggttcccagtccactacacagatgtcagcaacatgtctagactggccagacagagactgctgggaagaagctggtccgtccctgtgatcagacacctgttcgcccctctgaaggagtacttcgcctgcgtgagcagcggcaacagcaacgccaacagccggggccccagcttctctagcggcctggtgccactgtccctgagagggagccacatgggccccatggagatctacaaaaccgtgagcgcctggaagcggcagcctgtgcgcgtgctgagcctgtttcggaatatcgataaagtcctgaaaagcctgggattcctggagagcggctctggctccggcggtggcaccctgaagtacgtggaggatgtgacaaacgtggtcagacgggatgtggagaagtggggccccttcgatctggtgtacggcagcacccaacccctgggcagctcttgtgaccggtgccctggctggtacatgtttcagttccaccggatcctgcagtacgccctgccgagacaggagtcccagcggccattcttttggattttcatggacaacttgctgctgaccgaggatgaccaggaaactaccactcggttcctgcagaccgaagccgtgaccctgcaggacgtgagaggccgggactaccagaacgccatgcgggtgtggtccaacatccctggactgaaaagcaagcacgcacctctgacccctaaagaagaggagtacctgcaggcccaggtgcggagcagaagcaagctggacgcccctaaggtggatctgctggtgaagaattgcctcctgcccctgagagagtacttcaagtatttcagccagaatagtctgcccctgggcggcccaagcagcggcgcccctcctcccagcggcggcagcccagccggctccccaacctctaccgaggagggcacctctgagtccgccacccccgagagcggccctggcacctccaccgagcccagcgagggcagcgcacccggcagccctgccggcagccccacctccacagaggagggaaccagcaccgagcccagcgaaggcagcgccccaggcaccagcaccgagcctagtgagggcggctctggcggcggcagcgcccaggagattaaacggatcaacaagatcagaagaagacttgtgaaagacagcaacaccaagaaggccggcaagacaggccccatgaaaaccctgctggttagagtgatgacacccgatctgagagagcggctggaaaacctgagaaagaagcctgaaaatatcccccagcccatcagcaatacatctagagccaacctgaataagctgctgaccgattacaccgaaatgaagaaggcgatcctgcatgtgtactgggaagagttccagaaggaccctgtgggcctgatgagccgggtggcccagcctgccagcaagaagatcgatcagaacaagctgaaacctgagatggacgagaagggcaacctgaccaccgccggctttgcctgctctcagtgtggccagcccctgttcgtgtacaagctggagcaggtgtctgagaagggcaaggcttacaccaactacttcggacggtgcaatgtggccgagcacgaaaagctgatcctgctggcccagctgaagcccgagaaggatagcgacgaagccgtgacatatagcctgggaaagtttgggcagagggccctggatttctacagcattcatgtgaccaaggagtccacccaccccgtgaagcccctggcccagatcgccggaaacagatacgcctccggacctgtgggaaaggccctgagcgacgcatgtatgggcacaatcgcctccttcctgtctaagtaccaggacatcatcatcgaacaccagaaggtggtgaagggcaaccagaagagactggagagcctgcgggagctggccggcaaggaaaacctggaataccctagcgtgaccctgccacctcagcctcacaccaaggagggcgttgatgcctacaacgaagtgatcgcccgggtgcgaatgtgggtgaacctgaacctgtggcagaagctgaagctaagcagagatgatgccaagcctctgctgagactgaagggattcccttcctttcctctggtcgagagacaggccaacgaagtggactggtgggacatggtgtgtaacgtgaagaagctgatcaacgagaaaaaggaggatggcaaggtgttttggcagaatctggctggctacaagagacaggaagccctgagaccatacctgagcagcgaggaagatcggaagaagggaaagaaattcgctcggtaccagctgggcgacctgctgctgcacctggaaaagaagcacggcgaggactggggaaaggtgtacgacgaggcctgggagcggattgacaagaaagtggaaggcctgagcaagcacatcaagctggaagaggaacggagaagcgaggacgcccagagcaaggccgccctgaccgactggctgcgggctaaggccagcttcgtgatcgagggcctgaaggaggccgacaaggacgagttctgcagatgcgagctgaagctgcagaagtggtacggggacctgcggggaaagcccttcgccatcgaagccgagaacagcatcctggacatcagcggcttcagcaagcagtacaactgtgccttcatctggcagaaggacggcgtgaagaagctgaacctgtacctgatcatcaactacttcaagggcggcaagctgcggttcaagaagatcaaacctgaagccttcgaagccaacagattctacaccgtgatcaacaaaaagagcggcgagatcgtgcccatggaggtgaacttcaacttcgacgaccccaacctgatcatcctgcctctggcctttggcaagagacagggcagagaattcatctggaacgacctgctgtccctggaaaccggcagcctgaagctggccaacggaagagtgatcgagaagacactgtacaacagaagaacccggcaggatgagcctgccctgttcgtggccctgaccttcgagcggcgggaggtcctggactcctccaatatcaaaccaatgaacctgatcggcgtggcaagaggcgaaaacatccccgccgtgatcgccctgaccgaccccgagggctgcccactgagccggtttaaggatagcctgggaaacccaacccacatcctgagaatcggcgagagctataaggagaagcagcggaccatccaggccaagaaggaggtggagcagcggagagccggcggctacagccggaagtacgccagcaaagccaagaatctggcagacgatatggtgagaaacaccgctagagatctgctgtactacgccgtgacccaggatgccatgctgatcttcgccaacctgagccggggcttcggccggcagggcaagcggaccttcatggccgagagacagtacacacggatggaggactggctgaccgccaagctggcctacgagggcctgagcaagacctacctgtccaagacactggcccagtacacctccaagacatgcagcaactgtgggtttaccatcaccagcgccgactacgacagggtgctggagaagctgaagaagacagcaacaggctggatgaccacaattaacggcaaggagctgaaggtggagggccagattacctactacaacagatacaagagacagaacgtagtcaaggacctgtccgtcgagctggatagactgagcgaagaatctgtgaacaacgacatctcctcctggacaaagggcagaagcggagaagctctgagcctcctgaagaaaagattctcccatagacccgtgcaggagaagttcgtgtgcctgaactgcggcttcgagacacacgcagccgagcaagccgccctgaacatcgccagatcctggctgttcctgcggagccaggagtacaagaaataccagacaaacaagacaaccggcaacaccgataagagagccttcgtcgagacctggcagtccttttaccggaagaagcttaaggaggtgtggaaacctgccgtgcggtctggcggatctggcggaggctccacaagctaccagacccccgtgagcttcaaggacgtggtggtgggcttcacccaggaggagtggcacaggctgagccccgcccagagggccctgtacagggacgtgatgctggagacctacagcaacctggtgagcgtgggctacgagggcaccaagcccgacgtgatcctgaggctggagcaggaggaggccccctggatcggcggcgccgccaggcccggctgccactgctgggaggacatctggcagaccagccccaagaaaaagagaaaagtctaagctgccttctgcggggcttgccttctggccatgcccttcttctctcccttgcacctgtacctcttggtctttgaataaagcctgagtaggaaggctagcaaaaaaaaaaaaaaaaaaaaaaaaaaaaaaaaaaaaaaaaaaaaaaaaaaaaaaaaaaaaaaaaaaaaaaaaaaaaaaaa

SEQ ID NO: 6786 - RNA, 5797 nt, synthetic construct
  source 1..5797: mol_type = other RNA
aggaaataagagagaaaagaagagtaagaagaaatataagagccaccatggcccctaagaagaagcgtaaagtgagccggatggaacgcctcgtctacgaggtgcggcagaagtgcagaaacatcgaggacatctgcatctcctgcggatctctgaacgtgaccctggagcacccactgttcatcggcggcatgtgccagaactgtaaaaactgttttctggagtgtgcctatcaatacgacgatgacggctaccagagctactgcaccatctgttgcggcggaagagaggtgctgatgtgtggaaataacaactgctgccggtgcttctgcgtggaatgcgtggacctgctggtgggccccggcgccgcccaggccgctattaaggaagatccttggaactgctacatgtgcggccacaagggcacatacggcctgctgagacggagagaggactggcctagcagactgcagatgttcttcgccaataaccacgaccaggagttcgacccccctaaggtgtaccctcccgtccccgccgagaagagaaagcccatccgggtcctgagcctgttcgatggcatcgccaccggtctgctggtgctgaaggacctgggcatccaggtggataggtacattgcctccgaggtgtgcgaggactccatcaccgtgggaatggtgcgtcatcagggcaagatcatgtacgtgggcgacgtgcggagcgtgacacagaagcatatccaggagtggggccctttcgacctggtgatcggcggcagcccttgcaatgacctgagcatcgtgaacccagcccggaagggcctgtacgagggaaccggcagactgttcttcgagttttacagactgctgcacgacgcccggcctaaggaaggcgacgaccggcccttcttttggctgttcgagaatgtggtggccatgggagtcagcgacaagcgggatattagccggttcctggagagcaaccccgtgatgatcgatgccaaggaagtgagcgccgcccaccgggccagatacttctggggcaatctgcctggcatgaacagacccctggccagcaccgtgaacgacaagctggagctgcaggagtgcctggagcacggccggatcgccaagttcagcaaggtgagaaccatcaccacccgaagcaacagcatcaaacaaggcaaggaccagcactttcctgtgttcatgaacgagaaggaggacatcctgtggtgtaccgagatggagagagtgttcgggttcccagtccactacacagatgtcagcaacatgtctagactggccagacagagactgctgggaagaagctggtccgtccctgtgatcagacacctgttcgcccctctgaaggagtacttcgcctgcgtgagcagcggcaacagcaacgccaacagccggggccccagcttctctagcggcctggtgccactgtccctgagagggagccacatgggccccatggagatctacaaaaccgtgagcgcctggaagcggcagcctgtgcgcgtgctgagcctgtttcggaatatcgataaagtcctgaaaagcctgggattcctggagagcggctctggctccggcggtggcaccctgaagtacgtggaggatgtgacaaacgtggtcagacgggatgtggagaagtggggccccttcgatctggtgtacggcagcacccaacccctgggcagctcttgtgaccggtgccctggctggtacatgtttcagttccaccggatcctgcagtacgccctgccgagacaggagtcccagcggccattcttttggattttcatggacaacttgctgctgaccgaggatgaccaggaaactaccactcggttcctgcagaccgaagccgtgaccctgcaggacgtgagaggccgggactaccagaacgccatgcgggtgtggtccaacatccctggactgaaaagcaagcacgcacctctgacccctaaagaagaggagtacctgcaggcccaggtgcggagcagaagcaagctggacgcccctaaggtggatctgctggtgaagaattgcctcctgcccctgagagagtacttcaagtatttcagccagaatagtctgcccctgggcggcccaagcagcggcgcccctcctcccagcggcggcagcccagccggctccccaacctctaccgaggagggcacctctgagtccgccacccccgagagcggccctggcacctccaccgagcccagcgagggcagcgcacccggcagccctgccggcagccccacctccacagaggagggaaccagcaccgagcccagcgaaggcagcgccccaggcaccagcaccgagcctagtgagggcggctctggcggcggcagcgcccaggagattaaacggatcaacaagatcagaagaagacttgtgaaagacagcaacaccaagaaggccggcaagacaggccccatgaaaaccctgctggttagagtgatgacacccgatctgagagagcggctggaaaacctgagaaagaagcctgaaaatatcccccagcccatcagcaatacatctagagccaacctgaataagctgctgaccgattacaccgaaatgaagaaggcgatcctgcatgtgtactgggaagagttccagaaggaccctgtgggcctgatgagccgggtggcccagcctgccagcaagaagatcgatcagaacaagctgaaacctgagatggacgagaagggcaacctgaccaccgccggctttgcctgctctcagtgtggccagcccctgttcgtgtacaagctggagcaggtgtctgagaagggcaaggcttacaccaactacttcggacggtgcaatgtggccgagcacgaaaagctgatcctgctggcccagctgaagcccgagaaggatagcgacgaagccgtgacatatagcctgggaaagtttgggcagagggccctggatttctacagcattcatgtgaccaaggagtccacccaccccgtgaagcccctggcccagatcgccggaaacagatacgcctccggacctgtgggaaaggccctgagcgacgcatgtatgggcacaatcgcctccttcctgtctaagtaccaggacatcatcatcgaacaccagaaggtggtgaagggcaaccagaagagactggagagcctgcgggagctggccggcaaggaaaacctggaataccctagcgtgaccctgccacctcagcctcacaccaaggagggcgttgatgcctacaacgaagtgatcgcccgggtgcgaatgtgggtgaacctgaacctgtggcagaagctgaagctaagcagagatgatgccaagcctctgctgagactgaagggattcccttcctttcctctggtcgagagacaggccaacgaagtggactggtgggacatggtgtgtaacgtgaagaagctgatcaacgagaaaaaggaggatggcaaggtgttttggcagaatctggctggctacaagagacaggaagccctgagaccatacctgagcagcgaggaagatcggaagaagggaaagaaattcgctcggtaccagctgggcgacctgctgctgcacctggaaaagaagcacggcgaggactggggaaaggtgtacgacgaggcctgggagcggattgacaagaaagtggaaggcctgagcaagcacatcaagctggaagaggaacggagaagcgaggacgcccagagcaaggccgccctgaccgactggctgcgggctaaggccagcttcgtgatcgagggcctgaaggaggccgacaaggacgagttctgcagatgcgagctgaagctgcagaagtggtacggggacctgcggggaaagcccttcgccatcgaagccgagaacagcatcctggacatcagcggcttcagcaagcagtacaactgtgccttcatctggcagaaggacggcgtgaagaagctgaacctgtacctgatcatcaactacttcaagggcggcaagctgcggttcaagaagatcaaacctgaagccttcgaagccaacagattctacaccgtgatcaacaaaaagagcggcgagatcgtgcccatggaggtgaacttcaacttcgacgaccccaacctgatcatcctgcctctggcctttggcaagagacagggcagagaattcatctggaacgacctgctgtccctggaaaccggcagcctgaagctggccaacggaagagtgatcgagaagacactgtacaacagaagaacccggcaggatgagcctgccctgttcgtggccctgaccttcgagcggcgggaggtcctggactcctccaatatcaaaccaatgaacctgatcggcgtggcaagaggcgaaaacatccccgccgtgatcgccctgaccgaccccgagggctgcccactgagccggtttaaggatagcctgggaaacccaacccacatcctgagaatcggcgagagctataaggagaagcagcggaccatccaggccaagaaggaggtggagcagcggagagccggcggctacagccggaagtacgccagcaaagccaagaatctggcagacgatatggtgagaaacaccgctagagatctgctgtactacgccgtgacccaggatgccatgctgatcttcgccaacctgagccggggcttcggccggcagggcaagcggaccttcatggccgagagacagtacacacggatggaggactggctgaccgccaagctggcctacgagggcctgagcaagacctacctgtccaagacactggcccagtacacctccaagacatgcagcaactgtgggtttaccatcaccagcgccgactacgacagggtgctggagaagctgaagaagacagcaacaggctggatgaccacaattaacggcaaggagctgaaggtggagggccagattacctactacaacagatacaagagacagaacgtagtcaaggacctgtccgtcgagctggatagactgagcgaagaatctgtgaacaacgacatctcctcctggacaaagggcagaagcggagaagctctgagcctcctgaagaaaagattctcccatagacccgtgcaggagaagttcgtgtgcctgaactgcggcttcgagacacacgcagccgagcaagccgccctgaacatcgccagatcctggctgttcctgcggagccaggagtacaagaaataccagacaaacaagacaaccggcaacaccgataagagagccttcgtcgagacctggcagtccttttaccggaagaagcttaaggaggtgtggaaacctgccgtgcggtctggcggatctggcggaggctccacaagcatccagggcagcctgaccttcaaggacgtggccatgaacttcacccaggaggagtggtgcctgctggaccacagccagaaggagctgtacctggaggtgatgctggagaacgtgcagaacctgctgagcgtgggcctgcccgtgcccagggagtactacaccagctacttccagcaggagaaggccccctggctgctggtgcagaagggccccaggaacagcagccccgaggccgagaccaacaccagccccaagaaaaagagaaaagtctaagctgccttctgcggggcttgccttctggccatgcccttcttctctcccttgcacctgtacctcttggtctttgaataaagcctgagtaggaaggctagcaaaaaaaaaaaaaaaaaaaaaaaaaaaaaaaaaaaaaaaaaaaaaaaaaaaaaaaaaaaaaaaaaaaaaaaaaaaaaaaa

SEQ ID NO: 6787 - RNA, 5797 nt, synthetic construct
  source 1..5797: mol_type = other RNA
aggaaataagagagaaaagaagagtaagaagaaatataagagccaccatggcccctaagaagaagcgtaaagtgagccggatggaacgcctcgtctacgaggtgcggcagaagtgcagaaacatcgaggacatctgcatctcctgcggatctctgaacgtgaccctggagcacccactgttcatcggcggcatgtgccagaactgtaaaaactgttttctggagtgtgcctatcaatacgacgatgacggctaccagagctactgcaccatctgttgcggcggaagagaggtgctgatgtgtggaaataacaactgctgccggtgcttctgcgtggaatgcgtggacctgctggtgggccccggcgccgcccaggccgctattaaggaagatccttggaactgctacatgtgcggccacaagggcacatacggcctgctgagacggagagaggactggcctagcagactgcagatgttcttcgccaataaccacgaccaggagttcgacccccctaaggtgtaccctcccgtccccgccgagaagagaaagcccatccgggtcctgagcctgttcgatggcatcgccaccggtctgctggtgctgaaggacctgggcatccaggtggataggtacattgcctccgaggtgtgcgaggactccatcaccgtgggaatggtgcgtcatcagggcaagatcatgtacgtgggcgacgtgcggagcgtgacacagaagcatatccaggagtggggccctttcgacctggtgatcggcggcagcccttgcaatgacctgagcatcgtgaacccagcccggaagggcctgtacgagggaaccggcagactgttcttcgagttttacagactgctgcacgacgcccggcctaaggaaggcgacgaccggcccttcttttggctgttcgagaatgtggtggccatgggagtcagcgacaagcgggatattagccggttcctggagagcaaccccgtgatgatcgatgccaaggaagtgagcgccgcccaccgggccagatacttctggggcaatctgcctggcatgaacagacccctggccagcaccgtgaacgacaagctggagctgcaggagtgcctggagcacggccggatcgccaagttcagcaaggtgagaaccatcaccacccgaagcaacagcatcaaacaaggcaaggaccagcactttcctgtgttcatgaacgagaaggaggacatcctgtggtgtaccgagatggagagagtgttcgggttcccagtccactacacagatgtcagcaacatgtctagactggccagacagagactgctgggaagaagctggtccgtccctgtgatcagacacctgttcgcccctctgaaggagtacttcgcctgcgtgagcagcggcaacagcaacgccaacagccggggccccagcttctctagcggcctggtgccactgtccctgagagggagccacatgggccccatggagatctacaaaaccgtgagcgcctggaagcggcagcctgtgcgcgtgctgagcctgtttcggaatatcgataaagtcctgaaaagcctgggattcctggagagcggctctggctccggcggtggcaccctgaagtacgtggaggatgtgacaaacgtggtcagacgggatgtggagaagtggggccccttcgatctggtgtacggcagcacccaacccctgggcagctcttgtgaccggtgccctggctggtacatgtttcagttccaccggatcctgcagtacgccctgccgagacaggagtcccagcggccattcttttggattttcatggacaacttgctgctgaccgaggatgaccaggaaactaccactcggttcctgcagaccgaagccgtgaccctgcaggacgtgagaggccgggactaccagaacgccatgcgggtgtggtccaacatccctggactgaaaagcaagcacgcacctctgacccctaaagaagaggagtacctgcaggcccaggtgcggagcagaagcaagctggacgcccctaaggtggatctgctggtgaagaattgcctcctgcccctgagagagtacttcaagtatttcagccagaatagtctgcccctgggcggcccaagcagcggcgcccctcctcccagcggcggcagcccagccggctccccaacctctaccgaggagggcacctctgagtccgccacccccgagagcggccctggcacctccaccgagcccagcgagggcagcgcacccggcagccctgccggcagccccacctccacagaggagggaaccagcaccgagcccagcgaaggcagcgccccaggcaccagcaccgagcctagtgagggcggctctggcggcggcagcgcccaggagattaaacggatcaacaagatcagaagaagacttgtgaaagacagcaacaccaagaaggccggcaagacaggccccatgaaaaccctgctggttagagtgatgacacccgatctgagagagcggctggaaaacctgagaaagaagcctgaaaatatcccccagcccatcagcaatacatctagagccaacctgaataagctgctgaccgattacaccgaaatgaagaaggcgatcctgcatgtgtactgggaagagttccagaaggaccctgtgggcctgatgagccgggtggcccagcctgccagcaagaagatcgatcagaacaagctgaaacctgagatggacgagaagggcaacctgaccaccgccggctttgcctgctctcagtgtggccagcccctgttcgtgtacaagctggagcaggtgtctgagaagggcaaggcttacaccaactacttcggacggtgcaatgtggccgagcacgaaaagctgatcctgctggcccagctgaagcccgagaaggatagcgacgaagccgtgacatatagcctgggaaagtttgggcagagggccctggatttctacagcattcatgtgaccaaggagtccacccaccccgtgaagcccctggcccagatcgccggaaacagatacgcctccggacctgtgggaaaggccctgagcgacgcatgtatgggcacaatcgcctccttcctgtctaagtaccaggacatcatcatcgaacaccagaaggtggtgaagggcaaccagaagagactggagagcctgcgggagctggccggcaaggaaaacctggaataccctagcgtgaccctgccacctcagcctcacaccaaggagggcgttgatgcctacaacgaagtgatcgcccgggtgcgaatgtgggtgaacctgaacctgtggcagaagctgaagctaagcagagatgatgccaagcctctgctgagactgaagggattcccttcctttcctctggtcgagagacaggccaacgaagtggactggtgggacatggtgtgtaacgtgaagaagctgatcaacgagaaaaaggaggatggcaaggtgttttggcagaatctggctggctacaagagacaggaagccctgagaccatacctgagcagcgaggaagatcggaagaagggaaagaaattcgctcggtaccagctgggcgacctgctgctgcacctggaaaagaagcacggcgaggactggggaaaggtgtacgacgaggcctgggagcggattgacaagaaagtggaaggcctgagcaagcacatcaagctggaagaggaacggagaagcgaggacgcccagagcaaggccgccctgaccgactggctgcgggctaaggccagcttcgtgatcgagggcctgaaggaggccgacaaggacgagttctgcagatgcgagctgaagctgcagaagtggtacggggacctgcggggaaagcccttcgccatcgaagccgagaacagcatcctggacatcagcggcttcagcaagcagtacaactgtgccttcatctggcagaaggacggcgtgaagaagctgaacctgtacctgatcatcaactacttcaagggcggcaagctgcggttcaagaagatcaaacctgaagccttcgaagccaacagattctacaccgtgatcaacaaaaagagcggcgagatcgtgcccatggaggtgaacttcaacttcgacgaccccaacctgatcatcctgcctctggcctttggcaagagacagggcagagaattcatctggaacgacctgctgtccctggaaaccggcagcctgaagctggccaacggaagagtgatcgagaagacactgtacaacagaagaacccggcaggatgagcctgccctgttcgtggccctgaccttcgagcggcgggaggtcctggactcctccaatatcaaaccaatgaacctgatcggcgtggcaagaggcgaaaacatccccgccgtgatcgccctgaccgaccccgagggctgcccactgagccggtttaaggatagcctgggaaacccaacccacatcctgagaatcggcgagagctataaggagaagcagcggaccatccaggccaagaaggaggtggagcagcggagagccggcggctacagccggaagtacgccagcaaagccaagaatctggcagacgatatggtgagaaacaccgctagagatctgctgtactacgccgtgacccaggatgccatgctgatcttcgccaacctgagccggggcttcggccggcagggcaagcggaccttcatggccgagagacagtacacacggatggaggactggctgaccgccaagctggcctacgagggcctgagcaagacctacctgtccaagacactggcccagtacacctccaagacatgcagcaactgtgggtttaccatcaccagcgccgactacgacagggtgctggagaagctgaagaagacagcaacaggctggatgaccacaattaacggcaaggagctgaaggtggagggccagattacctactacaacagatacaagagacagaacgtagtcaaggacctgtccgtcgagctggatagactgagcgaagaatctgtgaacaacgacatctcctcctggacaaagggcagaagcggagaagctctgagcctcctgaagaaaagattctcccatagacccgtgcaggagaagttcgtgtgcctgaactgcggcttcgagacacacgcagccgagcaagccgccctgaacatcgccagatcctggctgttcctgcggagccaggagtacaagaaataccagacaaacaagacaaccggcaacaccgataagagagccttcgtcgagacctggcagtccttttaccggaagaagcttaaggaggtgtggaaacctgccgtgcggtctggcggatctggcggaggctccacaagcatgagcgtgaccttcgaggacgtggccatgtacttcagccccgccgagtgggtgctgctgggcgaggagcagaagcagctgtacaggcacgtgatgtgggagaactaccagaccctggtgagcctgggcatccagatcagcaagcccgtggtgatcagcagcatcgagaggggcgaggagctgtgggcccagagccccaccgaggacgaggacgaggacatcctgagcggcaccagccccggcaccagccccaagaaaaagagaaaagtctaagctgccttctgcggggcttgccttctggccatgcccttcttctctcccttgcacctgtacctcttggtctttgaataaagcctgagtaggaaggctagcaaaaaaaaaaaaaaaaaaaaaaaaaaaaaaaaaaaaaaaaaaaaaaaaaaaaaaaaaaaaaaaaaaaaaaaaaaaaaaaa

SEQ ID NO: 6788 - RNA, 5797 nt, synthetic construct
  source 1..5797: mol_type = other RNA
aggaaataagagagaaaagaagagtaagaagaaatataagagccaccatggcccctaagaagaagcgtaaagtgagccggatggaacgcctcgtctacgaggtgcggcagaagtgcagaaacatcgaggacatctgcatctcctgcggatctctgaacgtgaccctggagcacccactgttcatcggcggcatgtgccagaactgtaaaaactgttttctggagtgtgcctatcaatacgacgatgacggctaccagagctactgcaccatctgttgcggcggaagagaggtgctgatgtgtggaaataacaactgctgccggtgcttctgcgtggaatgcgtggacctgctggtgggccccggcgccgcccaggccgctattaaggaagatccttggaactgctacatgtgcggccacaagggcacatacggcctgctgagacggagagaggactggcctagcagactgcagatgttcttcgccaataaccacgaccaggagttcgacccccctaaggtgtaccctcccgtccccgccgagaagagaaagcccatccgggtcctgagcctgttcgatggcatcgccaccggtctgctggtgctgaaggacctgggcatccaggtggataggtacattgcctccgaggtgtgcgaggactccatcaccgtgggaatggtgcgtcatcagggcaagatcatgtacgtgggcgacgtgcggagcgtgacacagaagcatatccaggagtggggccctttcgacctggtgatcggcggcagcccttgcaatgacctgagcatcgtgaacccagcccggaagggcctgtacgagggaaccggcagactgttcttcgagttttacagactgctgcacgacgcccggcctaaggaaggcgacgaccggcccttcttttggctgttcgagaatgtggtggccatgggagtcagcgacaagcgggatattagccggttcctggagagcaaccccgtgatgatcgatgccaaggaagtgagcgccgcccaccgggccagatacttctggggcaatctgcctggcatgaacagacccctggccagcaccgtgaacgacaagctggagctgcaggagtgcctggagcacggccggatcgccaagttcagcaaggtgagaaccatcaccacccgaagcaacagcatcaaacaaggcaaggaccagcactttcctgtgttcatgaacgagaaggaggacatcctgtggtgtaccgagatggagagagtgttcgggttcccagtccactacacagatgtcagcaacatgtctagactggccagacagagactgctgggaagaagctggtccgtccctgtgatcagacacctgttcgcccctctgaaggagtacttcgcctgcgtgagcagcggcaacagcaacgccaacagccggggccccagcttctctagcggcctggtgccactgtccctgagagggagccacatgggccccatggagatctacaaaaccgtgagcgcctggaagcggcagcctgtgcgcgtgctgagcctgtttcggaatatcgataaagtcctgaaaagcctgggattcctggagagcggctctggctccggcggtggcaccctgaagtacgtggaggatgtgacaaacgtggtcagacgggatgtggagaagtggggccccttcgatctggtgtacggcagcacccaacccctgggcagctcttgtgaccggtgccctggctggtacatgtttcagttccaccggatcctgcagtacgccctgccgagacaggagtcccagcggccattcttttggattttcatggacaacttgctgctgaccgaggatgaccaggaaactaccactcggttcctgcagaccgaagccgtgaccctgcaggacgtgagaggccgggactaccagaacgccatgcgggtgtggtccaacatccctggactgaaaagcaagcacgcacctctgacccctaaagaagaggagtacctgcaggcccaggtgcggagcagaagcaagctggacgcccctaaggtggatctgctggtgaagaattgcctcctgcccctgagagagtacttcaagtatttcagccagaatagtctgcccctgggcggcccaagcagcggcgcccctcctcccagcggcggcagcccagccggctccccaacctctaccgaggagggcacctctgagtccgccacccccgagagcggccctggcacctccaccgagcccagcgagggcagcgcacccggcagccctgccggcagccccacctccacagaggagggaaccagcaccgagcccagcgaaggcagcgccccaggcaccagcaccgagcctagtgagggcggctctggcggcggcagcgcccaggagattaaacggatcaacaagatcagaagaagacttgtgaaagacagcaacaccaagaaggccggcaagacaggccccatgaaaaccctgctggttagagtgatgacacccgatctgagagagcggctggaaaacctgagaaagaagcctgaaaatatcccccagcccatcagcaatacatctagagccaacctgaataagctgctgaccgattacaccgaaatgaagaaggcgatcctgcatgtgtactgggaagagttccagaaggaccctgtgggcctgatgagccgggtggcccagcctgccagcaagaagatcgatcagaacaagctgaaacctgagatggacgagaagggcaacctgaccaccgccggctttgcctgctctcagtgtggccagcccctgttcgtgtacaagctggagcaggtgtctgagaagggcaaggcttacaccaactacttcggacggtgcaatgtggccgagcacgaaaagctgatcctgctggcccagctgaagcccgagaaggatagcgacgaagccgtgacatatagcctgggaaagtttgggcagagggccctggatttctacagcattcatgtgaccaaggagtccacccaccccgtgaagcccctggcccagatcgccggaaacagatacgcctccggacctgtgggaaaggccctgagcgacgcatgtatgggcacaatcgcctccttcctgtctaagtaccaggacatcatcatcgaacaccagaaggtggtgaagggcaaccagaagagactggagagcctgcgggagctggccggcaaggaaaacctggaataccctagcgtgaccctgccacctcagcctcacaccaaggagggcgttgatgcctacaacgaagtgatcgcccgggtgcgaatgtgggtgaacctgaacctgtggcagaagctgaagctaagcagagatgatgccaagcctctgctgagactgaagggattcccttcctttcctctggtcgagagacaggccaacgaagtggactggtgggacatggtgtgtaacgtgaagaagctgatcaacgagaaaaaggaggatggcaaggtgttttggcagaatctggctggctacaagagacaggaagccctgagaccatacctgagcagcgaggaagatcggaagaagggaaagaaattcgctcggtaccagctgggcgacctgctgctgcacctggaaaagaagcacggcgaggactggggaaaggtgtacgacgaggcctgggagcggattgacaagaaagtggaaggcctgagcaagcacatcaagctggaagaggaacggagaagcgaggacgcccagagcaaggccgccctgaccgactggctgcgggctaaggccagcttcgtgatcgagggcctgaaggaggccgacaaggacgagttctgcagatgcgagctgaagctgcagaagtggtacggggacctgcggggaaagcccttcgccatcgaagccgagaacagcatcctggacatcagcggcttcagcaagcagtacaactgtgccttcatctggcagaaggacggcgtgaagaagctgaacctgtacctgatcatcaactacttcaagggcggcaagctgcggttcaagaagatcaaacctgaagccttcgaagccaacagattctacaccgtgatcaacaaaaagagcggcgagatcgtgcccatggaggtgaacttcaacttcgacgaccccaacctgatcatcctgcctctggcctttggcaagagacagggcagagaattcatctggaacgacctgctgtccctggaaaccggcagcctgaagctggccaacggaagagtgatcgagaagacactgtacaacagaagaacccggcaggatgagcctgccctgttcgtggccctgaccttcgagcggcgggaggtcctggactcctccaatatcaaaccaatgaacctgatcggcgtggcaagaggcgaaaacatccccgccgtgatcgccctgaccgaccccgagggctgcccactgagccggtttaaggatagcctgggaaacccaacccacatcctgagaatcggcgagagctataaggagaagcagcggaccatccaggccaagaaggaggtggagcagcggagagccggcggctacagccggaagtacgccagcaaagccaagaatctggcagacgatatggtgagaaacaccgctagagatctgctgtactacgccgtgacccaggatgccatgctgatcttcgccaacctgagccggggcttcggccggcagggcaagcggaccttcatggccgagagacagtacacacggatggaggactggctgaccgccaagctggcctacgagggcctgagcaagacctacctgtccaagacactggcccagtacacctccaagacatgcagcaactgtgggtttaccatcaccagcgccgactacgacagggtgctggagaagctgaagaagacagcaacaggctggatgaccacaattaacggcaaggagctgaaggtggagggccagattacctactacaacagatacaagagacagaacgtagtcaaggacctgtccgtcgagctggatagactgagcgaagaatctgtgaacaacgacatctcctcctggacaaagggcagaagcggagaagctctgagcctcctgaagaaaagattctcccatagacccgtgcaggagaagttcgtgtgcctgaactgcggcttcgagacacacgcagccgagcaagccgccctgaacatcgccagatcctggctgttcctgcggagccaggagtacaagaaataccagacaaacaagacaaccggcaacaccgataagagagccttcgtcgagacctggcagtccttttaccggaagaagcttaaggaggtgtggaaacctgccgtgcggtctggcggatctggcggaggctccacaagcgagagcgtgaccttcgaggacgtggccgtgtacttcagcgagaacgagtggatcggcctgggccccgcccagagggccctgtacagggacgtgatgctggagaactacggcgccgtggccagcctggccttccccttccccaagcccgccctgatcagccagctggagaggggcgaggccccctggtgcagcgccccccagggcgccctggacggcgagagccccaggggcatcagcagcgagaccagccccaagaaaaagagaaaagtctaagctgccttctgcggggcttgccttctggccatgcccttcttctctcccttgcacctgtacctcttggtctttgaataaagcctgagtaggaaggctagcaaaaaaaaaaaaaaaaaaaaaaaaaaaaaaaaaaaaaaaaaaaaaaaaaaaaaaaaaaaaaaaaaaaaaaaaaaaaaaaa

SEQ ID NO: 6789 - RNA, 5797 nt, synthetic construct
  source 1..5797: mol_type = other RNA
aggaaataagagagaaaagaagagtaagaagaaatataagagccaccatggcccctaagaagaagcgtaaagtgagccggatggaacgcctcgtctacgaggtgcggcagaagtgcagaaacatcgaggacatctgcatctcctgcggatctctgaacgtgaccctggagcacccactgttcatcggcggcatgtgccagaactgtaaaaactgttttctggagtgtgcctatcaatacgacgatgacggctaccagagctactgcaccatctgttgcggcggaagagaggtgctgatgtgtggaaataacaactgctgccggtgcttctgcgtggaatgcgtggacctgctggtgggccccggcgccgcccaggccgctattaaggaagatccttggaactgctacatgtgcggccacaagggcacatacggcctgctgagacggagagaggactggcctagcagactgcagatgttcttcgccaataaccacgaccaggagttcgacccccctaaggtgtaccctcccgtccccgccgagaagagaaagcccatccgggtcctgagcctgttcgatggcatcgccaccggtctgctggtgctgaaggacctgggcatccaggtggataggtacattgcctccgaggtgtgcgaggactccatcaccgtgggaatggtgcgtcatcagggcaagatcatgtacgtgggcgacgtgcggagcgtgacacagaagcatatccaggagtggggccctttcgacctggtgatcggcggcagcccttgcaatgacctgagcatcgtgaacccagcccggaagggcctgtacgagggaaccggcagactgttcttcgagttttacagactgctgcacgacgcccggcctaaggaaggcgacgaccggcccttcttttggctgttcgagaatgtggtggccatgggagtcagcgacaagcgggatattagccggttcctggagagcaaccccgtgatgatcgatgccaaggaagtgagcgccgcccaccgggccagatacttctggggcaatctgcctggcatgaacagacccctggccagcaccgtgaacgacaagctggagctgcaggagtgcctggagcacggccggatcgccaagttcagcaaggtgagaaccatcaccacccgaagcaacagcatcaaacaaggcaaggaccagcactttcctgtgttcatgaacgagaaggaggacatcctgtggtgtaccgagatggagagagtgttcgggttcccagtccactacacagatgtcagcaacatgtctagactggccagacagagactgctgggaagaagctggtccgtccctgtgatcagacacctgttcgcccctctgaaggagtacttcgcctgcgtgagcagcggcaacagcaacgccaacagccggggccccagcttctctagcggcctggtgccactgtccctgagagggagccacatgggccccatggagatctacaaaaccgtgagcgcctggaagcggcagcctgtgcgcgtgctgagcctgtttcggaatatcgataaagtcctgaaaagcctgggattcctggagagcggctctggctccggcggtggcaccctgaagtacgtggaggatgtgacaaacgtggtcagacgggatgtggagaagtggggccccttcgatctggtgtacggcagcacccaacccctgggcagctcttgtgaccggtgccctggctggtacatgtttcagttccaccggatcctgcagtacgccctgccgagacaggagtcccagcggccattcttttggattttcatggacaacttgctgctgaccgaggatgaccaggaaactaccactcggttcctgcagaccgaagccgtgaccctgcaggacgtgagaggccgggactaccagaacgccatgcgggtgtggtccaacatccctggactgaaaagcaagcacgcacctctgacccctaaagaagaggagtacctgcaggcccaggtgcggagcagaagcaagctggacgcccctaaggtggatctgctggtgaagaattgcctcctgcccctgagagagtacttcaagtatttcagccagaatagtctgcccctgggcggcccaagcagcggcgcccctcctcccagcggcggcagcccagccggctccccaacctctaccgaggagggcacctctgagtccgccacccccgagagcggccctggcacctccaccgagcccagcgagggcagcgcacccggcagccctgccggcagccccacctccacagaggagggaaccagcaccgagcccagcgaaggcagcgccccaggcaccagcaccgagcctagtgagggcggctctggcggcggcagcgcccaggagattaaacggatcaacaagatcagaagaagacttgtgaaagacagcaacaccaagaaggccggcaagacaggccccatgaaaaccctgctggttagagtgatgacacccgatctgagagagcggctggaaaacctgagaaagaagcctgaaaatatcccccagcccatcagcaatacatctagagccaacctgaataagctgctgaccgattacaccgaaatgaagaaggcgatcctgcatgtgtactgggaagagttccagaaggaccctgtgggcctgatgagccgggtggcccagcctgccagcaagaagatcgatcagaacaagctgaaacctgagatggacgagaagggcaacctgaccaccgccggctttgcctgctctcagtgtggccagcccctgttcgtgtacaagctggagcaggtgtctgagaagggcaaggcttacaccaactacttcggacggtgcaatgtggccgagcacgaaaagctgatcctgctggcccagctgaagcccgagaaggatagcgacgaagccgtgacatatagcctgggaaagtttgggcagagggccctggatttctacagcattcatgtgaccaaggagtccacccaccccgtgaagcccctggcccagatcgccggaaacagatacgcctccggacctgtgggaaaggccctgagcgacgcatgtatgggcacaatcgcctccttcctgtctaagtaccaggacatcatcatcgaacaccagaaggtggtgaagggcaaccagaagagactggagagcctgcgggagctggccggcaaggaaaacctggaataccctagcgtgaccctgccacctcagcctcacaccaaggagggcgttgatgcctacaacgaagtgatcgcccgggtgcgaatgtgggtgaacctgaacctgtggcagaagctgaagctaagcagagatgatgccaagcctctgctgagactgaagggattcccttcctttcctctggtcgagagacaggccaacgaagtggactggtgggacatggtgtgtaacgtgaagaagctgatcaacgagaaaaaggaggatggcaaggtgttttggcagaatctggctggctacaagagacaggaagccctgagaccatacctgagcagcgaggaagatcggaagaagggaaagaaattcgctcggtaccagctgggcgacctgctgctgcacctggaaaagaagcacggcgaggactggggaaaggtgtacgacgaggcctgggagcggattgacaagaaagtggaaggcctgagcaagcacatcaagctggaagaggaacggagaagcgaggacgcccagagcaaggccgccctgaccgactggctgcgggctaaggccagcttcgtgatcgagggcctgaaggaggccgacaaggacgagttctgcagatgcgagctgaagctgcagaagtggtacggggacctgcggggaaagcccttcgccatcgaagccgagaacagcatcctggacatcagcggcttcagcaagcagtacaactgtgccttcatctggcagaaggacggcgtgaagaagctgaacctgtacctgatcatcaactacttcaagggcggcaagctgcggttcaagaagatcaaacctgaagccttcgaagccaacagattctacaccgtgatcaacaaaaagagcggcgagatcgtgcccatggaggtgaacttcaacttcgacgaccccaacctgatcatcctgcctctggcctttggcaagagacagggcagagaattcatctggaacgacctgctgtccctggaaaccggcagcctgaagctggccaacggaagagtgatcgagaagacactgtacaacagaagaacccggcaggatgagcctgccctgttcgtggccctgaccttcgagcggcgggaggtcctggactcctccaatatcaaaccaatgaacctgatcggcgtggcaagaggcgaaaacatccccgccgtgatcgccctgaccgaccccgagggctgcccactgagccggtttaaggatagcctgggaaacccaacccacatcctgagaatcggcgagagctataaggagaagcagcggaccatccaggccaagaaggaggtggagcagcggagagccggcggctacagccggaagtacgccagcaaagccaagaatctggcagacgatatggtgagaaacaccgctagagatctgctgtactacgccgtgacccaggatgccatgctgatcttcgccaacctgagccggggcttcggccggcagggcaagcggaccttcatggccgagagacagtacacacggatggaggactggctgaccgccaagctggcctacgagggcctgagcaagacctacctgtccaagacactggcccagtacacctccaagacatgcagcaactgtgggtttaccatcaccagcgccgactacgacagggtgctggagaagctgaagaagacagcaacaggctggatgaccacaattaacggcaaggagctgaaggtggagggccagattacctactacaacagatacaagagacagaacgtagtcaaggacctgtccgtcgagctggatagactgagcgaagaatctgtgaacaacgacatctcctcctggacaaagggcagaagcggagaagctctgagcctcctgaagaaaagattctcccatagacccgtgcaggagaagttcgtgtgcctgaactgcggcttcgagacacacgcagccgagcaagccgccctgaacatcgccagatcctggctgttcctgcggagccaggagtacaagaaataccagacaaacaagacaaccggcaacaccgataagagagccttcgtcgagacctggcagtccttttaccggaagaagcttaaggaggtgtggaaacctgccgtgcggtctggcggatctggcggaggctccacaagcgcccaggagctggtgaccttccaggacgtggccgtggacttcacccaggaggagtggggcctgctggaccacccccagaaggagctgtacaaggaggtgatgctggagaacgccaggaacgccctgagcctgggcctgcccgtgcccagggagggcctgatcagccacttcggccagagggaggccccctggatgatggagctggaggaccccaggaccagctaccccgtgagccagaagctgaccagccccaagaaaaagagaaaagtctaagctgccttctgcggggcttgccttctggccatgcccttcttctctcccttgcacctgtacctcttggtctttgaataaagcctgagtaggaaggctagcaaaaaaaaaaaaaaaaaaaaaaaaaaaaaaaaaaaaaaaaaaaaaaaaaaaaaaaaaaaaaaaaaaaaaaaaaaaaaaaa

SEQ ID NO: 6790 - RNA, 5797 nt, synthetic construct
  source 1..5797: mol_type = other RNA
aggaaataagagagaaaagaagagtaagaagaaatataagagccaccatggcccctaagaagaagcgtaaagtgagccggatggaacgcctcgtctacgaggtgcggcagaagtgcagaaacatcgaggacatctgcatctcctgcggatctctgaacgtgaccctggagcacccactgttcatcggcggcatgtgccagaactgtaaaaactgttttctggagtgtgcctatcaatacgacgatgacggctaccagagctactgcaccatctgttgcggcggaagagaggtgctgatgtgtggaaataacaactgctgccggtgcttctgcgtggaatgcgtggacctgctggtgggccccggcgccgcccaggccgctattaaggaagatccttggaactgctacatgtgcggccacaagggcacatacggcctgctgagacggagagaggactggcctagcagactgcagatgttcttcgccaataaccacgaccaggagttcgacccccctaaggtgtaccctcccgtccccgccgagaagagaaagcccatccgggtcctgagcctgttcgatggcatcgccaccggtctgctggtgctgaaggacctgggcatccaggtggataggtacattgcctccgaggtgtgcgaggactccatcaccgtgggaatggtgcgtcatcagggcaagatcatgtacgtgggcgacgtgcggagcgtgacacagaagcatatccaggagtggggccctttcgacctggtgatcggcggcagcccttgcaatgacctgagcatcgtgaacccagcccggaagggcctgtacgagggaaccggcagactgttcttcgagttttacagactgctgcacgacgcccggcctaaggaaggcgacgaccggcccttcttttggctgttcgagaatgtggtggccatgggagtcagcgacaagcgggatattagccggttcctggagagcaaccccgtgatgatcgatgccaaggaagtgagcgccgcccaccgggccagatacttctggggcaatctgcctggcatgaacagacccctggccagcaccgtgaacgacaagctggagctgcaggagtgcctggagcacggccggatcgccaagttcagcaaggtgagaaccatcaccacccgaagcaacagcatcaaacaaggcaaggaccagcactttcctgtgttcatgaacgagaaggaggacatcctgtggtgtaccgagatggagagagtgttcgggttcccagtccactacacagatgtcagcaacatgtctagactggccagacagagactgctgggaagaagctggtccgtccctgtgatcagacacctgttcgcccctctgaaggagtacttcgcctgcgtgagcagcggcaacagcaacgccaacagccggggccccagcttctctagcggcctggtgccactgtccctgagagggagccacatgggccccatggagatctacaaaaccgtgagcgcctggaagcggcagcctgtgcgcgtgctgagcctgtttcggaatatcgataaagtcctgaaaagcctgggattcctggagagcggctctggctccggcggtggcaccctgaagtacgtggaggatgtgacaaacgtggtcagacgggatgtggagaagtggggccccttcgatctggtgtacggcagcacccaacccctgggcagctcttgtgaccggtgccctggctggtacatgtttcagttccaccggatcctgcagtacgccctgccgagacaggagtcccagcggccattcttttggattttcatggacaacttgctgctgaccgaggatgaccaggaaactaccactcggttcctgcagaccgaagccgtgaccctgcaggacgtgagaggccgggactaccagaacgccatgcgggtgtggtccaacatccctggactgaaaagcaagcacgcacctctgacccctaaagaagaggagtacctgcaggcccaggtgcggagcagaagcaagctggacgcccctaaggtggatctgctggtgaagaattgcctcctgcccctgagagagtacttcaagtatttcagccagaatagtctgcccctgggcggcccaagcagcggcgcccctcctcccagcggcggcagcccagccggctccccaacctctaccgaggagggcacctctgagtccgccacccccgagagcggccctggcacctccaccgagcccagcgagggcagcgcacccggcagccctgccggcagccccacctccacagaggagggaaccagcaccgagcccagcgaaggcagcgccccaggcaccagcaccgagcctagtgagggcggctctggcggcggcagcgcccaggagattaaacggatcaacaagatcagaagaagacttgtgaaagacagcaacaccaagaaggccggcaagacaggccccatgaaaaccctgctggttagagtgatgacacccgatctgagagagcggctggaaaacctgagaaagaagcctgaaaatatcccccagcccatcagcaatacatctagagccaacctgaataagctgctgaccgattacaccgaaatgaagaaggcgatcctgcatgtgtactgggaagagttccagaaggaccctgtgggcctgatgagccgggtggcccagcctgccagcaagaagatcgatcagaacaagctgaaacctgagatggacgagaagggcaacctgaccaccgccggctttgcctgctctcagtgtggccagcccctgttcgtgtacaagctggagcaggtgtctgagaagggcaaggcttacaccaactacttcggacggtgcaatgtggccgagcacgaaaagctgatcctgctggcccagctgaagcccgagaaggatagcgacgaagccgtgacatatagcctgggaaagtttgggcagagggccctggatttctacagcattcatgtgaccaaggagtccacccaccccgtgaagcccctggcccagatcgccggaaacagatacgcctccggacctgtgggaaaggccctgagcgacgcatgtatgggcacaatcgcctccttcctgtctaagtaccaggacatcatcatcgaacaccagaaggtggtgaagggcaaccagaagagactggagagcctgcgggagctggccggcaaggaaaacctggaataccctagcgtgaccctgccacctcagcctcacaccaaggagggcgttgatgcctacaacgaagtgatcgcccgggtgcgaatgtgggtgaacctgaacctgtggcagaagctgaagctaagcagagatgatgccaagcctctgctgagactgaagggattcccttcctttcctctggtcgagagacaggccaacgaagtggactggtgggacatggtgtgtaacgtgaagaagctgatcaacgagaaaaaggaggatggcaaggtgttttggcagaatctggctggctacaagagacaggaagccctgagaccatacctgagcagcgaggaagatcggaagaagggaaagaaattcgctcggtaccagctgggcgacctgctgctgcacctggaaaagaagcacggcgaggactggggaaaggtgtacgacgaggcctgggagcggattgacaagaaagtggaaggcctgagcaagcacatcaagctggaagaggaacggagaagcgaggacgcccagagcaaggccgccctgaccgactggctgcgggctaaggccagcttcgtgatcgagggcctgaaggaggccgacaaggacgagttctgcagatgcgagctgaagctgcagaagtggtacggggacctgcggggaaagcccttcgccatcgaagccgagaacagcatcctggacatcagcggcttcagcaagcagtacaactgtgccttcatctggcagaaggacggcgtgaagaagctgaacctgtacctgatcatcaactacttcaagggcggcaagctgcggttcaagaagatcaaacctgaagccttcgaagccaacagattctacaccgtgatcaacaaaaagagcggcgagatcgtgcccatggaggtgaacttcaacttcgacgaccccaacctgatcatcctgcctctggcctttggcaagagacagggcagagaattcatctggaacgacctgctgtccctggaaaccggcagcctgaagctggccaacggaagagtgatcgagaagacactgtacaacagaagaacccggcaggatgagcctgccctgttcgtggccctgaccttcgagcggcgggaggtcctggactcctccaatatcaaaccaatgaacctgatcggcgtggcaagaggcgaaaacatccccgccgtgatcgccctgaccgaccccgagggctgcccactgagccggtttaaggatagcctgggaaacccaacccacatcctgagaatcggcgagagctataaggagaagcagcggaccatccaggccaagaaggaggtggagcagcggagagccggcggctacagccggaagtacgccagcaaagccaagaatctggcagacgatatggtgagaaacaccgctagagatctgctgtactacgccgtgacccaggatgccatgctgatcttcgccaacctgagccggggcttcggccggcagggcaagcggaccttcatggccgagagacagtacacacggatggaggactggctgaccgccaagctggcctacgagggcctgagcaagacctacctgtccaagacactggcccagtacacctccaagacatgcagcaactgtgggtttaccatcaccagcgccgactacgacagggtgctggagaagctgaagaagacagcaacaggctggatgaccacaattaacggcaaggagctgaaggtggagggccagattacctactacaacagatacaagagacagaacgtagtcaaggacctgtccgtcgagctggatagactgagcgaagaatctgtgaacaacgacatctcctcctggacaaagggcagaagcggagaagctctgagcctcctgaagaaaagattctcccatagacccgtgcaggagaagttcgtgtgcctgaactgcggcttcgagacacacgcagccgagcaagccgccctgaacatcgccagatcctggctgttcctgcggagccaggagtacaagaaataccagacaaacaagacaaccggcaacaccgataagagagccttcgtcgagacctggcagtccttttaccggaagaagcttaaggaggtgtggaaacctgccgtgcggtctggcggatctggcggaggctccacaagcagccaggagcccgtgaccttcgccgacgtggccgtggtgttcacccccgaggagtgggtgttcctggacagcacccagaggagcctgtacagggacgtgatgctggagaactacaggaacctggccagcgtggccggcgaccagctgtgcaagcccaacgccctgagctacctggagcagaggggcgagcagtggaccaccgagaggggcgtgatcagcgacacctgccccgagccccagctgaccagccccaagaaaaagagaaaagtctaagctgccttctgcggggcttgccttctggccatgcccttcttctctcccttgcacctgtacctcttggtctttgaataaagcctgagtaggaaggctagcaaaaaaaaaaaaaaaaaaaaaaaaaaaaaaaaaaaaaaaaaaaaaaaaaaaaaaaaaaaaaaaaaaaaaaaaaaaaaaaa

SEQ ID NO: 6791 - RNA, 5797 nt, synthetic construct
  source 1..5797: mol_type = other RNA
aggaaataagagagaaaagaagagtaagaagaaatataagagccaccatggcccctaagaagaagcgtaaagtgagccggatggaacgcctcgtctacgaggtgcggcagaagtgcagaaacatcgaggacatctgcatctcctgcggatctctgaacgtgaccctggagcacccactgttcatcggcggcatgtgccagaactgtaaaaactgttttctggagtgtgcctatcaatacgacgatgacggctaccagagctactgcaccatctgttgcggcggaagagaggtgctgatgtgtggaaataacaactgctgccggtgcttctgcgtggaatgcgtggacctgctggtgggccccggcgccgcccaggccgctattaaggaagatccttggaactgctacatgtgcggccacaagggcacatacggcctgctgagacggagagaggactggcctagcagactgcagatgttcttcgccaataaccacgaccaggagttcgacccccctaaggtgtaccctcccgtccccgccgagaagagaaagcccatccgggtcctgagcctgttcgatggcatcgccaccggtctgctggtgctgaaggacctgggcatccaggtggataggtacattgcctccgaggtgtgcgaggactccatcaccgtgggaatggtgcgtcatcagggcaagatcatgtacgtgggcgacgtgcggagcgtgacacagaagcatatccaggagtggggccctttcgacctggtgatcggcggcagcccttgcaatgacctgagcatcgtgaacccagcccggaagggcctgtacgagggaaccggcagactgttcttcgagttttacagactgctgcacgacgcccggcctaaggaaggcgacgaccggcccttcttttggctgttcgagaatgtggtggccatgggagtcagcgacaagcgggatattagccggttcctggagagcaaccccgtgatgatcgatgccaaggaagtgagcgccgcccaccgggccagatacttctggggcaatctgcctggcatgaacagacccctggccagcaccgtgaacgacaagctggagctgcaggagtgcctggagcacggccggatcgccaagttcagcaaggtgagaaccatcaccacccgaagcaacagcatcaaacaaggcaaggaccagcactttcctgtgttcatgaacgagaaggaggacatcctgtggtgtaccgagatggagagagtgttcgggttcccagtccactacacagatgtcagcaacatgtctagactggccagacagagactgctgggaagaagctggtccgtccctgtgatcagacacctgttcgcccctctgaaggagtacttcgcctgcgtgagcagcggcaacagcaacgccaacagccggggccccagcttctctagcggcctggtgccactgtccctgagagggagccacatgggccccatggagatctacaaaaccgtgagcgcctggaagcggcagcctgtgcgcgtgctgagcctgtttcggaatatcgataaagtcctgaaaagcctgggattcctggagagcggctctggctccggcggtggcaccctgaagtacgtggaggatgtgacaaacgtggtcagacgggatgtggagaagtggggccccttcgatctggtgtacggcagcacccaacccctgggcagctcttgtgaccggtgccctggctggtacatgtttcagttccaccggatcctgcagtacgccctgccgagacaggagtcccagcggccattcttttggattttcatggacaacttgctgctgaccgaggatgaccaggaaactaccactcggttcctgcagaccgaagccgtgaccctgcaggacgtgagaggccgggactaccagaacgccatgcgggtgtggtccaacatccctggactgaaaagcaagcacgcacctctgacccctaaagaagaggagtacctgcaggcccaggtgcggagcagaagcaagctggacgcccctaaggtggatctgctggtgaagaattgcctcctgcccctgagagagtacttcaagtatttcagccagaatagtctgcccctgggcggcccaagcagcggcgcccctcctcccagcggcggcagcccagccggctccccaacctctaccgaggagggcacctctgagtccgccacccccgagagcggccctggcacctccaccgagcccagcgagggcagcgcacccggcagccctgccggcagccccacctccacagaggagggaaccagcaccgagcccagcgaaggcagcgccccaggcaccagcaccgagcctagtgagggcggctctggcggcggcagcgcccaggagattaaacggatcaacaagatcagaagaagacttgtgaaagacagcaacaccaagaaggccggcaagacaggccccatgaaaaccctgctggttagagtgatgacacccgatctgagagagcggctggaaaacctgagaaagaagcctgaaaatatcccccagcccatcagcaatacatctagagccaacctgaataagctgctgaccgattacaccgaaatgaagaaggcgatcctgcatgtgtactgggaagagttccagaaggaccctgtgggcctgatgagccgggtggcccagcctgccagcaagaagatcgatcagaacaagctgaaacctgagatggacgagaagggcaacctgaccaccgccggctttgcctgctctcagtgtggccagcccctgttcgtgtacaagctggagcaggtgtctgagaagggcaaggcttacaccaactacttcggacggtgcaatgtggccgagcacgaaaagctgatcctgctggcccagctgaagcccgagaaggatagcgacgaagccgtgacatatagcctgggaaagtttgggcagagggccctggatttctacagcattcatgtgaccaaggagtccacccaccccgtgaagcccctggcccagatcgccggaaacagatacgcctccggacctgtgggaaaggccctgagcgacgcatgtatgggcacaatcgcctccttcctgtctaagtaccaggacatcatcatcgaacaccagaaggtggtgaagggcaaccagaagagactggagagcctgcgggagctggccggcaaggaaaacctggaataccctagcgtgaccctgccacctcagcctcacaccaaggagggcgttgatgcctacaacgaagtgatcgcccgggtgcgaatgtgggtgaacctgaacctgtggcagaagctgaagctaagcagagatgatgccaagcctctgctgagactgaagggattcccttcctttcctctggtcgagagacaggccaacgaagtggactggtgggacatggtgtgtaacgtgaagaagctgatcaacgagaaaaaggaggatggcaaggtgttttggcagaatctggctggctacaagagacaggaagccctgagaccatacctgagcagcgaggaagatcggaagaagggaaagaaattcgctcggtaccagctgggcgacctgctgctgcacctggaaaagaagcacggcgaggactggggaaaggtgtacgacgaggcctgggagcggattgacaagaaagtggaaggcctgagcaagcacatcaagctggaagaggaacggagaagcgaggacgcccagagcaaggccgccctgaccgactggctgcgggctaaggccagcttcgtgatcgagggcctgaaggaggccgacaaggacgagttctgcagatgcgagctgaagctgcagaagtggtacggggacctgcggggaaagcccttcgccatcgaagccgagaacagcatcctggacatcagcggcttcagcaagcagtacaactgtgccttcatctggcagaaggacggcgtgaagaagctgaacctgtacctgatcatcaactacttcaagggcggcaagctgcggttcaagaagatcaaacctgaagccttcgaagccaacagattctacaccgtgatcaacaaaaagagcggcgagatcgtgcccatggaggtgaacttcaacttcgacgaccccaacctgatcatcctgcctctggcctttggcaagagacagggcagagaattcatctggaacgacctgctgtccctggaaaccggcagcctgaagctggccaacggaagagtgatcgagaagacactgtacaacagaagaacccggcaggatgagcctgccctgttcgtggccctgaccttcgagcggcgggaggtcctggactcctccaatatcaaaccaatgaacctgatcggcgtggcaagaggcgaaaacatccccgccgtgatcgccctgaccgaccccgagggctgcccactgagccggtttaaggatagcctgggaaacccaacccacatcctgagaatcggcgagagctataaggagaagcagcggaccatccaggccaagaaggaggtggagcagcggagagccggcggctacagccggaagtacgccagcaaagccaagaatctggcagacgatatggtgagaaacaccgctagagatctgctgtactacgccgtgacccaggatgccatgctgatcttcgccaacctgagccggggcttcggccggcagggcaagcggaccttcatggccgagagacagtacacacggatggaggactggctgaccgccaagctggcctacgagggcctgagcaagacctacctgtccaagacactggcccagtacacctccaagacatgcagcaactgtgggtttaccatcaccagcgccgactacgacagggtgctggagaagctgaagaagacagcaacaggctggatgaccacaattaacggcaaggagctgaaggtggagggccagattacctactacaacagatacaagagacagaacgtagtcaaggacctgtccgtcgagctggatagactgagcgaagaatctgtgaacaacgacatctcctcctggacaaagggcagaagcggagaagctctgagcctcctgaagaaaagattctcccatagacccgtgcaggagaagttcgtgtgcctgaactgcggcttcgagacacacgcagccgagcaagccgccctgaacatcgccagatcctggctgttcctgcggagccaggagtacaagaaataccagacaaacaagacaaccggcaacaccgataagagagccttcgtcgagacctggcagtccttttaccggaagaagcttaaggaggtgtggaaacctgccgtgcggtctggcggatctggcggaggctccacaagcttcgaggagctggtgaccttcgaggacgtgttcgtggacttcagccccgaggagctgagcagcctgagcgccccccagaggaacctgtacagggaggtgatgctggagaactacaggaacctggtgttcctgggctaccagttcagcaagcccgacatcatcagcaggctggaggtggaggagagccacgccatggagaccgacagcaggcacaccgtgatctgccagggcgaggcccacgacaccagccccaagaaaaagagaaaagtctaagctgccttctgcggggcttgccttctggccatgcccttcttctctcccttgcacctgtacctcttggtctttgaataaagcctgagtaggaaggctagcaaaaaaaaaaaaaaaaaaaaaaaaaaaaaaaaaaaaaaaaaaaaaaaaaaaaaaaaaaaaaaaaaaaaaaaaaaaaaaaa

SEQ ID NO: 6792 - RNA, 5797 nt, synthetic construct
  source 1..5797: mol_type = other RNA
aggaaataagagagaaaagaagagtaagaagaaatataagagccaccatggcccctaagaagaagcgtaaagtgagccggatggaacgcctcgtctacgaggtgcggcagaagtgcagaaacatcgaggacatctgcatctcctgcggatctctgaacgtgaccctggagcacccactgttcatcggcggcatgtgccagaactgtaaaaactgttttctggagtgtgcctatcaatacgacgatgacggctaccagagctactgcaccatctgttgcggcggaagagaggtgctgatgtgtggaaataacaactgctgccggtgcttctgcgtggaatgcgtggacctgctggtgggccccggcgccgcccaggccgctattaaggaagatccttggaactgctacatgtgcggccacaagggcacatacggcctgctgagacggagagaggactggcctagcagactgcagatgttcttcgccaataaccacgaccaggagttcgacccccctaaggtgtaccctcccgtccccgccgagaagagaaagcccatccgggtcctgagcctgttcgatggcatcgccaccggtctgctggtgctgaaggacctgggcatccaggtggataggtacattgcctccgaggtgtgcgaggactccatcaccgtgggaatggtgcgtcatcagggcaagatcatgtacgtgggcgacgtgcggagcgtgacacagaagcatatccaggagtggggccctttcgacctggtgatcggcggcagcccttgcaatgacctgagcatcgtgaacccagcccggaagggcctgtacgagggaaccggcagactgttcttcgagttttacagactgctgcacgacgcccggcctaaggaaggcgacgaccggcccttcttttggctgttcgagaatgtggtggccatgggagtcagcgacaagcgggatattagccggttcctggagagcaaccccgtgatgatcgatgccaaggaagtgagcgccgcccaccgggccagatacttctggggcaatctgcctggcatgaacagacccctggccagcaccgtgaacgacaagctggagctgcaggagtgcctggagcacggccggatcgccaagttcagcaaggtgagaaccatcaccacccgaagcaacagcatcaaacaaggcaaggaccagcactttcctgtgttcatgaacgagaaggaggacatcctgtggtgtaccgagatggagagagtgttcgggttcccagtccactacacagatgtcagcaacatgtctagactggccagacagagactgctgggaagaagctggtccgtccctgtgatcagacacctgttcgcccctctgaaggagtacttcgcctgcgtgagcagcggcaacagcaacgccaacagccggggccccagcttctctagcggcctggtgccactgtccctgagagggagccacatgggccccatggagatctacaaaaccgtgagcgcctggaagcggcagcctgtgcgcgtgctgagcctgtttcggaatatcgataaagtcctgaaaagcctgggattcctggagagcggctctggctccggcggtggcaccctgaagtacgtggaggatgtgacaaacgtggtcagacgggatgtggagaagtggggccccttcgatctggtgtacggcagcacccaacccctgggcagctcttgtgaccggtgccctggctggtacatgtttcagttccaccggatcctgcagtacgccctgccgagacaggagtcccagcggccattcttttggattttcatggacaacttgctgctgaccgaggatgaccaggaaactaccactcggttcctgcagaccgaagccgtgaccctgcaggacgtgagaggccgggactaccagaacgccatgcgggtgtggtccaacatccctggactgaaaagcaagcacgcacctctgacccctaaagaagaggagtacctgcaggcccaggtgcggagcagaagcaagctggacgcccctaaggtggatctgctggtgaagaattgcctcctgcccctgagagagtacttcaagtatttcagccagaatagtctgcccctgggcggcccaagcagcggcgcccctcctcccagcggcggcagcccagccggctccccaacctctaccgaggagggcacctctgagtccgccacccccgagagcggccctggcacctccaccgagcccagcgagggcagcgcacccggcagccctgccggcagccccacctccacagaggagggaaccagcaccgagcccagcgaaggcagcgccccaggcaccagcaccgagcctagtgagggcggctctggcggcggcagcgcccaggagattaaacggatcaacaagatcagaagaagacttgtgaaagacagcaacaccaagaaggccggcaagacaggccccatgaaaaccctgctggttagagtgatgacacccgatctgagagagcggctggaaaacctgagaaagaagcctgaaaatatcccccagcccatcagcaatacatctagagccaacctgaataagctgctgaccgattacaccgaaatgaagaaggcgatcctgcatgtgtactgggaagagttccagaaggaccctgtgggcctgatgagccgggtggcccagcctgccagcaagaagatcgatcagaacaagctgaaacctgagatggacgagaagggcaacctgaccaccgccggctttgcctgctctcagtgtggccagcccctgttcgtgtacaagctggagcaggtgtctgagaagggcaaggcttacaccaactacttcggacggtgcaatgtggccgagcacgaaaagctgatcctgctggcccagctgaagcccgagaaggatagcgacgaagccgtgacatatagcctgggaaagtttgggcagagggccctggatttctacagcattcatgtgaccaaggagtccacccaccccgtgaagcccctggcccagatcgccggaaacagatacgcctccggacctgtgggaaaggccctgagcgacgcatgtatgggcacaatcgcctccttcctgtctaagtaccaggacatcatcatcgaacaccagaaggtggtgaagggcaaccagaagagactggagagcctgcgggagctggccggcaaggaaaacctggaataccctagcgtgaccctgccacctcagcctcacaccaaggagggcgttgatgcctacaacgaagtgatcgcccgggtgcgaatgtgggtgaacctgaacctgtggcagaagctgaagctaagcagagatgatgccaagcctctgctgagactgaagggattcccttcctttcctctggtcgagagacaggccaacgaagtggactggtgggacatggtgtgtaacgtgaagaagctgatcaacgagaaaaaggaggatggcaaggtgttttggcagaatctggctggctacaagagacaggaagccctgagaccatacctgagcagcgaggaagatcggaagaagggaaagaaattcgctcggtaccagctgggcgacctgctgctgcacctggaaaagaagcacggcgaggactggggaaaggtgtacgacgaggcctgggagcggattgacaagaaagtggaaggcctgagcaagcacatcaagctggaagaggaacggagaagcgaggacgcccagagcaaggccgccctgaccgactggctgcgggctaaggccagcttcgtgatcgagggcctgaaggaggccgacaaggacgagttctgcagatgcgagctgaagctgcagaagtggtacggggacctgcggggaaagcccttcgccatcgaagccgagaacagcatcctggacatcagcggcttcagcaagcagtacaactgtgccttcatctggcagaaggacggcgtgaagaagctgaacctgtacctgatcatcaactacttcaagggcggcaagctgcggttcaagaagatcaaacctgaagccttcgaagccaacagattctacaccgtgatcaacaaaaagagcggcgagatcgtgcccatggaggtgaacttcaacttcgacgaccccaacctgatcatcctgcctctggcctttggcaagagacagggcagagaattcatctggaacgacctgctgtccctggaaaccggcagcctgaagctggccaacggaagagtgatcgagaagacactgtacaacagaagaacccggcaggatgagcctgccctgttcgtggccctgaccttcgagcggcgggaggtcctggactcctccaatatcaaaccaatgaacctgatcggcgtggcaagaggcgaaaacatccccgccgtgatcgccctgaccgaccccgagggctgcccactgagccggtttaaggatagcctgggaaacccaacccacatcctgagaatcggcgagagctataaggagaagcagcggaccatccaggccaagaaggaggtggagcagcggagagccggcggctacagccggaagtacgccagcaaagccaagaatctggcagacgatatggtgagaaacaccgctagagatctgctgtactacgccgtgacccaggatgccatgctgatcttcgccaacctgagccggggcttcggccggcagggcaagcggaccttcatggccgagagacagtacacacggatggaggactggctgaccgccaagctggcctacgagggcctgagcaagacctacctgtccaagacactggcccagtacacctccaagacatgcagcaactgtgggtttaccatcaccagcgccgactacgacagggtgctggagaagctgaagaagacagcaacaggctggatgaccacaattaacggcaaggagctgaaggtggagggccagattacctactacaacagatacaagagacagaacgtagtcaaggacctgtccgtcgagctggatagactgagcgaagaatctgtgaacaacgacatctcctcctggacaaagggcagaagcggagaagctctgagcctcctgaagaaaagattctcccatagacccgtgcaggagaagttcgtgtgcctgaactgcggcttcgagacacacgcagccgagcaagccgccctgaacatcgccagatcctggctgttcctgcggagccaggagtacaagaaataccagacaaacaagacaaccggcaacaccgataagagagccttcgtcgagacctggcagtccttttaccggaagaagcttaaggaggtgtggaaacctgccgtgcggtctggcggatctggcggaggctccacaagcatggcccaggagagcgtgatgttcagcgacgtgagcgtggacttcagccaggaggagtgggagtgcctgaacgacgaccagagggacctgtacagggacgtgatgctggagaactacagcaacctggtgagcatggccggccacagcgtgagcaagcccaacgtgatcagctacctggagcagggcaaggagccctggctggtggacagggagctgaccaggggccagtggcccgtgctggagaccagccccaagaaaaagagaaaagtctaagctgccttctgcggggcttgccttctggccatgcccttcttctctcccttgcacctgtacctcttggtctttgaataaagcctgagtaggaaggctagcaaaaaaaaaaaaaaaaaaaaaaaaaaaaaaaaaaaaaaaaaaaaaaaaaaaaaaaaaaaaaaaaaaaaaaaaaaaaaaaa

SEQ ID NO: 6793 - RNA, 5797 nt, synthetic construct
  source 1..5797: mol_type = other RNA
aggaaataagagagaaaagaagagtaagaagaaatataagagccaccatggcccctaagaagaagcgtaaagtgagccggatggaacgcctcgtctacgaggtgcggcagaagtgcagaaacatcgaggacatctgcatctcctgcggatctctgaacgtgaccctggagcacccactgttcatcggcggcatgtgccagaactgtaaaaactgttttctggagtgtgcctatcaatacgacgatgacggctaccagagctactgcaccatctgttgcggcggaagagaggtgctgatgtgtggaaataacaactgctgccggtgcttctgcgtggaatgcgtggacctgctggtgggccccggcgccgcccaggccgctattaaggaagatccttggaactgctacatgtgcggccacaagggcacatacggcctgctgagacggagagaggactggcctagcagactgcagatgttcttcgccaataaccacgaccaggagttcgacccccctaaggtgtaccctcccgtccccgccgagaagagaaagcccatccgggtcctgagcctgttcgatggcatcgccaccggtctgctggtgctgaaggacctgggcatccaggtggataggtacattgcctccgaggtgtgcgaggactccatcaccgtgggaatggtgcgtcatcagggcaagatcatgtacgtgggcgacgtgcggagcgtgacacagaagcatatccaggagtggggccctttcgacctggtgatcggcggcagcccttgcaatgacctgagcatcgtgaacccagcccggaagggcctgtacgagggaaccggcagactgttcttcgagttttacagactgctgcacgacgcccggcctaaggaaggcgacgaccggcccttcttttggctgttcgagaatgtggtggccatgggagtcagcgacaagcgggatattagccggttcctggagagcaaccccgtgatgatcgatgccaaggaagtgagcgccgcccaccgggccagatacttctggggcaatctgcctggcatgaacagacccctggccagcaccgtgaacgacaagctggagctgcaggagtgcctggagcacggccggatcgccaagttcagcaaggtgagaaccatcaccacccgaagcaacagcatcaaacaaggcaaggaccagcactttcctgtgttcatgaacgagaaggaggacatcctgtggtgtaccgagatggagagagtgttcgggttcccagtccactacacagatgtcagcaacatgtctagactggccagacagagactgctgggaagaagctggtccgtccctgtgatcagacacctgttcgcccctctgaaggagtacttcgcctgcgtgagcagcggcaacagcaacgccaacagccggggccccagcttctctagcggcctggtgccactgtccctgagagggagccacatgggccccatggagatctacaaaaccgtgagcgcctggaagcggcagcctgtgcgcgtgctgagcctgtttcggaatatcgataaagtcctgaaaagcctgggattcctggagagcggctctggctccggcggtggcaccctgaagtacgtggaggatgtgacaaacgtggtcagacgggatgtggagaagtggggccccttcgatctggtgtacggcagcacccaacccctgggcagctcttgtgaccggtgccctggctggtacatgtttcagttccaccggatcctgcagtacgccctgccgagacaggagtcccagcggccattcttttggattttcatggacaacttgctgctgaccgaggatgaccaggaaactaccactcggttcctgcagaccgaagccgtgaccctgcaggacgtgagaggccgggactaccagaacgccatgcgggtgtggtccaacatccctggactgaaaagcaagcacgcacctctgacccctaaagaagaggagtacctgcaggcccaggtgcggagcagaagcaagctggacgcccctaaggtggatctgctggtgaagaattgcctcctgcccctgagagagtacttcaagtatttcagccagaatagtctgcccctgggcggcccaagcagcggcgcccctcctcccagcggcggcagcccagccggctccccaacctctaccgaggagggcacctctgagtccgccacccccgagagcggccctggcacctccaccgagcccagcgagggcagcgcacccggcagccctgccggcagccccacctccacagaggagggaaccagcaccgagcccagcgaaggcagcgccccaggcaccagcaccgagcctagtgagggcggctctggcggcggcagcgcccaggagattaaacggatcaacaagatcagaagaagacttgtgaaagacagcaacaccaagaaggccggcaagacaggccccatgaaaaccctgctggttagagtgatgacacccgatctgagagagcggctggaaaacctgagaaagaagcctgaaaatatcccccagcccatcagcaatacatctagagccaacctgaataagctgctgaccgattacaccgaaatgaagaaggcgatcctgcatgtgtactgggaagagttccagaaggaccctgtgggcctgatgagccgggtggcccagcctgccagcaagaagatcgatcagaacaagctgaaacctgagatggacgagaagggcaacctgaccaccgccggctttgcctgctctcagtgtggccagcccctgttcgtgtacaagctggagcaggtgtctgagaagggcaaggcttacaccaactacttcggacggtgcaatgtggccgagcacgaaaagctgatcctgctggcccagctgaagcccgagaaggatagcgacgaagccgtgacatatagcctgggaaagtttgggcagagggccctggatttctacagcattcatgtgaccaaggagtccacccaccccgtgaagcccctggcccagatcgccggaaacagatacgcctccggacctgtgggaaaggccctgagcgacgcatgtatgggcacaatcgcctccttcctgtctaagtaccaggacatcatcatcgaacaccagaaggtggtgaagggcaaccagaagagactggagagcctgcgggagctggccggcaaggaaaacctggaataccctagcgtgaccctgccacctcagcctcacaccaaggagggcgttgatgcctacaacgaagtgatcgcccgggtgcgaatgtgggtgaacctgaacctgtggcagaagctgaagctaagcagagatgatgccaagcctctgctgagactgaagggattcccttcctttcctctggtcgagagacaggccaacgaagtggactggtgggacatggtgtgtaacgtgaagaagctgatcaacgagaaaaaggaggatggcaaggtgttttggcagaatctggctggctacaagagacaggaagccctgagaccatacctgagcagcgaggaagatcggaagaagggaaagaaattcgctcggtaccagctgggcgacctgctgctgcacctggaaaagaagcacggcgaggactggggaaaggtgtacgacgaggcctgggagcggattgacaagaaagtggaaggcctgagcaagcacatcaagctggaagaggaacggagaagcgaggacgcccagagcaaggccgccctgaccgactggctgcgggctaaggccagcttcgtgatcgagggcctgaaggaggccgacaaggacgagttctgcagatgcgagctgaagctgcagaagtggtacggggacctgcggggaaagcccttcgccatcgaagccgagaacagcatcctggacatcagcggcttcagcaagcagtacaactgtgccttcatctggcagaaggacggcgtgaagaagctgaacctgtacctgatcatcaactacttcaagggcggcaagctgcggttcaagaagatcaaacctgaagccttcgaagccaacagattctacaccgtgatcaacaaaaagagcggcgagatcgtgcccatggaggtgaacttcaacttcgacgaccccaacctgatcatcctgcctctggcctttggcaagagacagggcagagaattcatctggaacgacctgctgtccctggaaaccggcagcctgaagctggccaacggaagagtgatcgagaagacactgtacaacagaagaacccggcaggatgagcctgccctgttcgtggccctgaccttcgagcggcgggaggtcctggactcctccaatatcaaaccaatgaacctgatcggcgtggcaagaggcgaaaacatccccgccgtgatcgccctgaccgaccccgagggctgcccactgagccggtttaaggatagcctgggaaacccaacccacatcctgagaatcggcgagagctataaggagaagcagcggaccatccaggccaagaaggaggtggagcagcggagagccggcggctacagccggaagtacgccagcaaagccaagaatctggcagacgatatggtgagaaacaccgctagagatctgctgtactacgccgtgacccaggatgccatgctgatcttcgccaacctgagccggggcttcggccggcagggcaagcggaccttcatggccgagagacagtacacacggatggaggactggctgaccgccaagctggcctacgagggcctgagcaagacctacctgtccaagacactggcccagtacacctccaagacatgcagcaactgtgggtttaccatcaccagcgccgactacgacagggtgctggagaagctgaagaagacagcaacaggctggatgaccacaattaacggcaaggagctgaaggtggagggccagattacctactacaacagatacaagagacagaacgtagtcaaggacctgtccgtcgagctggatagactgagcgaagaatctgtgaacaacgacatctcctcctggacaaagggcagaagcggagaagctctgagcctcctgaagaaaagattctcccatagacccgtgcaggagaagttcgtgtgcctgaactgcggcttcgagacacacgcagccgagcaagccgccctgaacatcgccagatcctggctgttcctgcggagccaggagtacaagaaataccagacaaacaagacaaccggcaacaccgataagagagccttcgtcgagacctggcagtccttttaccggaagaagcttaaggaggtgtggaaacctgccgtgcggtctggcggatctggcggaggctccacaagcagggagaggctggtgagcttcgaggacgtgaccgtggacttcagccaggaggagtggaggaggctggacagcgtgcagaggcacctgtaccaggacgtgatgctggagatctacagccacctgctggccgtgggctaccccgtgcccagccccggcgccatcttcaggatcaagaagaggaaggaggccaggaccggcgaggccaagctgccccacccctgctggtgccaggaggtggagagcaccagccccaagaaaaagagaaaagtctaagctgccttctgcggggcttgccttctggccatgcccttcttctctcccttgcacctgtacctcttggtctttgaataaagcctgagtaggaaggctagcaaaaaaaaaaaaaaaaaaaaaaaaaaaaaaaaaaaaaaaaaaaaaaaaaaaaaaaaaaaaaaaaaaaaaaaaaaaaaaaa

SEQ ID NO: 6794 - RNA, 5797 nt, synthetic construct
  source 1..5797: mol_type = other RNA
aggaaataagagagaaaagaagagtaagaagaaatataagagccaccatggcccctaagaagaagcgtaaagtgagccggatggaacgcctcgtctacgaggtgcggcagaagtgcagaaacatcgaggacatctgcatctcctgcggatctctgaacgtgaccctggagcacccactgttcatcggcggcatgtgccagaactgtaaaaactgttttctggagtgtgcctatcaatacgacgatgacggctaccagagctactgcaccatctgttgcggcggaagagaggtgctgatgtgtggaaataacaactgctgccggtgcttctgcgtggaatgcgtggacctgctggtgggccccggcgccgcccaggccgctattaaggaagatccttggaactgctacatgtgcggccacaagggcacatacggcctgctgagacggagagaggactggcctagcagactgcagatgttcttcgccaataaccacgaccaggagttcgacccccctaaggtgtaccctcccgtccccgccgagaagagaaagcccatccgggtcctgagcctgttcgatggcatcgccaccggtctgctggtgctgaaggacctgggcatccaggtggataggtacattgcctccgaggtgtgcgaggactccatcaccgtgggaatggtgcgtcatcagggcaagatcatgtacgtgggcgacgtgcggagcgtgacacagaagcatatccaggagtggggccctttcgacctggtgatcggcggcagcccttgcaatgacctgagcatcgtgaacccagcccggaagggcctgtacgagggaaccggcagactgttcttcgagttttacagactgctgcacgacgcccggcctaaggaaggcgacgaccggcccttcttttggctgttcgagaatgtggtggccatgggagtcagcgacaagcgggatattagccggttcctggagagcaaccccgtgatgatcgatgccaaggaagtgagcgccgcccaccgggccagatacttctggggcaatctgcctggcatgaacagacccctggccagcaccgtgaacgacaagctggagctgcaggagtgcctggagcacggccggatcgccaagttcagcaaggtgagaaccatcaccacccgaagcaacagcatcaaacaaggcaaggaccagcactttcctgtgttcatgaacgagaaggaggacatcctgtggtgtaccgagatggagagagtgttcgggttcccagtccactacacagatgtcagcaacatgtctagactggccagacagagactgctgggaagaagctggtccgtccctgtgatcagacacctgttcgcccctctgaaggagtacttcgcctgcgtgagcagcggcaacagcaacgccaacagccggggccccagcttctctagcggcctggtgccactgtccctgagagggagccacatgggccccatggagatctacaaaaccgtgagcgcctggaagcggcagcctgtgcgcgtgctgagcctgtttcggaatatcgataaagtcctgaaaagcctgggattcctggagagcggctctggctccggcggtggcaccctgaagtacgtggaggatgtgacaaacgtggtcagacgggatgtggagaagtggggccccttcgatctggtgtacggcagcacccaacccctgggcagctcttgtgaccggtgccctggctggtacatgtttcagttccaccggatcctgcagtacgccctgccgagacaggagtcccagcggccattcttttggattttcatggacaacttgctgctgaccgaggatgaccaggaaactaccactcggttcctgcagaccgaagccgtgaccctgcaggacgtgagaggccgggactaccagaacgccatgcgggtgtggtccaacatccctggactgaaaagcaagcacgcacctctgacccctaaagaagaggagtacctgcaggcccaggtgcggagcagaagcaagctggacgcccctaaggtggatctgctggtgaagaattgcctcctgcccctgagagagtacttcaagtatttcagccagaatagtctgcccctgggcggcccaagcagcggcgcccctcctcccagcggcggcagcccagccggctccccaacctctaccgaggagggcacctctgagtccgccacccccgagagcggccctggcacctccaccgagcccagcgagggcagcgcacccggcagccctgccggcagccccacctccacagaggagggaaccagcaccgagcccagcgaaggcagcgccccaggcaccagcaccgagcctagtgagggcggctctggcggcggcagcgcccaggagattaaacggatcaacaagatcagaagaagacttgtgaaagacagcaacaccaagaaggccggcaagacaggccccatgaaaaccctgctggttagagtgatgacacccgatctgagagagcggctggaaaacctgagaaagaagcctgaaaatatcccccagcccatcagcaatacatctagagccaacctgaataagctgctgaccgattacaccgaaatgaagaaggcgatcctgcatgtgtactgggaagagttccagaaggaccctgtgggcctgatgagccgggtggcccagcctgccagcaagaagatcgatcagaacaagctgaaacctgagatggacgagaagggcaacctgaccaccgccggctttgcctgctctcagtgtggccagcccctgttcgtgtacaagctggagcaggtgtctgagaagggcaaggcttacaccaactacttcggacggtgcaatgtggccgagcacgaaaagctgatcctgctggcccagctgaagcccgagaaggatagcgacgaagccgtgacatatagcctgggaaagtttgggcagagggccctggatttctacagcattcatgtgaccaaggagtccacccaccccgtgaagcccctggcccagatcgccggaaacagatacgcctccggacctgtgggaaaggccctgagcgacgcatgtatgggcacaatcgcctccttcctgtctaagtaccaggacatcatcatcgaacaccagaaggtggtgaagggcaaccagaagagactggagagcctgcgggagctggccggcaaggaaaacctggaataccctagcgtgaccctgccacctcagcctcacaccaaggagggcgttgatgcctacaacgaagtgatcgcccgggtgcgaatgtgggtgaacctgaacctgtggcagaagctgaagctaagcagagatgatgccaagcctctgctgagactgaagggattcccttcctttcctctggtcgagagacaggccaacgaagtggactggtgggacatggtgtgtaacgtgaagaagctgatcaacgagaaaaaggaggatggcaaggtgttttggcagaatctggctggctacaagagacaggaagccctgagaccatacctgagcagcgaggaagatcggaagaagggaaagaaattcgctcggtaccagctgggcgacctgctgctgcacctggaaaagaagcacggcgaggactggggaaaggtgtacgacgaggcctgggagcggattgacaagaaagtggaaggcctgagcaagcacatcaagctggaagaggaacggagaagcgaggacgcccagagcaaggccgccctgaccgactggctgcgggctaaggccagcttcgtgatcgagggcctgaaggaggccgacaaggacgagttctgcagatgcgagctgaagctgcagaagtggtacggggacctgcggggaaagcccttcgccatcgaagccgagaacagcatcctggacatcagcggcttcagcaagcagtacaactgtgccttcatctggcagaaggacggcgtgaagaagctgaacctgtacctgatcatcaactacttcaagggcggcaagctgcggttcaagaagatcaaacctgaagccttcgaagccaacagattctacaccgtgatcaacaaaaagagcggcgagatcgtgcccatggaggtgaacttcaacttcgacgaccccaacctgatcatcctgcctctggcctttggcaagagacagggcagagaattcatctggaacgacctgctgtccctggaaaccggcagcctgaagctggccaacggaagagtgatcgagaagacactgtacaacagaagaacccggcaggatgagcctgccctgttcgtggccctgaccttcgagcggcgggaggtcctggactcctccaatatcaaaccaatgaacctgatcggcgtggcaagaggcgaaaacatccccgccgtgatcgccctgaccgaccccgagggctgcccactgagccggtttaaggatagcctgggaaacccaacccacatcctgagaatcggcgagagctataaggagaagcagcggaccatccaggccaagaaggaggtggagcagcggagagccggcggctacagccggaagtacgccagcaaagccaagaatctggcagacgatatggtgagaaacaccgctagagatctgctgtactacgccgtgacccaggatgccatgctgatcttcgccaacctgagccggggcttcggccggcagggcaagcggaccttcatggccgagagacagtacacacggatggaggactggctgaccgccaagctggcctacgagggcctgagcaagacctacctgtccaagacactggcccagtacacctccaagacatgcagcaactgtgggtttaccatcaccagcgccgactacgacagggtgctggagaagctgaagaagacagcaacaggctggatgaccacaattaacggcaaggagctgaaggtggagggccagattacctactacaacagatacaagagacagaacgtagtcaaggacctgtccgtcgagctggatagactgagcgaagaatctgtgaacaacgacatctcctcctggacaaagggcagaagcggagaagctctgagcctcctgaagaaaagattctcccatagacccgtgcaggagaagttcgtgtgcctgaactgcggcttcgagacacacgcagccgagcaagccgccctgaacatcgccagatcctggctgttcctgcggagccaggagtacaagaaataccagacaaacaagacaaccggcaacaccgataagagagccttcgtcgagacctggcagtccttttaccggaagaagcttaaggaggtgtggaaacctgccgtgcggtctggcggatctggcggaggctccacaagcgcctgggaggtggtgaccttccaggacgtggccgtggacttcaccagggaggagtggaggctgctgagccccccccagaaggagctgtacaaggaggtgatgctggagaacgtgaggaacctgctgagcgtgggcctgcccgccccccccgacgacgtggtgagctacctggagcagagggagggccccagcatgctggaccaggaggacctgaggacctgcggccccgagggcgagatcaggaccagccccaagaaaaagagaaaagtctaagctgccttctgcggggcttgccttctggccatgcccttcttctctcccttgcacctgtacctcttggtctttgaataaagcctgagtaggaaggctagcaaaaaaaaaaaaaaaaaaaaaaaaaaaaaaaaaaaaaaaaaaaaaaaaaaaaaaaaaaaaaaaaaaaaaaaaaaaaaaaa

SEQ ID NO: 6795 - RNA, 5797 nt, synthetic construct
  source 1..5797: mol_type = other RNA
aggaaataagagagaaaagaagagtaagaagaaatataagagccaccatggcccctaagaagaagcgtaaagtgagccggatggaacgcctcgtctacgaggtgcggcagaagtgcagaaacatcgaggacatctgcatctcctgcggatctctgaacgtgaccctggagcacccactgttcatcggcggcatgtgccagaactgtaaaaactgttttctggagtgtgcctatcaatacgacgatgacggctaccagagctactgcaccatctgttgcggcggaagagaggtgctgatgtgtggaaataacaactgctgccggtgcttctgcgtggaatgcgtggacctgctggtgggccccggcgccgcccaggccgctattaaggaagatccttggaactgctacatgtgcggccacaagggcacatacggcctgctgagacggagagaggactggcctagcagactgcagatgttcttcgccaataaccacgaccaggagttcgacccccctaaggtgtaccctcccgtccccgccgagaagagaaagcccatccgggtcctgagcctgttcgatggcatcgccaccggtctgctggtgctgaaggacctgggcatccaggtggataggtacattgcctccgaggtgtgcgaggactccatcaccgtgggaatggtgcgtcatcagggcaagatcatgtacgtgggcgacgtgcggagcgtgacacagaagcatatccaggagtggggccctttcgacctggtgatcggcggcagcccttgcaatgacctgagcatcgtgaacccagcccggaagggcctgtacgagggaaccggcagactgttcttcgagttttacagactgctgcacgacgcccggcctaaggaaggcgacgaccggcccttcttttggctgttcgagaatgtggtggccatgggagtcagcgacaagcgggatattagccggttcctggagagcaaccccgtgatgatcgatgccaaggaagtgagcgccgcccaccgggccagatacttctggggcaatctgcctggcatgaacagacccctggccagcaccgtgaacgacaagctggagctgcaggagtgcctggagcacggccggatcgccaagttcagcaaggtgagaaccatcaccacccgaagcaacagcatcaaacaaggcaaggaccagcactttcctgtgttcatgaacgagaaggaggacatcctgtggtgtaccgagatggagagagtgttcgggttcccagtccactacacagatgtcagcaacatgtctagactggccagacagagactgctgggaagaagctggtccgtccctgtgatcagacacctgttcgcccctctgaaggagtacttcgcctgcgtgagcagcggcaacagcaacgccaacagccggggccccagcttctctagcggcctggtgccactgtccctgagagggagccacatgggccccatggagatctacaaaaccgtgagcgcctggaagcggcagcctgtgcgcgtgctgagcctgtttcggaatatcgataaagtcctgaaaagcctgggattcctggagagcggctctggctccggcggtggcaccctgaagtacgtggaggatgtgacaaacgtggtcagacgggatgtggagaagtggggccccttcgatctggtgtacggcagcacccaacccctgggcagctcttgtgaccggtgccctggctggtacatgtttcagttccaccggatcctgcagtacgccctgccgagacaggagtcccagcggccattcttttggattttcatggacaacttgctgctgaccgaggatgaccaggaaactaccactcggttcctgcagaccgaagccgtgaccctgcaggacgtgagaggccgggactaccagaacgccatgcgggtgtggtccaacatccctggactgaaaagcaagcacgcacctctgacccctaaagaagaggagtacctgcaggcccaggtgcggagcagaagcaagctggacgcccctaaggtggatctgctggtgaagaattgcctcctgcccctgagagagtacttcaagtatttcagccagaatagtctgcccctgggcggcccaagcagcggcgcccctcctcccagcggcggcagcccagccggctccccaacctctaccgaggagggcacctctgagtccgccacccccgagagcggccctggcacctccaccgagcccagcgagggcagcgcacccggcagccctgccggcagccccacctccacagaggagggaaccagcaccgagcccagcgaaggcagcgccccaggcaccagcaccgagcctagtgagggcggctctggcggcggcagcgcccaggagattaaacggatcaacaagatcagaagaagacttgtgaaagacagcaacaccaagaaggccggcaagacaggccccatgaaaaccctgctggttagagtgatgacacccgatctgagagagcggctggaaaacctgagaaagaagcctgaaaatatcccccagcccatcagcaatacatctagagccaacctgaataagctgctgaccgattacaccgaaatgaagaaggcgatcctgcatgtgtactgggaagagttccagaaggaccctgtgggcctgatgagccgggtggcccagcctgccagcaagaagatcgatcagaacaagctgaaacctgagatggacgagaagggcaacctgaccaccgccggctttgcctgctctcagtgtggccagcccctgttcgtgtacaagctggagcaggtgtctgagaagggcaaggcttacaccaactacttcggacggtgcaatgtggccgagcacgaaaagctgatcctgctggcccagctgaagcccgagaaggatagcgacgaagccgtgacatatagcctgggaaagtttgggcagagggccctggatttctacagcattcatgtgaccaaggagtccacccaccccgtgaagcccctggcccagatcgccggaaacagatacgcctccggacctgtgggaaaggccctgagcgacgcatgtatgggcacaatcgcctccttcctgtctaagtaccaggacatcatcatcgaacaccagaaggtggtgaagggcaaccagaagagactggagagcctgcgggagctggccggcaaggaaaacctggaataccctagcgtgaccctgccacctcagcctcacaccaaggagggcgttgatgcctacaacgaagtgatcgcccgggtgcgaatgtgggtgaacctgaacctgtggcagaagctgaagctaagcagagatgatgccaagcctctgctgagactgaagggattcccttcctttcctctggtcgagagacaggccaacgaagtggactggtgggacatggtgtgtaacgtgaagaagctgatcaacgagaaaaaggaggatggcaaggtgttttggcagaatctggctggctacaagagacaggaagccctgagaccatacctgagcagcgaggaagatcggaagaagggaaagaaattcgctcggtaccagctgggcgacctgctgctgcacctggaaaagaagcacggcgaggactggggaaaggtgtacgacgaggcctgggagcggattgacaagaaagtggaaggcctgagcaagcacatcaagctggaagaggaacggagaagcgaggacgcccagagcaaggccgccctgaccgactggctgcgggctaaggccagcttcgtgatcgagggcctgaaggaggccgacaaggacgagttctgcagatgcgagctgaagctgcagaagtggtacggggacctgcggggaaagcccttcgccatcgaagccgagaacagcatcctggacatcagcggcttcagcaagcagtacaactgtgccttcatctggcagaaggacggcgtgaagaagctgaacctgtacctgatcatcaactacttcaagggcggcaagctgcggttcaagaagatcaaacctgaagccttcgaagccaacagattctacaccgtgatcaacaaaaagagcggcgagatcgtgcccatggaggtgaacttcaacttcgacgaccccaacctgatcatcctgcctctggcctttggcaagagacagggcagagaattcatctggaacgacctgctgtccctggaaaccggcagcctgaagctggccaacggaagagtgatcgagaagacactgtacaacagaagaacccggcaggatgagcctgccctgttcgtggccctgaccttcgagcggcgggaggtcctggactcctccaatatcaaaccaatgaacctgatcggcgtggcaagaggcgaaaacatccccgccgtgatcgccctgaccgaccccgagggctgcccactgagccggtttaaggatagcctgggaaacccaacccacatcctgagaatcggcgagagctataaggagaagcagcggaccatccaggccaagaaggaggtggagcagcggagagccggcggctacagccggaagtacgccagcaaagccaagaatctggcagacgatatggtgagaaacaccgctagagatctgctgtactacgccgtgacccaggatgccatgctgatcttcgccaacctgagccggggcttcggccggcagggcaagcggaccttcatggccgagagacagtacacacggatggaggactggctgaccgccaagctggcctacgagggcctgagcaagacctacctgtccaagacactggcccagtacacctccaagacatgcagcaactgtgggtttaccatcaccagcgccgactacgacagggtgctggagaagctgaagaagacagcaacaggctggatgaccacaattaacggcaaggagctgaaggtggagggccagattacctactacaacagatacaagagacagaacgtagtcaaggacctgtccgtcgagctggatagactgagcgaagaatctgtgaacaacgacatctcctcctggacaaagggcagaagcggagaagctctgagcctcctgaagaaaagattctcccatagacccgtgcaggagaagttcgtgtgcctgaactgcggcttcgagacacacgcagccgagcaagccgccctgaacatcgccagatcctggctgttcctgcggagccaggagtacaagaaataccagacaaacaagacaaccggcaacaccgataagagagccttcgtcgagacctggcagtccttttaccggaagaagcttaaggaggtgtggaaacctgccgtgcggtctggcggatctggcggaggctccacaagccccaagggcctgctgaccttcagggacgtggccatcgagttcagccaggaggagtggggctgcctgaaccacacccagagggagctgtacagggacgtgatgctggagaactacggcaacctgctgttcctgggcctgatcgtgagcaagcccgacctggtgagcttcctggagcagaagaaggagccctggagcgtgaagaggaagaagagggtgaccatccaccccgcccagaggttcggcaccagccccaagaaaaagagaaaagtctaagctgccttctgcggggcttgccttctggccatgcccttcttctctcccttgcacctgtacctcttggtctttgaataaagcctgagtaggaaggctagcaaaaaaaaaaaaaaaaaaaaaaaaaaaaaaaaaaaaaaaaaaaaaaaaaaaaaaaaaaaaaaaaaaaaaaaaaaaaaaaa

SEQ ID NO: 6796 - RNA, 5797 nt, synthetic construct
  source 1..5797: mol_type = other RNA
aggaaataagagagaaaagaagagtaagaagaaatataagagccaccatggcccctaagaagaagcgtaaagtgagccggatggaacgcctcgtctacgaggtgcggcagaagtgcagaaacatcgaggacatctgcatctcctgcggatctctgaacgtgaccctggagcacccactgttcatcggcggcatgtgccagaactgtaaaaactgttttctggagtgtgcctatcaatacgacgatgacggctaccagagctactgcaccatctgttgcggcggaagagaggtgctgatgtgtggaaataacaactgctgccggtgcttctgcgtggaatgcgtggacctgctggtgggccccggcgccgcccaggccgctattaaggaagatccttggaactgctacatgtgcggccacaagggcacatacggcctgctgagacggagagaggactggcctagcagactgcagatgttcttcgccaataaccacgaccaggagttcgacccccctaaggtgtaccctcccgtccccgccgagaagagaaagcccatccgggtcctgagcctgttcgatggcatcgccaccggtctgctggtgctgaaggacctgggcatccaggtggataggtacattgcctccgaggtgtgcgaggactccatcaccgtgggaatggtgcgtcatcagggcaagatcatgtacgtgggcgacgtgcggagcgtgacacagaagcatatccaggagtggggccctttcgacctggtgatcggcggcagcccttgcaatgacctgagcatcgtgaacccagcccggaagggcctgtacgagggaaccggcagactgttcttcgagttttacagactgctgcacgacgcccggcctaaggaaggcgacgaccggcccttcttttggctgttcgagaatgtggtggccatgggagtcagcgacaagcgggatattagccggttcctggagagcaaccccgtgatgatcgatgccaaggaagtgagcgccgcccaccgggccagatacttctggggcaatctgcctggcatgaacagacccctggccagcaccgtgaacgacaagctggagctgcaggagtgcctggagcacggccggatcgccaagttcagcaaggtgagaaccatcaccacccgaagcaacagcatcaaacaaggcaaggaccagcactttcctgtgttcatgaacgagaaggaggacatcctgtggtgtaccgagatggagagagtgttcgggttcccagtccactacacagatgtcagcaacatgtctagactggccagacagagactgctgggaagaagctggtccgtccctgtgatcagacacctgttcgcccctctgaaggagtacttcgcctgcgtgagcagcggcaacagcaacgccaacagccggggccccagcttctctagcggcctggtgccactgtccctgagagggagccacatgggccccatggagatctacaaaaccgtgagcgcctggaagcggcagcctgtgcgcgtgctgagcctgtttcggaatatcgataaagtcctgaaaagcctgggattcctggagagcggctctggctccggcggtggcaccctgaagtacgtggaggatgtgacaaacgtggtcagacgggatgtggagaagtggggccccttcgatctggtgtacggcagcacccaacccctgggcagctcttgtgaccggtgccctggctggtacatgtttcagttccaccggatcctgcagtacgccctgccgagacaggagtcccagcggccattcttttggattttcatggacaacttgctgctgaccgaggatgaccaggaaactaccactcggttcctgcagaccgaagccgtgaccctgcaggacgtgagaggccgggactaccagaacgccatgcgggtgtggtccaacatccctggactgaaaagcaagcacgcacctctgacccctaaagaagaggagtacctgcaggcccaggtgcggagcagaagcaagctggacgcccctaaggtggatctgctggtgaagaattgcctcctgcccctgagagagtacttcaagtatttcagccagaatagtctgcccctgggcggcccaagcagcggcgcccctcctcccagcggcggcagcccagccggctccccaacctctaccgaggagggcacctctgagtccgccacccccgagagcggccctggcacctccaccgagcccagcgagggcagcgcacccggcagccctgccggcagccccacctccacagaggagggaaccagcaccgagcccagcgaaggcagcgccccaggcaccagcaccgagcctagtgagggcggctctggcggcggcagcgcccaggagattaaacggatcaacaagatcagaagaagacttgtgaaagacagcaacaccaagaaggccggcaagacaggccccatgaaaaccctgctggttagagtgatgacacccgatctgagagagcggctggaaaacctgagaaagaagcctgaaaatatcccccagcccatcagcaatacatctagagccaacctgaataagctgctgaccgattacaccgaaatgaagaaggcgatcctgcatgtgtactgggaagagttccagaaggaccctgtgggcctgatgagccgggtggcccagcctgccagcaagaagatcgatcagaacaagctgaaacctgagatggacgagaagggcaacctgaccaccgccggctttgcctgctctcagtgtggccagcccctgttcgtgtacaagctggagcaggtgtctgagaagggcaaggcttacaccaactacttcggacggtgcaatgtggccgagcacgaaaagctgatcctgctggcccagctgaagcccgagaaggatagcgacgaagccgtgacatatagcctgggaaagtttgggcagagggccctggatttctacagcattcatgtgaccaaggagtccacccaccccgtgaagcccctggcccagatcgccggaaacagatacgcctccggacctgtgggaaaggccctgagcgacgcatgtatgggcacaatcgcctccttcctgtctaagtaccaggacatcatcatcgaacaccagaaggtggtgaagggcaaccagaagagactggagagcctgcgggagctggccggcaaggaaaacctggaataccctagcgtgaccctgccacctcagcctcacaccaaggagggcgttgatgcctacaacgaagtgatcgcccgggtgcgaatgtgggtgaacctgaacctgtggcagaagctgaagctaagcagagatgatgccaagcctctgctgagactgaagggattcccttcctttcctctggtcgagagacaggccaacgaagtggactggtgggacatggtgtgtaacgtgaagaagctgatcaacgagaaaaaggaggatggcaaggtgttttggcagaatctggctggctacaagagacaggaagccctgagaccatacctgagcagcgaggaagatcggaagaagggaaagaaattcgctcggtaccagctgggcgacctgctgctgcacctggaaaagaagcacggcgaggactggggaaaggtgtacgacgaggcctgggagcggattgacaagaaagtggaaggcctgagcaagcacatcaagctggaagaggaacggagaagcgaggacgcccagagcaaggccgccctgaccgactggctgcgggctaaggccagcttcgtgatcgagggcctgaaggaggccgacaaggacgagttctgcagatgcgagctgaagctgcagaagtggtacggggacctgcggggaaagcccttcgccatcgaagccgagaacagcatcctggacatcagcggcttcagcaagcagtacaactgtgccttcatctggcagaaggacggcgtgaagaagctgaacctgtacctgatcatcaactacttcaagggcggcaagctgcggttcaagaagatcaaacctgaagccttcgaagccaacagattctacaccgtgatcaacaaaaagagcggcgagatcgtgcccatggaggtgaacttcaacttcgacgaccccaacctgatcatcctgcctctggcctttggcaagagacagggcagagaattcatctggaacgacctgctgtccctggaaaccggcagcctgaagctggccaacggaagagtgatcgagaagacactgtacaacagaagaacccggcaggatgagcctgccctgttcgtggccctgaccttcgagcggcgggaggtcctggactcctccaatatcaaaccaatgaacctgatcggcgtggcaagaggcgaaaacatccccgccgtgatcgccctgaccgaccccgagggctgcccactgagccggtttaaggatagcctgggaaacccaacccacatcctgagaatcggcgagagctataaggagaagcagcggaccatccaggccaagaaggaggtggagcagcggagagccggcggctacagccggaagtacgccagcaaagccaagaatctggcagacgatatggtgagaaacaccgctagagatctgctgtactacgccgtgacccaggatgccatgctgatcttcgccaacctgagccggggcttcggccggcagggcaagcggaccttcatggccgagagacagtacacacggatggaggactggctgaccgccaagctggcctacgagggcctgagcaagacctacctgtccaagacactggcccagtacacctccaagacatgcagcaactgtgggtttaccatcaccagcgccgactacgacagggtgctggagaagctgaagaagacagcaacaggctggatgaccacaattaacggcaaggagctgaaggtggagggccagattacctactacaacagatacaagagacagaacgtagtcaaggacctgtccgtcgagctggatagactgagcgaagaatctgtgaacaacgacatctcctcctggacaaagggcagaagcggagaagctctgagcctcctgaagaaaagattctcccatagacccgtgcaggagaagttcgtgtgcctgaactgcggcttcgagacacacgcagccgagcaagccgccctgaacatcgccagatcctggctgttcctgcggagccaggagtacaagaaataccagacaaacaagacaaccggcaacaccgataagagagccttcgtcgagacctggcagtccttttaccggaagaagcttaaggaggtgtggaaacctgccgtgcggtctggcggatctggcggaggctccacaagcccccaggagagcgtgaccttcaaggacatcgccgtggacttcacccaggaggagtgggccctgctggacaccagccagaggaagctgtacagggacgtgatgctggagaacatcagccacctggtgagcgtgggctaccacctgtgcaagagcgacgtgatcagccagctggagcagggcgtggagctgtggagggagggcaggggcttcccccagggcctgaaccccgacaggaagagcggcaccagccccaagaaaaagagaaaagtctaagctgccttctgcggggcttgccttctggccatgcccttcttctctcccttgcacctgtacctcttggtctttgaataaagcctgagtaggaaggctagcaaaaaaaaaaaaaaaaaaaaaaaaaaaaaaaaaaaaaaaaaaaaaaaaaaaaaaaaaaaaaaaaaaaaaaaaaaaaaaaa

SEQ ID NO: 6797 - RNA, 5797 nt, synthetic construct
  source 1..5797: mol_type = other RNA
aggaaataagagagaaaagaagagtaagaagaaatataagagccaccatggcccctaagaagaagcgtaaagtgagccggatggaacgcctcgtctacgaggtgcggcagaagtgcagaaacatcgaggacatctgcatctcctgcggatctctgaacgtgaccctggagcacccactgttcatcggcggcatgtgccagaactgtaaaaactgttttctggagtgtgcctatcaatacgacgatgacggctaccagagctactgcaccatctgttgcggcggaagagaggtgctgatgtgtggaaataacaactgctgccggtgcttctgcgtggaatgcgtggacctgctggtgggccccggcgccgcccaggccgctattaaggaagatccttggaactgctacatgtgcggccacaagggcacatacggcctgctgagacggagagaggactggcctagcagactgcagatgttcttcgccaataaccacgaccaggagttcgacccccctaaggtgtaccctcccgtccccgccgagaagagaaagcccatccgggtcctgagcctgttcgatggcatcgccaccggtctgctggtgctgaaggacctgggcatccaggtggataggtacattgcctccgaggtgtgcgaggactccatcaccgtgggaatggtgcgtcatcagggcaagatcatgtacgtgggcgacgtgcggagcgtgacacagaagcatatccaggagtggggccctttcgacctggtgatcggcggcagcccttgcaatgacctgagcatcgtgaacccagcccggaagggcctgtacgagggaaccggcagactgttcttcgagttttacagactgctgcacgacgcccggcctaaggaaggcgacgaccggcccttcttttggctgttcgagaatgtggtggccatgggagtcagcgacaagcgggatattagccggttcctggagagcaaccccgtgatgatcgatgccaaggaagtgagcgccgcccaccgggccagatacttctggggcaatctgcctggcatgaacagacccctggccagcaccgtgaacgacaagctggagctgcaggagtgcctggagcacggccggatcgccaagttcagcaaggtgagaaccatcaccacccgaagcaacagcatcaaacaaggcaaggaccagcactttcctgtgttcatgaacgagaaggaggacatcctgtggtgtaccgagatggagagagtgttcgggttcccagtccactacacagatgtcagcaacatgtctagactggccagacagagactgctgggaagaagctggtccgtccctgtgatcagacacctgttcgcccctctgaaggagtacttcgcctgcgtgagcagcggcaacagcaacgccaacagccggggccccagcttctctagcggcctggtgccactgtccctgagagggagccacatgggccccatggagatctacaaaaccgtgagcgcctggaagcggcagcctgtgcgcgtgctgagcctgtttcggaatatcgataaagtcctgaaaagcctgggattcctggagagcggctctggctccggcggtggcaccctgaagtacgtggaggatgtgacaaacgtggtcagacgggatgtggagaagtggggccccttcgatctggtgtacggcagcacccaacccctgggcagctcttgtgaccggtgccctggctggtacatgtttcagttccaccggatcctgcagtacgccctgccgagacaggagtcccagcggccattcttttggattttcatggacaacttgctgctgaccgaggatgaccaggaaactaccactcggttcctgcagaccgaagccgtgaccctgcaggacgtgagaggccgggactaccagaacgccatgcgggtgtggtccaacatccctggactgaaaagcaagcacgcacctctgacccctaaagaagaggagtacctgcaggcccaggtgcggagcagaagcaagctggacgcccctaaggtggatctgctggtgaagaattgcctcctgcccctgagagagtacttcaagtatttcagccagaatagtctgcccctgggcggcccaagcagcggcgcccctcctcccagcggcggcagcccagccggctccccaacctctaccgaggagggcacctctgagtccgccacccccgagagcggccctggcacctccaccgagcccagcgagggcagcgcacccggcagccctgccggcagccccacctccacagaggagggaaccagcaccgagcccagcgaaggcagcgccccaggcaccagcaccgagcctagtgagggcggctctggcggcggcagcgcccaggagattaaacggatcaacaagatcagaagaagacttgtgaaagacagcaacaccaagaaggccggcaagacaggccccatgaaaaccctgctggttagagtgatgacacccgatctgagagagcggctggaaaacctgagaaagaagcctgaaaatatcccccagcccatcagcaatacatctagagccaacctgaataagctgctgaccgattacaccgaaatgaagaaggcgatcctgcatgtgtactgggaagagttccagaaggaccctgtgggcctgatgagccgggtggcccagcctgccagcaagaagatcgatcagaacaagctgaaacctgagatggacgagaagggcaacctgaccaccgccggctttgcctgctctcagtgtggccagcccctgttcgtgtacaagctggagcaggtgtctgagaagggcaaggcttacaccaactacttcggacggtgcaatgtggccgagcacgaaaagctgatcctgctggcccagctgaagcccgagaaggatagcgacgaagccgtgacatatagcctgggaaagtttgggcagagggccctggatttctacagcattcatgtgaccaaggagtccacccaccccgtgaagcccctggcccagatcgccggaaacagatacgcctccggacctgtgggaaaggccctgagcgacgcatgtatgggcacaatcgcctccttcctgtctaagtaccaggacatcatcatcgaacaccagaaggtggtgaagggcaaccagaagagactggagagcctgcgggagctggccggcaaggaaaacctggaataccctagcgtgaccctgccacctcagcctcacaccaaggagggcgttgatgcctacaacgaagtgatcgcccgggtgcgaatgtgggtgaacctgaacctgtggcagaagctgaagctaagcagagatgatgccaagcctctgctgagactgaagggattcccttcctttcctctggtcgagagacaggccaacgaagtggactggtgggacatggtgtgtaacgtgaagaagctgatcaacgagaaaaaggaggatggcaaggtgttttggcagaatctggctggctacaagagacaggaagccctgagaccatacctgagcagcgaggaagatcggaagaagggaaagaaattcgctcggtaccagctgggcgacctgctgctgcacctggaaaagaagcacggcgaggactggggaaaggtgtacgacgaggcctgggagcggattgacaagaaagtggaaggcctgagcaagcacatcaagctggaagaggaacggagaagcgaggacgcccagagcaaggccgccctgaccgactggctgcgggctaaggccagcttcgtgatcgagggcctgaaggaggccgacaaggacgagttctgcagatgcgagctgaagctgcagaagtggtacggggacctgcggggaaagcccttcgccatcgaagccgagaacagcatcctggacatcagcggcttcagcaagcagtacaactgtgccttcatctggcagaaggacggcgtgaagaagctgaacctgtacctgatcatcaactacttcaagggcggcaagctgcggttcaagaagatcaaacctgaagccttcgaagccaacagattctacaccgtgatcaacaaaaagagcggcgagatcgtgcccatggaggtgaacttcaacttcgacgaccccaacctgatcatcctgcctctggcctttggcaagagacagggcagagaattcatctggaacgacctgctgtccctggaaaccggcagcctgaagctggccaacggaagagtgatcgagaagacactgtacaacagaagaacccggcaggatgagcctgccctgttcgtggccctgaccttcgagcggcgggaggtcctggactcctccaatatcaaaccaatgaacctgatcggcgtggcaagaggcgaaaacatccccgccgtgatcgccctgaccgaccccgagggctgcccactgagccggtttaaggatagcctgggaaacccaacccacatcctgagaatcggcgagagctataaggagaagcagcggaccatccaggccaagaaggaggtggagcagcggagagccggcggctacagccggaagtacgccagcaaagccaagaatctggcagacgatatggtgagaaacaccgctagagatctgctgtactacgccgtgacccaggatgccatgctgatcttcgccaacctgagccggggcttcggccggcagggcaagcggaccttcatggccgagagacagtacacacggatggaggactggctgaccgccaagctggcctacgagggcctgagcaagacctacctgtccaagacactggcccagtacacctccaagacatgcagcaactgtgggtttaccatcaccagcgccgactacgacagggtgctggagaagctgaagaagacagcaacaggctggatgaccacaattaacggcaaggagctgaaggtggagggccagattacctactacaacagatacaagagacagaacgtagtcaaggacctgtccgtcgagctggatagactgagcgaagaatctgtgaacaacgacatctcctcctggacaaagggcagaagcggagaagctctgagcctcctgaagaaaagattctcccatagacccgtgcaggagaagttcgtgtgcctgaactgcggcttcgagacacacgcagccgagcaagccgccctgaacatcgccagatcctggctgttcctgcggagccaggagtacaagaaataccagacaaacaagacaaccggcaacaccgataagagagccttcgtcgagacctggcagtccttttaccggaagaagcttaaggaggtgtggaaacctgccgtgcggtctggcggatctggcggaggctccacaagcagcaagggcagcctgatgttcagggacgtgagcatcgacttcagccaggaggagtgggagtgcctggacagcggccagatgaacctgtacaaggaggtgatgctggagaacttcagcaacctggtgagcgtgggcctgagcagcagcaagcccgccgtgatcagcctgctggagcagggcagggagccctggatggtggacagggagctgaccaggggcctgtgcagcgacctggagagcatgaccagccccaagaaaaagagaaaagtctaagctgccttctgcggggcttgccttctggccatgcccttcttctctcccttgcacctgtacctcttggtctttgaataaagcctgagtaggaaggctagcaaaaaaaaaaaaaaaaaaaaaaaaaaaaaaaaaaaaaaaaaaaaaaaaaaaaaaaaaaaaaaaaaaaaaaaaaaaaaaaa

SEQ ID NO: 6798 - RNA, 5797 nt, synthetic construct
  source 1..5797: mol_type = other RNA
aggaaataagagagaaaagaagagtaagaagaaatataagagccaccatggcccctaagaagaagcgtaaagtgagccggatggaacgcctcgtctacgaggtgcggcagaagtgcagaaacatcgaggacatctgcatctcctgcggatctctgaacgtgaccctggagcacccactgttcatcggcggcatgtgccagaactgtaaaaactgttttctggagtgtgcctatcaatacgacgatgacggctaccagagctactgcaccatctgttgcggcggaagagaggtgctgatgtgtggaaataacaactgctgccggtgcttctgcgtggaatgcgtggacctgctggtgggccccggcgccgcccaggccgctattaaggaagatccttggaactgctacatgtgcggccacaagggcacatacggcctgctgagacggagagaggactggcctagcagactgcagatgttcttcgccaataaccacgaccaggagttcgacccccctaaggtgtaccctcccgtccccgccgagaagagaaagcccatccgggtcctgagcctgttcgatggcatcgccaccggtctgctggtgctgaaggacctgggcatccaggtggataggtacattgcctccgaggtgtgcgaggactccatcaccgtgggaatggtgcgtcatcagggcaagatcatgtacgtgggcgacgtgcggagcgtgacacagaagcatatccaggagtggggccctttcgacctggtgatcggcggcagcccttgcaatgacctgagcatcgtgaacccagcccggaagggcctgtacgagggaaccggcagactgttcttcgagttttacagactgctgcacgacgcccggcctaaggaaggcgacgaccggcccttcttttggctgttcgagaatgtggtggccatgggagtcagcgacaagcgggatattagccggttcctggagagcaaccccgtgatgatcgatgccaaggaagtgagcgccgcccaccgggccagatacttctggggcaatctgcctggcatgaacagacccctggccagcaccgtgaacgacaagctggagctgcaggagtgcctggagcacggccggatcgccaagttcagcaaggtgagaaccatcaccacccgaagcaacagcatcaaacaaggcaaggaccagcactttcctgtgttcatgaacgagaaggaggacatcctgtggtgtaccgagatggagagagtgttcgggttcccagtccactacacagatgtcagcaacatgtctagactggccagacagagactgctgggaagaagctggtccgtccctgtgatcagacacctgttcgcccctctgaaggagtacttcgcctgcgtgagcagcggcaacagcaacgccaacagccggggccccagcttctctagcggcctggtgccactgtccctgagagggagccacatgggccccatggagatctacaaaaccgtgagcgcctggaagcggcagcctgtgcgcgtgctgagcctgtttcggaatatcgataaagtcctgaaaagcctgggattcctggagagcggctctggctccggcggtggcaccctgaagtacgtggaggatgtgacaaacgtggtcagacgggatgtggagaagtggggccccttcgatctggtgtacggcagcacccaacccctgggcagctcttgtgaccggtgccctggctggtacatgtttcagttccaccggatcctgcagtacgccctgccgagacaggagtcccagcggccattcttttggattttcatggacaacttgctgctgaccgaggatgaccaggaaactaccactcggttcctgcagaccgaagccgtgaccctgcaggacgtgagaggccgggactaccagaacgccatgcgggtgtggtccaacatccctggactgaaaagcaagcacgcacctctgacccctaaagaagaggagtacctgcaggcccaggtgcggagcagaagcaagctggacgcccctaaggtggatctgctggtgaagaattgcctcctgcccctgagagagtacttcaagtatttcagccagaatagtctgcccctgggcggcccaagcagcggcgcccctcctcccagcggcggcagcccagccggctccccaacctctaccgaggagggcacctctgagtccgccacccccgagagcggccctggcacctccaccgagcccagcgagggcagcgcacccggcagccctgccggcagccccacctccacagaggagggaaccagcaccgagcccagcgaaggcagcgccccaggcaccagcaccgagcctagtgagggcggctctggcggcggcagcgcccaggagattaaacggatcaacaagatcagaagaagacttgtgaaagacagcaacaccaagaaggccggcaagacaggccccatgaaaaccctgctggttagagtgatgacacccgatctgagagagcggctggaaaacctgagaaagaagcctgaaaatatcccccagcccatcagcaatacatctagagccaacctgaataagctgctgaccgattacaccgaaatgaagaaggcgatcctgcatgtgtactgggaagagttccagaaggaccctgtgggcctgatgagccgggtggcccagcctgccagcaagaagatcgatcagaacaagctgaaacctgagatggacgagaagggcaacctgaccaccgccggctttgcctgctctcagtgtggccagcccctgttcgtgtacaagctggagcaggtgtctgagaagggcaaggcttacaccaactacttcggacggtgcaatgtggccgagcacgaaaagctgatcctgctggcccagctgaagcccgagaaggatagcgacgaagccgtgacatatagcctgggaaagtttgggcagagggccctggatttctacagcattcatgtgaccaaggagtccacccaccccgtgaagcccctggcccagatcgccggaaacagatacgcctccggacctgtgggaaaggccctgagcgacgcatgtatgggcacaatcgcctccttcctgtctaagtaccaggacatcatcatcgaacaccagaaggtggtgaagggcaaccagaagagactggagagcctgcgggagctggccggcaaggaaaacctggaataccctagcgtgaccctgccacctcagcctcacaccaaggagggcgttgatgcctacaacgaagtgatcgcccgggtgcgaatgtgggtgaacctgaacctgtggcagaagctgaagctaagcagagatgatgccaagcctctgctgagactgaagggattcccttcctttcctctggtcgagagacaggccaacgaagtggactggtgggacatggtgtgtaacgtgaagaagctgatcaacgagaaaaaggaggatggcaaggtgttttggcagaatctggctggctacaagagacaggaagccctgagaccatacctgagcagcgaggaagatcggaagaagggaaagaaattcgctcggtaccagctgggcgacctgctgctgcacctggaaaagaagcacggcgaggactggggaaaggtgtacgacgaggcctgggagcggattgacaagaaagtggaaggcctgagcaagcacatcaagctggaagaggaacggagaagcgaggacgcccagagcaaggccgccctgaccgactggctgcgggctaaggccagcttcgtgatcgagggcctgaaggaggccgacaaggacgagttctgcagatgcgagctgaagctgcagaagtggtacggggacctgcggggaaagcccttcgccatcgaagccgagaacagcatcctggacatcagcggcttcagcaagcagtacaactgtgccttcatctggcagaaggacggcgtgaagaagctgaacctgtacctgatcatcaactacttcaagggcggcaagctgcggttcaagaagatcaaacctgaagccttcgaagccaacagattctacaccgtgatcaacaaaaagagcggcgagatcgtgcccatggaggtgaacttcaacttcgacgaccccaacctgatcatcctgcctctggcctttggcaagagacagggcagagaattcatctggaacgacctgctgtccctggaaaccggcagcctgaagctggccaacggaagagtgatcgagaagacactgtacaacagaagaacccggcaggatgagcctgccctgttcgtggccctgaccttcgagcggcgggaggtcctggactcctccaatatcaaaccaatgaacctgatcggcgtggcaagaggcgaaaacatccccgccgtgatcgccctgaccgaccccgagggctgcccactgagccggtttaaggatagcctgggaaacccaacccacatcctgagaatcggcgagagctataaggagaagcagcggaccatccaggccaagaaggaggtggagcagcggagagccggcggctacagccggaagtacgccagcaaagccaagaatctggcagacgatatggtgagaaacaccgctagagatctgctgtactacgccgtgacccaggatgccatgctgatcttcgccaacctgagccggggcttcggccggcagggcaagcggaccttcatggccgagagacagtacacacggatggaggactggctgaccgccaagctggcctacgagggcctgagcaagacctacctgtccaagacactggcccagtacacctccaagacatgcagcaactgtgggtttaccatcaccagcgccgactacgacagggtgctggagaagctgaagaagacagcaacaggctggatgaccacaattaacggcaaggagctgaaggtggagggccagattacctactacaacagatacaagagacagaacgtagtcaaggacctgtccgtcgagctggatagactgagcgaagaatctgtgaacaacgacatctcctcctggacaaagggcagaagcggagaagctctgagcctcctgaagaaaagattctcccatagacccgtgcaggagaagttcgtgtgcctgaactgcggcttcgagacacacgcagccgagcaagccgccctgaacatcgccagatcctggctgttcctgcggagccaggagtacaagaaataccagacaaacaagacaaccggcaacaccgataagagagccttcgtcgagacctggcagtccttttaccggaagaagcttaaggaggtgtggaaacctgccgtgcggtctggcggatctggcggaggctccacaagccagaccgacctggtgaccttcgacagcgtggccgtggagttcacccaggaggagtggaccctgctggaccccacccagaggaacctgtacagggacgtgatgctggagaactacaagaacctgagcagcgtgggctaccagctgttcaagcccagcctgatcagctggctggaggaggaggaggagctgagcaccctgcccagggtgctgcaggagtggaagatgtgcctgaagaccaagggcaccagccccaagaaaaagagaaaagtctaagctgccttctgcggggcttgccttctggccatgcccttcttctctcccttgcacctgtacctcttggtctttgaataaagcctgagtaggaaggctagcaaaaaaaaaaaaaaaaaaaaaaaaaaaaaaaaaaaaaaaaaaaaaaaaaaaaaaaaaaaaaaaaaaaaaaaaaaaaaaaa

SEQ ID NO: 6799 - RNA, 5797 nt, synthetic construct
  source 1..5797: mol_type = other RNA
aggaaataagagagaaaagaagagtaagaagaaatataagagccaccatggcccctaagaagaagcgtaaagtgagccggatggaacgcctcgtctacgaggtgcggcagaagtgcagaaacatcgaggacatctgcatctcctgcggatctctgaacgtgaccctggagcacccactgttcatcggcggcatgtgccagaactgtaaaaactgttttctggagtgtgcctatcaatacgacgatgacggctaccagagctactgcaccatctgttgcggcggaagagaggtgctgatgtgtggaaataacaactgctgccggtgcttctgcgtggaatgcgtggacctgctggtgggccccggcgccgcccaggccgctattaaggaagatccttggaactgctacatgtgcggccacaagggcacatacggcctgctgagacggagagaggactggcctagcagactgcagatgttcttcgccaataaccacgaccaggagttcgacccccctaaggtgtaccctcccgtccccgccgagaagagaaagcccatccgggtcctgagcctgttcgatggcatcgccaccggtctgctggtgctgaaggacctgggcatccaggtggataggtacattgcctccgaggtgtgcgaggactccatcaccgtgggaatggtgcgtcatcagggcaagatcatgtacgtgggcgacgtgcggagcgtgacacagaagcatatccaggagtggggccctttcgacctggtgatcggcggcagcccttgcaatgacctgagcatcgtgaacccagcccggaagggcctgtacgagggaaccggcagactgttcttcgagttttacagactgctgcacgacgcccggcctaaggaaggcgacgaccggcccttcttttggctgttcgagaatgtggtggccatgggagtcagcgacaagcgggatattagccggttcctggagagcaaccccgtgatgatcgatgccaaggaagtgagcgccgcccaccgggccagatacttctggggcaatctgcctggcatgaacagacccctggccagcaccgtgaacgacaagctggagctgcaggagtgcctggagcacggccggatcgccaagttcagcaaggtgagaaccatcaccacccgaagcaacagcatcaaacaaggcaaggaccagcactttcctgtgttcatgaacgagaaggaggacatcctgtggtgtaccgagatggagagagtgttcgggttcccagtccactacacagatgtcagcaacatgtctagactggccagacagagactgctgggaagaagctggtccgtccctgtgatcagacacctgttcgcccctctgaaggagtacttcgcctgcgtgagcagcggcaacagcaacgccaacagccggggccccagcttctctagcggcctggtgccactgtccctgagagggagccacatgggccccatggagatctacaaaaccgtgagcgcctggaagcggcagcctgtgcgcgtgctgagcctgtttcggaatatcgataaagtcctgaaaagcctgggattcctggagagcggctctggctccggcggtggcaccctgaagtacgtggaggatgtgacaaacgtggtcagacgggatgtggagaagtggggccccttcgatctggtgtacggcagcacccaacccctgggcagctcttgtgaccggtgccctggctggtacatgtttcagttccaccggatcctgcagtacgccctgccgagacaggagtcccagcggccattcttttggattttcatggacaacttgctgctgaccgaggatgaccaggaaactaccactcggttcctgcagaccgaagccgtgaccctgcaggacgtgagaggccgggactaccagaacgccatgcgggtgtggtccaacatccctggactgaaaagcaagcacgcacctctgacccctaaagaagaggagtacctgcaggcccaggtgcggagcagaagcaagctggacgcccctaaggtggatctgctggtgaagaattgcctcctgcccctgagagagtacttcaagtatttcagccagaatagtctgcccctgggcggcccaagcagcggcgcccctcctcccagcggcggcagcccagccggctccccaacctctaccgaggagggcacctctgagtccgccacccccgagagcggccctggcacctccaccgagcccagcgagggcagcgcacccggcagccctgccggcagccccacctccacagaggagggaaccagcaccgagcccagcgaaggcagcgccccaggcaccagcaccgagcctagtgagggcggctctggcggcggcagcgcccaggagattaaacggatcaacaagatcagaagaagacttgtgaaagacagcaacaccaagaaggccggcaagacaggccccatgaaaaccctgctggttagagtgatgacacccgatctgagagagcggctggaaaacctgagaaagaagcctgaaaatatcccccagcccatcagcaatacatctagagccaacctgaataagctgctgaccgattacaccgaaatgaagaaggcgatcctgcatgtgtactgggaagagttccagaaggaccctgtgggcctgatgagccgggtggcccagcctgccagcaagaagatcgatcagaacaagctgaaacctgagatggacgagaagggcaacctgaccaccgccggctttgcctgctctcagtgtggccagcccctgttcgtgtacaagctggagcaggtgtctgagaagggcaaggcttacaccaactacttcggacggtgcaatgtggccgagcacgaaaagctgatcctgctggcccagctgaagcccgagaaggatagcgacgaagccgtgacatatagcctgggaaagtttgggcagagggccctggatttctacagcattcatgtgaccaaggagtccacccaccccgtgaagcccctggcccagatcgccggaaacagatacgcctccggacctgtgggaaaggccctgagcgacgcatgtatgggcacaatcgcctccttcctgtctaagtaccaggacatcatcatcgaacaccagaaggtggtgaagggcaaccagaagagactggagagcctgcgggagctggccggcaaggaaaacctggaataccctagcgtgaccctgccacctcagcctcacaccaaggagggcgttgatgcctacaacgaagtgatcgcccgggtgcgaatgtgggtgaacctgaacctgtggcagaagctgaagctaagcagagatgatgccaagcctctgctgagactgaagggattcccttcctttcctctggtcgagagacaggccaacgaagtggactggtgggacatggtgtgtaacgtgaagaagctgatcaacgagaaaaaggaggatggcaaggtgttttggcagaatctggctggctacaagagacaggaagccctgagaccatacctgagcagcgaggaagatcggaagaagggaaagaaattcgctcggtaccagctgggcgacctgctgctgcacctggaaaagaagcacggcgaggactggggaaaggtgtacgacgaggcctgggagcggattgacaagaaagtggaaggcctgagcaagcacatcaagctggaagaggaacggagaagcgaggacgcccagagcaaggccgccctgaccgactggctgcgggctaaggccagcttcgtgatcgagggcctgaaggaggccgacaaggacgagttctgcagatgcgagctgaagctgcagaagtggtacggggacctgcggggaaagcccttcgccatcgaagccgagaacagcatcctggacatcagcggcttcagcaagcagtacaactgtgccttcatctggcagaaggacggcgtgaagaagctgaacctgtacctgatcatcaactacttcaagggcggcaagctgcggttcaagaagatcaaacctgaagccttcgaagccaacagattctacaccgtgatcaacaaaaagagcggcgagatcgtgcccatggaggtgaacttcaacttcgacgaccccaacctgatcatcctgcctctggcctttggcaagagacagggcagagaattcatctggaacgacctgctgtccctggaaaccggcagcctgaagctggccaacggaagagtgatcgagaagacactgtacaacagaagaacccggcaggatgagcctgccctgttcgtggccctgaccttcgagcggcgggaggtcctggactcctccaatatcaaaccaatgaacctgatcggcgtggcaagaggcgaaaacatccccgccgtgatcgccctgaccgaccccgagggctgcccactgagccggtttaaggatagcctgggaaacccaacccacatcctgagaatcggcgagagctataaggagaagcagcggaccatccaggccaagaaggaggtggagcagcggagagccggcggctacagccggaagtacgccagcaaagccaagaatctggcagacgatatggtgagaaacaccgctagagatctgctgtactacgccgtgacccaggatgccatgctgatcttcgccaacctgagccggggcttcggccggcagggcaagcggaccttcatggccgagagacagtacacacggatggaggactggctgaccgccaagctggcctacgagggcctgagcaagacctacctgtccaagacactggcccagtacacctccaagacatgcagcaactgtgggtttaccatcaccagcgccgactacgacagggtgctggagaagctgaagaagacagcaacaggctggatgaccacaattaacggcaaggagctgaaggtggagggccagattacctactacaacagatacaagagacagaacgtagtcaaggacctgtccgtcgagctggatagactgagcgaagaatctgtgaacaacgacatctcctcctggacaaagggcagaagcggagaagctctgagcctcctgaagaaaagattctcccatagacccgtgcaggagaagttcgtgtgcctgaactgcggcttcgagacacacgcagccgagcaagccgccctgaacatcgccagatcctggctgttcctgcggagccaggagtacaagaaataccagacaaacaagacaaccggcaacaccgataagagagccttcgtcgagacctggcagtccttttaccggaagaagcttaaggaggtgtggaaacctgccgtgcggtctggcggatctggcggaggctccacaagcatggtgaccttcgaggacgtggccgtgcacttcaccaagaccgagtggaccggcctgagccccgcccagagggccctgtacaggagcgtgatgctggagaacttcggcaacctgaccgccctgggctaccccgtgcccaagcccgccctgatcagcctgctggagggcggcgacatggcctggggcctggaggcccaggacgacgcccccgccgagaggaccaagaacatctgcaaggtgatcaccagccccaagaaaaagagaaaagtctaagctgccttctgcggggcttgccttctggccatgcccttcttctctcccttgcacctgtacctcttggtctttgaataaagcctgagtaggaaggctagcaaaaaaaaaaaaaaaaaaaaaaaaaaaaaaaaaaaaaaaaaaaaaaaaaaaaaaaaaaaaaaaaaaaaaaaaaaaaaaaa

SEQ ID NO: 6800 - RNA, 5797 nt, synthetic construct
  source 1..5797: mol_type = other RNA
aggaaataagagagaaaagaagagtaagaagaaatataagagccaccatggcccctaagaagaagcgtaaagtgagccggatggaacgcctcgtctacgaggtgcggcagaagtgcagaaacatcgaggacatctgcatctcctgcggatctctgaacgtgaccctggagcacccactgttcatcggcggcatgtgccagaactgtaaaaactgttttctggagtgtgcctatcaatacgacgatgacggctaccagagctactgcaccatctgttgcggcggaagagaggtgctgatgtgtggaaataacaactgctgccggtgcttctgcgtggaatgcgtggacctgctggtgggccccggcgccgcccaggccgctattaaggaagatccttggaactgctacatgtgcggccacaagggcacatacggcctgctgagacggagagaggactggcctagcagactgcagatgttcttcgccaataaccacgaccaggagttcgacccccctaaggtgtaccctcccgtccccgccgagaagagaaagcccatccgggtcctgagcctgttcgatggcatcgccaccggtctgctggtgctgaaggacctgggcatccaggtggataggtacattgcctccgaggtgtgcgaggactccatcaccgtgggaatggtgcgtcatcagggcaagatcatgtacgtgggcgacgtgcggagcgtgacacagaagcatatccaggagtggggccctttcgacctggtgatcggcggcagcccttgcaatgacctgagcatcgtgaacccagcccggaagggcctgtacgagggaaccggcagactgttcttcgagttttacagactgctgcacgacgcccggcctaaggaaggcgacgaccggcccttcttttggctgttcgagaatgtggtggccatgggagtcagcgacaagcgggatattagccggttcctggagagcaaccccgtgatgatcgatgccaaggaagtgagcgccgcccaccgggccagatacttctggggcaatctgcctggcatgaacagacccctggccagcaccgtgaacgacaagctggagctgcaggagtgcctggagcacggccggatcgccaagttcagcaaggtgagaaccatcaccacccgaagcaacagcatcaaacaaggcaaggaccagcactttcctgtgttcatgaacgagaaggaggacatcctgtggtgtaccgagatggagagagtgttcgggttcccagtccactacacagatgtcagcaacatgtctagactggccagacagagactgctgggaagaagctggtccgtccctgtgatcagacacctgttcgcccctctgaaggagtacttcgcctgcgtgagcagcggcaacagcaacgccaacagccggggccccagcttctctagcggcctggtgccactgtccctgagagggagccacatgggccccatggagatctacaaaaccgtgagcgcctggaagcggcagcctgtgcgcgtgctgagcctgtttcggaatatcgataaagtcctgaaaagcctgggattcctggagagcggctctggctccggcggtggcaccctgaagtacgtggaggatgtgacaaacgtggtcagacgggatgtggagaagtggggccccttcgatctggtgtacggcagcacccaacccctgggcagctcttgtgaccggtgccctggctggtacatgtttcagttccaccggatcctgcagtacgccctgccgagacaggagtcccagcggccattcttttggattttcatggacaacttgctgctgaccgaggatgaccaggaaactaccactcggttcctgcagaccgaagccgtgaccctgcaggacgtgagaggccgggactaccagaacgccatgcgggtgtggtccaacatccctggactgaaaagcaagcacgcacctctgacccctaaagaagaggagtacctgcaggcccaggtgcggagcagaagcaagctggacgcccctaaggtggatctgctggtgaagaattgcctcctgcccctgagagagtacttcaagtatttcagccagaatagtctgcccctgggcggcccaagcagcggcgcccctcctcccagcggcggcagcccagccggctccccaacctctaccgaggagggcacctctgagtccgccacccccgagagcggccctggcacctccaccgagcccagcgagggcagcgcacccggcagccctgccggcagccccacctccacagaggagggaaccagcaccgagcccagcgaaggcagcgccccaggcaccagcaccgagcctagtgagggcggctctggcggcggcagcgcccaggagattaaacggatcaacaagatcagaagaagacttgtgaaagacagcaacaccaagaaggccggcaagacaggccccatgaaaaccctgctggttagagtgatgacacccgatctgagagagcggctggaaaacctgagaaagaagcctgaaaatatcccccagcccatcagcaatacatctagagccaacctgaataagctgctgaccgattacaccgaaatgaagaaggcgatcctgcatgtgtactgggaagagttccagaaggaccctgtgggcctgatgagccgggtggcccagcctgccagcaagaagatcgatcagaacaagctgaaacctgagatggacgagaagggcaacctgaccaccgccggctttgcctgctctcagtgtggccagcccctgttcgtgtacaagctggagcaggtgtctgagaagggcaaggcttacaccaactacttcggacggtgcaatgtggccgagcacgaaaagctgatcctgctggcccagctgaagcccgagaaggatagcgacgaagccgtgacatatagcctgggaaagtttgggcagagggccctggatttctacagcattcatgtgaccaaggagtccacccaccccgtgaagcccctggcccagatcgccggaaacagatacgcctccggacctgtgggaaaggccctgagcgacgcatgtatgggcacaatcgcctccttcctgtctaagtaccaggacatcatcatcgaacaccagaaggtggtgaagggcaaccagaagagactggagagcctgcgggagctggccggcaaggaaaacctggaataccctagcgtgaccctgccacctcagcctcacaccaaggagggcgttgatgcctacaacgaagtgatcgcccgggtgcgaatgtgggtgaacctgaacctgtggcagaagctgaagctaagcagagatgatgccaagcctctgctgagactgaagggattcccttcctttcctctggtcgagagacaggccaacgaagtggactggtgggacatggtgtgtaacgtgaagaagctgatcaacgagaaaaaggaggatggcaaggtgttttggcagaatctggctggctacaagagacaggaagccctgagaccatacctgagcagcgaggaagatcggaagaagggaaagaaattcgctcggtaccagctgggcgacctgctgctgcacctggaaaagaagcacggcgaggactggggaaaggtgtacgacgaggcctgggagcggattgacaagaaagtggaaggcctgagcaagcacatcaagctggaagaggaacggagaagcgaggacgcccagagcaaggccgccctgaccgactggctgcgggctaaggccagcttcgtgatcgagggcctgaaggaggccgacaaggacgagttctgcagatgcgagctgaagctgcagaagtggtacggggacctgcggggaaagcccttcgccatcgaagccgagaacagcatcctggacatcagcggcttcagcaagcagtacaactgtgccttcatctggcagaaggacggcgtgaagaagctgaacctgtacctgatcatcaactacttcaagggcggcaagctgcggttcaagaagatcaaacctgaagccttcgaagccaacagattctacaccgtgatcaacaaaaagagcggcgagatcgtgcccatggaggtgaacttcaacttcgacgaccccaacctgatcatcctgcctctggcctttggcaagagacagggcagagaattcatctggaacgacctgctgtccctggaaaccggcagcctgaagctggccaacggaagagtgatcgagaagacactgtacaacagaagaacccggcaggatgagcctgccctgttcgtggccctgaccttcgagcggcgggaggtcctggactcctccaatatcaaaccaatgaacctgatcggcgtggcaagaggcgaaaacatccccgccgtgatcgccctgaccgaccccgagggctgcccactgagccggtttaaggatagcctgggaaacccaacccacatcctgagaatcggcgagagctataaggagaagcagcggaccatccaggccaagaaggaggtggagcagcggagagccggcggctacagccggaagtacgccagcaaagccaagaatctggcagacgatatggtgagaaacaccgctagagatctgctgtactacgccgtgacccaggatgccatgctgatcttcgccaacctgagccggggcttcggccggcagggcaagcggaccttcatggccgagagacagtacacacggatggaggactggctgaccgccaagctggcctacgagggcctgagcaagacctacctgtccaagacactggcccagtacacctccaagacatgcagcaactgtgggtttaccatcaccagcgccgactacgacagggtgctggagaagctgaagaagacagcaacaggctggatgaccacaattaacggcaaggagctgaaggtggagggccagattacctactacaacagatacaagagacagaacgtagtcaaggacctgtccgtcgagctggatagactgagcgaagaatctgtgaacaacgacatctcctcctggacaaagggcagaagcggagaagctctgagcctcctgaagaaaagattctcccatagacccgtgcaggagaagttcgtgtgcctgaactgcggcttcgagacacacgcagccgagcaagccgccctgaacatcgccagatcctggctgttcctgcggagccaggagtacaagaaataccagacaaacaagacaaccggcaacaccgataagagagccttcgtcgagacctggcagtccttttaccggaagaagcttaaggaggtgtggaaacctgccgtgcggtctggcggatctggcggaggctccacaagcagccaggtgagcgtgaccttcgaggacgtggccgtgctgttcaccagggacgagtggaggaagctggcccccagccagaggaacctgtaccaggacgtgatgctggagaactacagcaacctggtgagcctgggcctgcccttcagcaagcccgaggtgatcagcctgctgcagcagggcgaggacccctggaaggtggagaaggagagccccggcggcagcagcctgggcgagtggagcagcaccagccccaagaaaaagagaaaagtctaagctgccttctgcggggcttgccttctggccatgcccttcttctctcccttgcacctgtacctcttggtctttgaataaagcctgagtaggaaggctagcaaaaaaaaaaaaaaaaaaaaaaaaaaaaaaaaaaaaaaaaaaaaaaaaaaaaaaaaaaaaaaaaaaaaaaaaaaaaaaaa

SEQ ID NO: 6801 - RNA, 5797 nt, synthetic construct
  source 1..5797: mol_type = other RNA
aggaaataagagagaaaagaagagtaagaagaaatataagagccaccatggcccctaagaagaagcgtaaagtgagccggatggaacgcctcgtctacgaggtgcggcagaagtgcagaaacatcgaggacatctgcatctcctgcggatctctgaacgtgaccctggagcacccactgttcatcggcggcatgtgccagaactgtaaaaactgttttctggagtgtgcctatcaatacgacgatgacggctaccagagctactgcaccatctgttgcggcggaagagaggtgctgatgtgtggaaataacaactgctgccggtgcttctgcgtggaatgcgtggacctgctggtgggccccggcgccgcccaggccgctattaaggaagatccttggaactgctacatgtgcggccacaagggcacatacggcctgctgagacggagagaggactggcctagcagactgcagatgttcttcgccaataaccacgaccaggagttcgacccccctaaggtgtaccctcccgtccccgccgagaagagaaagcccatccgggtcctgagcctgttcgatggcatcgccaccggtctgctggtgctgaaggacctgggcatccaggtggataggtacattgcctccgaggtgtgcgaggactccatcaccgtgggaatggtgcgtcatcagggcaagatcatgtacgtgggcgacgtgcggagcgtgacacagaagcatatccaggagtggggccctttcgacctggtgatcggcggcagcccttgcaatgacctgagcatcgtgaacccagcccggaagggcctgtacgagggaaccggcagactgttcttcgagttttacagactgctgcacgacgcccggcctaaggaaggcgacgaccggcccttcttttggctgttcgagaatgtggtggccatgggagtcagcgacaagcgggatattagccggttcctggagagcaaccccgtgatgatcgatgccaaggaagtgagcgccgcccaccgggccagatacttctggggcaatctgcctggcatgaacagacccctggccagcaccgtgaacgacaagctggagctgcaggagtgcctggagcacggccggatcgccaagttcagcaaggtgagaaccatcaccacccgaagcaacagcatcaaacaaggcaaggaccagcactttcctgtgttcatgaacgagaaggaggacatcctgtggtgtaccgagatggagagagtgttcgggttcccagtccactacacagatgtcagcaacatgtctagactggccagacagagactgctgggaagaagctggtccgtccctgtgatcagacacctgttcgcccctctgaaggagtacttcgcctgcgtgagcagcggcaacagcaacgccaacagccggggccccagcttctctagcggcctggtgccactgtccctgagagggagccacatgggccccatggagatctacaaaaccgtgagcgcctggaagcggcagcctgtgcgcgtgctgagcctgtttcggaatatcgataaagtcctgaaaagcctgggattcctggagagcggctctggctccggcggtggcaccctgaagtacgtggaggatgtgacaaacgtggtcagacgggatgtggagaagtggggccccttcgatctggtgtacggcagcacccaacccctgggcagctcttgtgaccggtgccctggctggtacatgtttcagttccaccggatcctgcagtacgccctgccgagacaggagtcccagcggccattcttttggattttcatggacaacttgctgctgaccgaggatgaccaggaaactaccactcggttcctgcagaccgaagccgtgaccctgcaggacgtgagaggccgggactaccagaacgccatgcgggtgtggtccaacatccctggactgaaaagcaagcacgcacctctgacccctaaagaagaggagtacctgcaggcccaggtgcggagcagaagcaagctggacgcccctaaggtggatctgctggtgaagaattgcctcctgcccctgagagagtacttcaagtatttcagccagaatagtctgcccctgggcggcccaagcagcggcgcccctcctcccagcggcggcagcccagccggctccccaacctctaccgaggagggcacctctgagtccgccacccccgagagcggccctggcacctccaccgagcccagcgagggcagcgcacccggcagccctgccggcagccccacctccacagaggagggaaccagcaccgagcccagcgaaggcagcgccccaggcaccagcaccgagcctagtgagggcggctctggcggcggcagcgcccaggagattaaacggatcaacaagatcagaagaagacttgtgaaagacagcaacaccaagaaggccggcaagacaggccccatgaaaaccctgctggttagagtgatgacacccgatctgagagagcggctggaaaacctgagaaagaagcctgaaaatatcccccagcccatcagcaatacatctagagccaacctgaataagctgctgaccgattacaccgaaatgaagaaggcgatcctgcatgtgtactgggaagagttccagaaggaccctgtgggcctgatgagccgggtggcccagcctgccagcaagaagatcgatcagaacaagctgaaacctgagatggacgagaagggcaacctgaccaccgccggctttgcctgctctcagtgtggccagcccctgttcgtgtacaagctggagcaggtgtctgagaagggcaaggcttacaccaactacttcggacggtgcaatgtggccgagcacgaaaagctgatcctgctggcccagctgaagcccgagaaggatagcgacgaagccgtgacatatagcctgggaaagtttgggcagagggccctggatttctacagcattcatgtgaccaaggagtccacccaccccgtgaagcccctggcccagatcgccggaaacagatacgcctccggacctgtgggaaaggccctgagcgacgcatgtatgggcacaatcgcctccttcctgtctaagtaccaggacatcatcatcgaacaccagaaggtggtgaagggcaaccagaagagactggagagcctgcgggagctggccggcaaggaaaacctggaataccctagcgtgaccctgccacctcagcctcacaccaaggagggcgttgatgcctacaacgaagtgatcgcccgggtgcgaatgtgggtgaacctgaacctgtggcagaagctgaagctaagcagagatgatgccaagcctctgctgagactgaagggattcccttcctttcctctggtcgagagacaggccaacgaagtggactggtgggacatggtgtgtaacgtgaagaagctgatcaacgagaaaaaggaggatggcaaggtgttttggcagaatctggctggctacaagagacaggaagccctgagaccatacctgagcagcgaggaagatcggaagaagggaaagaaattcgctcggtaccagctgggcgacctgctgctgcacctggaaaagaagcacggcgaggactggggaaaggtgtacgacgaggcctgggagcggattgacaagaaagtggaaggcctgagcaagcacatcaagctggaagaggaacggagaagcgaggacgcccagagcaaggccgccctgaccgactggctgcgggctaaggccagcttcgtgatcgagggcctgaaggaggccgacaaggacgagttctgcagatgcgagctgaagctgcagaagtggtacggggacctgcggggaaagcccttcgccatcgaagccgagaacagcatcctggacatcagcggcttcagcaagcagtacaactgtgccttcatctggcagaaggacggcgtgaagaagctgaacctgtacctgatcatcaactacttcaagggcggcaagctgcggttcaagaagatcaaacctgaagccttcgaagccaacagattctacaccgtgatcaacaaaaagagcggcgagatcgtgcccatggaggtgaacttcaacttcgacgaccccaacctgatcatcctgcctctggcctttggcaagagacagggcagagaattcatctggaacgacctgctgtccctggaaaccggcagcctgaagctggccaacggaagagtgatcgagaagacactgtacaacagaagaacccggcaggatgagcctgccctgttcgtggccctgaccttcgagcggcgggaggtcctggactcctccaatatcaaaccaatgaacctgatcggcgtggcaagaggcgaaaacatccccgccgtgatcgccctgaccgaccccgagggctgcccactgagccggtttaaggatagcctgggaaacccaacccacatcctgagaatcggcgagagctataaggagaagcagcggaccatccaggccaagaaggaggtggagcagcggagagccggcggctacagccggaagtacgccagcaaagccaagaatctggcagacgatatggtgagaaacaccgctagagatctgctgtactacgccgtgacccaggatgccatgctgatcttcgccaacctgagccggggcttcggccggcagggcaagcggaccttcatggccgagagacagtacacacggatggaggactggctgaccgccaagctggcctacgagggcctgagcaagacctacctgtccaagacactggcccagtacacctccaagacatgcagcaactgtgggtttaccatcaccagcgccgactacgacagggtgctggagaagctgaagaagacagcaacaggctggatgaccacaattaacggcaaggagctgaaggtggagggccagattacctactacaacagatacaagagacagaacgtagtcaaggacctgtccgtcgagctggatagactgagcgaagaatctgtgaacaacgacatctcctcctggacaaagggcagaagcggagaagctctgagcctcctgaagaaaagattctcccatagacccgtgcaggagaagttcgtgtgcctgaactgcggcttcgagacacacgcagccgagcaagccgccctgaacatcgccagatcctggctgttcctgcggagccaggagtacaagaaataccagacaaacaagacaaccggcaacaccgataagagagccttcgtcgagacctggcagtccttttaccggaagaagcttaaggaggtgtggaaacctgccgtgcggtctggcggatctggcggaggctccacaagcaggcaggagagggtgaccttcggcgacgtggccgtggacttcaccctggacgagtgggtgtgcctggacagcgcccagaaggccctgtacagggacgtgatgctggagaactacggccacctggtgtgcctgggcctggccggcgccaagcccgccgtgatccagaggctggagaggggcgaggccgcctggtgccccggcgtgcccggcagcaggctgcccgactgggagaccaggctggagaccagccccaagaaaaagagaaaagtctaagctgccttctgcggggcttgccttctggccatgcccttcttctctcccttgcacctgtacctcttggtctttgaataaagcctgagtaggaaggctagcaaaaaaaaaaaaaaaaaaaaaaaaaaaaaaaaaaaaaaaaaaaaaaaaaaaaaaaaaaaaaaaaaaaaaaaaaaaaaaaa

SEQ ID NO: 6802 - RNA, 5797 nt, synthetic construct
  source 1..5797: mol_type = other RNA
aggaaataagagagaaaagaagagtaagaagaaatataagagccaccatggcccctaagaagaagcgtaaagtgagccggatggaacgcctcgtctacgaggtgcggcagaagtgcagaaacatcgaggacatctgcatctcctgcggatctctgaacgtgaccctggagcacccactgttcatcggcggcatgtgccagaactgtaaaaactgttttctggagtgtgcctatcaatacgacgatgacggctaccagagctactgcaccatctgttgcggcggaagagaggtgctgatgtgtggaaataacaactgctgccggtgcttctgcgtggaatgcgtggacctgctggtgggccccggcgccgcccaggccgctattaaggaagatccttggaactgctacatgtgcggccacaagggcacatacggcctgctgagacggagagaggactggcctagcagactgcagatgttcttcgccaataaccacgaccaggagttcgacccccctaaggtgtaccctcccgtccccgccgagaagagaaagcccatccgggtcctgagcctgttcgatggcatcgccaccggtctgctggtgctgaaggacctgggcatccaggtggataggtacattgcctccgaggtgtgcgaggactccatcaccgtgggaatggtgcgtcatcagggcaagatcatgtacgtgggcgacgtgcggagcgtgacacagaagcatatccaggagtggggccctttcgacctggtgatcggcggcagcccttgcaatgacctgagcatcgtgaacccagcccggaagggcctgtacgagggaaccggcagactgttcttcgagttttacagactgctgcacgacgcccggcctaaggaaggcgacgaccggcccttcttttggctgttcgagaatgtggtggccatgggagtcagcgacaagcgggatattagccggttcctggagagcaaccccgtgatgatcgatgccaaggaagtgagcgccgcccaccgggccagatacttctggggcaatctgcctggcatgaacagacccctggccagcaccgtgaacgacaagctggagctgcaggagtgcctggagcacggccggatcgccaagttcagcaaggtgagaaccatcaccacccgaagcaacagcatcaaacaaggcaaggaccagcactttcctgtgttcatgaacgagaaggaggacatcctgtggtgtaccgagatggagagagtgttcgggttcccagtccactacacagatgtcagcaacatgtctagactggccagacagagactgctgggaagaagctggtccgtccctgtgatcagacacctgttcgcccctctgaaggagtacttcgcctgcgtgagcagcggcaacagcaacgccaacagccggggccccagcttctctagcggcctggtgccactgtccctgagagggagccacatgggccccatggagatctacaaaaccgtgagcgcctggaagcggcagcctgtgcgcgtgctgagcctgtttcggaatatcgataaagtcctgaaaagcctgggattcctggagagcggctctggctccggcggtggcaccctgaagtacgtggaggatgtgacaaacgtggtcagacgggatgtggagaagtggggccccttcgatctggtgtacggcagcacccaacccctgggcagctcttgtgaccggtgccctggctggtacatgtttcagttccaccggatcctgcagtacgccctgccgagacaggagtcccagcggccattcttttggattttcatggacaacttgctgctgaccgaggatgaccaggaaactaccactcggttcctgcagaccgaagccgtgaccctgcaggacgtgagaggccgggactaccagaacgccatgcgggtgtggtccaacatccctggactgaaaagcaagcacgcacctctgacccctaaagaagaggagtacctgcaggcccaggtgcggagcagaagcaagctggacgcccctaaggtggatctgctggtgaagaattgcctcctgcccctgagagagtacttcaagtatttcagccagaatagtctgcccctgggcggcccaagcagcggcgcccctcctcccagcggcggcagcccagccggctccccaacctctaccgaggagggcacctctgagtccgccacccccgagagcggccctggcacctccaccgagcccagcgagggcagcgcacccggcagccctgccggcagccccacctccacagaggagggaaccagcaccgagcccagcgaaggcagcgccccaggcaccagcaccgagcctagtgagggcggctctggcggcggcagcgcccaggagattaaacggatcaacaagatcagaagaagacttgtgaaagacagcaacaccaagaaggccggcaagacaggccccatgaaaaccctgctggttagagtgatgacacccgatctgagagagcggctggaaaacctgagaaagaagcctgaaaatatcccccagcccatcagcaatacatctagagccaacctgaataagctgctgaccgattacaccgaaatgaagaaggcgatcctgcatgtgtactgggaagagttccagaaggaccctgtgggcctgatgagccgggtggcccagcctgccagcaagaagatcgatcagaacaagctgaaacctgagatggacgagaagggcaacctgaccaccgccggctttgcctgctctcagtgtggccagcccctgttcgtgtacaagctggagcaggtgtctgagaagggcaaggcttacaccaactacttcggacggtgcaatgtggccgagcacgaaaagctgatcctgctggcccagctgaagcccgagaaggatagcgacgaagccgtgacatatagcctgggaaagtttgggcagagggccctggatttctacagcattcatgtgaccaaggagtccacccaccccgtgaagcccctggcccagatcgccggaaacagatacgcctccggacctgtgggaaaggccctgagcgacgcatgtatgggcacaatcgcctccttcctgtctaagtaccaggacatcatcatcgaacaccagaaggtggtgaagggcaaccagaagagactggagagcctgcgggagctggccggcaaggaaaacctggaataccctagcgtgaccctgccacctcagcctcacaccaaggagggcgttgatgcctacaacgaagtgatcgcccgggtgcgaatgtgggtgaacctgaacctgtggcagaagctgaagctaagcagagatgatgccaagcctctgctgagactgaagggattcccttcctttcctctggtcgagagacaggccaacgaagtggactggtgggacatggtgtgtaacgtgaagaagctgatcaacgagaaaaaggaggatggcaaggtgttttggcagaatctggctggctacaagagacaggaagccctgagaccatacctgagcagcgaggaagatcggaagaagggaaagaaattcgctcggtaccagctgggcgacctgctgctgcacctggaaaagaagcacggcgaggactggggaaaggtgtacgacgaggcctgggagcggattgacaagaaagtggaaggcctgagcaagcacatcaagctggaagaggaacggagaagcgaggacgcccagagcaaggccgccctgaccgactggctgcgggctaaggccagcttcgtgatcgagggcctgaaggaggccgacaaggacgagttctgcagatgcgagctgaagctgcagaagtggtacggggacctgcggggaaagcccttcgccatcgaagccgagaacagcatcctggacatcagcggcttcagcaagcagtacaactgtgccttcatctggcagaaggacggcgtgaagaagctgaacctgtacctgatcatcaactacttcaagggcggcaagctgcggttcaagaagatcaaacctgaagccttcgaagccaacagattctacaccgtgatcaacaaaaagagcggcgagatcgtgcccatggaggtgaacttcaacttcgacgaccccaacctgatcatcctgcctctggcctttggcaagagacagggcagagaattcatctggaacgacctgctgtccctggaaaccggcagcctgaagctggccaacggaagagtgatcgagaagacactgtacaacagaagaacccggcaggatgagcctgccctgttcgtggccctgaccttcgagcggcgggaggtcctggactcctccaatatcaaaccaatgaacctgatcggcgtggcaagaggcgaaaacatccccgccgtgatcgccctgaccgaccccgagggctgcccactgagccggtttaaggatagcctgggaaacccaacccacatcctgagaatcggcgagagctataaggagaagcagcggaccatccaggccaagaaggaggtggagcagcggagagccggcggctacagccggaagtacgccagcaaagccaagaatctggcagacgatatggtgagaaacaccgctagagatctgctgtactacgccgtgacccaggatgccatgctgatcttcgccaacctgagccggggcttcggccggcagggcaagcggaccttcatggccgagagacagtacacacggatggaggactggctgaccgccaagctggcctacgagggcctgagcaagacctacctgtccaagacactggcccagtacacctccaagacatgcagcaactgtgggtttaccatcaccagcgccgactacgacagggtgctggagaagctgaagaagacagcaacaggctggatgaccacaattaacggcaaggagctgaaggtggagggccagattacctactacaacagatacaagagacagaacgtagtcaaggacctgtccgtcgagctggatagactgagcgaagaatctgtgaacaacgacatctcctcctggacaaagggcagaagcggagaagctctgagcctcctgaagaaaagattctcccatagacccgtgcaggagaagttcgtgtgcctgaactgcggcttcgagacacacgcagccgagcaagccgccctgaacatcgccagatcctggctgttcctgcggagccaggagtacaagaaataccagacaaacaagacaaccggcaacaccgataagagagccttcgtcgagacctggcagtccttttaccggaagaagcttaaggaggtgtggaaacctgccgtgcggtctggcggatctggcggaggctccacaagcagcgccgccagcgtgaccttcagggacgtggccgtggacttcagcagggaggagtggagcaggctggacgccgcccagagggccctgtacagggacgtgatgtgggagacctacgagaacctggtgagcaccggcatccccgtgagcaggctggacgtgatcagcctgctggccaagcaggaggcccagtggacccccgaggaggtgcccggctggaccagccccgacagcttcagcgaggagaccagccccaagaaaaagagaaaagtctaagctgccttctgcggggcttgccttctggccatgcccttcttctctcccttgcacctgtacctcttggtctttgaataaagcctgagtaggaaggctagcaaaaaaaaaaaaaaaaaaaaaaaaaaaaaaaaaaaaaaaaaaaaaaaaaaaaaaaaaaaaaaaaaaaaaaaaaaaaaaaa

SEQ ID NO: 6803 - RNA, 5797 nt, synthetic construct
  source 1..5797: mol_type = other RNA
aggaaataagagagaaaagaagagtaagaagaaatataagagccaccatggcccctaagaagaagcgtaaagtgagccggatggaacgcctcgtctacgaggtgcggcagaagtgcagaaacatcgaggacatctgcatctcctgcggatctctgaacgtgaccctggagcacccactgttcatcggcggcatgtgccagaactgtaaaaactgttttctggagtgtgcctatcaatacgacgatgacggctaccagagctactgcaccatctgttgcggcggaagagaggtgctgatgtgtggaaataacaactgctgccggtgcttctgcgtggaatgcgtggacctgctggtgggccccggcgccgcccaggccgctattaaggaagatccttggaactgctacatgtgcggccacaagggcacatacggcctgctgagacggagagaggactggcctagcagactgcagatgttcttcgccaataaccacgaccaggagttcgacccccctaaggtgtaccctcccgtccccgccgagaagagaaagcccatccgggtcctgagcctgttcgatggcatcgccaccggtctgctggtgctgaaggacctgggcatccaggtggataggtacattgcctccgaggtgtgcgaggactccatcaccgtgggaatggtgcgtcatcagggcaagatcatgtacgtgggcgacgtgcggagcgtgacacagaagcatatccaggagtggggccctttcgacctggtgatcggcggcagcccttgcaatgacctgagcatcgtgaacccagcccggaagggcctgtacgagggaaccggcagactgttcttcgagttttacagactgctgcacgacgcccggcctaaggaaggcgacgaccggcccttcttttggctgttcgagaatgtggtggccatgggagtcagcgacaagcgggatattagccggttcctggagagcaaccccgtgatgatcgatgccaaggaagtgagcgccgcccaccgggccagatacttctggggcaatctgcctggcatgaacagacccctggccagcaccgtgaacgacaagctggagctgcaggagtgcctggagcacggccggatcgccaagttcagcaaggtgagaaccatcaccacccgaagcaacagcatcaaacaaggcaaggaccagcactttcctgtgttcatgaacgagaaggaggacatcctgtggtgtaccgagatggagagagtgttcgggttcccagtccactacacagatgtcagcaacatgtctagactggccagacagagactgctgggaagaagctggtccgtccctgtgatcagacacctgttcgcccctctgaaggagtacttcgcctgcgtgagcagcggcaacagcaacgccaacagccggggccccagcttctctagcggcctggtgccactgtccctgagagggagccacatgggccccatggagatctacaaaaccgtgagcgcctggaagcggcagcctgtgcgcgtgctgagcctgtttcggaatatcgataaagtcctgaaaagcctgggattcctggagagcggctctggctccggcggtggcaccctgaagtacgtggaggatgtgacaaacgtggtcagacgggatgtggagaagtggggccccttcgatctggtgtacggcagcacccaacccctgggcagctcttgtgaccggtgccctggctggtacatgtttcagttccaccggatcctgcagtacgccctgccgagacaggagtcccagcggccattcttttggattttcatggacaacttgctgctgaccgaggatgaccaggaaactaccactcggttcctgcagaccgaagccgtgaccctgcaggacgtgagaggccgggactaccagaacgccatgcgggtgtggtccaacatccctggactgaaaagcaagcacgcacctctgacccctaaagaagaggagtacctgcaggcccaggtgcggagcagaagcaagctggacgcccctaaggtggatctgctggtgaagaattgcctcctgcccctgagagagtacttcaagtatttcagccagaatagtctgcccctgggcggcccaagcagcggcgcccctcctcccagcggcggcagcccagccggctccccaacctctaccgaggagggcacctctgagtccgccacccccgagagcggccctggcacctccaccgagcccagcgagggcagcgcacccggcagccctgccggcagccccacctccacagaggagggaaccagcaccgagcccagcgaaggcagcgccccaggcaccagcaccgagcctagtgagggcggctctggcggcggcagcgcccaggagattaaacggatcaacaagatcagaagaagacttgtgaaagacagcaacaccaagaaggccggcaagacaggccccatgaaaaccctgctggttagagtgatgacacccgatctgagagagcggctggaaaacctgagaaagaagcctgaaaatatcccccagcccatcagcaatacatctagagccaacctgaataagctgctgaccgattacaccgaaatgaagaaggcgatcctgcatgtgtactgggaagagttccagaaggaccctgtgggcctgatgagccgggtggcccagcctgccagcaagaagatcgatcagaacaagctgaaacctgagatggacgagaagggcaacctgaccaccgccggctttgcctgctctcagtgtggccagcccctgttcgtgtacaagctggagcaggtgtctgagaagggcaaggcttacaccaactacttcggacggtgcaatgtggccgagcacgaaaagctgatcctgctggcccagctgaagcccgagaaggatagcgacgaagccgtgacatatagcctgggaaagtttgggcagagggccctggatttctacagcattcatgtgaccaaggagtccacccaccccgtgaagcccctggcccagatcgccggaaacagatacgcctccggacctgtgggaaaggccctgagcgacgcatgtatgggcacaatcgcctccttcctgtctaagtaccaggacatcatcatcgaacaccagaaggtggtgaagggcaaccagaagagactggagagcctgcgggagctggccggcaaggaaaacctggaataccctagcgtgaccctgccacctcagcctcacaccaaggagggcgttgatgcctacaacgaagtgatcgcccgggtgcgaatgtgggtgaacctgaacctgtggcagaagctgaagctaagcagagatgatgccaagcctctgctgagactgaagggattcccttcctttcctctggtcgagagacaggccaacgaagtggactggtgggacatggtgtgtaacgtgaagaagctgatcaacgagaaaaaggaggatggcaaggtgttttggcagaatctggctggctacaagagacaggaagccctgagaccatacctgagcagcgaggaagatcggaagaagggaaagaaattcgctcggtaccagctgggcgacctgctgctgcacctggaaaagaagcacggcgaggactggggaaaggtgtacgacgaggcctgggagcggattgacaagaaagtggaaggcctgagcaagcacatcaagctggaagaggaacggagaagcgaggacgcccagagcaaggccgccctgaccgactggctgcgggctaaggccagcttcgtgatcgagggcctgaaggaggccgacaaggacgagttctgcagatgcgagctgaagctgcagaagtggtacggggacctgcggggaaagcccttcgccatcgaagccgagaacagcatcctggacatcagcggcttcagcaagcagtacaactgtgccttcatctggcagaaggacggcgtgaagaagctgaacctgtacctgatcatcaactacttcaagggcggcaagctgcggttcaagaagatcaaacctgaagccttcgaagccaacagattctacaccgtgatcaacaaaaagagcggcgagatcgtgcccatggaggtgaacttcaacttcgacgaccccaacctgatcatcctgcctctggcctttggcaagagacagggcagagaattcatctggaacgacctgctgtccctggaaaccggcagcctgaagctggccaacggaagagtgatcgagaagacactgtacaacagaagaacccggcaggatgagcctgccctgttcgtggccctgaccttcgagcggcgggaggtcctggactcctccaatatcaaaccaatgaacctgatcggcgtggcaagaggcgaaaacatccccgccgtgatcgccctgaccgaccccgagggctgcccactgagccggtttaaggatagcctgggaaacccaacccacatcctgagaatcggcgagagctataaggagaagcagcggaccatccaggccaagaaggaggtggagcagcggagagccggcggctacagccggaagtacgccagcaaagccaagaatctggcagacgatatggtgagaaacaccgctagagatctgctgtactacgccgtgacccaggatgccatgctgatcttcgccaacctgagccggggcttcggccggcagggcaagcggaccttcatggccgagagacagtacacacggatggaggactggctgaccgccaagctggcctacgagggcctgagcaagacctacctgtccaagacactggcccagtacacctccaagacatgcagcaactgtgggtttaccatcaccagcgccgactacgacagggtgctggagaagctgaagaagacagcaacaggctggatgaccacaattaacggcaaggagctgaaggtggagggccagattacctactacaacagatacaagagacagaacgtagtcaaggacctgtccgtcgagctggatagactgagcgaagaatctgtgaacaacgacatctcctcctggacaaagggcagaagcggagaagctctgagcctcctgaagaaaagattctcccatagacccgtgcaggagaagttcgtgtgcctgaactgcggcttcgagacacacgcagccgagcaagccgccctgaacatcgccagatcctggctgttcctgcggagccaggagtacaagaaataccagacaaacaagacaaccggcaacaccgataagagagccttcgtcgagacctggcagtccttttaccggaagaagcttaaggaggtgtggaaacctgccgtgcggtctggcggatctggcggaggctccacaagcccccaggtgctggtgagcttcgaggacgtggccgtgttcctgagcagggaggagtggggctgcctgggccccgcccagaggggcctgtacagggacgtgatgctggagacctacaggaacctgatcagcctgggcttccaggacagcaagcccgacgtgatcagcaagctggaggagggcgaggagccctgggccccctacagccccaggatcgaggagggctggatccagagccacggcagcaccagccccaagaaaaagagaaaagtctaagctgccttctgcggggcttgccttctggccatgcccttcttctctcccttgcacctgtacctcttggtctttgaataaagcctgagtaggaaggctagcaaaaaaaaaaaaaaaaaaaaaaaaaaaaaaaaaaaaaaaaaaaaaaaaaaaaaaaaaaaaaaaaaaaaaaaaaaaaaaaa

SEQ ID NO: 6804 - RNA, 5797 nt, synthetic construct
  source 1..5797: mol_type = other RNA
aggaaataagagagaaaagaagagtaagaagaaatataagagccaccatggcccctaagaagaagcgtaaagtgagccggatggaacgcctcgtctacgaggtgcggcagaagtgcagaaacatcgaggacatctgcatctcctgcggatctctgaacgtgaccctggagcacccactgttcatcggcggcatgtgccagaactgtaaaaactgttttctggagtgtgcctatcaatacgacgatgacggctaccagagctactgcaccatctgttgcggcggaagagaggtgctgatgtgtggaaataacaactgctgccggtgcttctgcgtggaatgcgtggacctgctggtgggccccggcgccgcccaggccgctattaaggaagatccttggaactgctacatgtgcggccacaagggcacatacggcctgctgagacggagagaggactggcctagcagactgcagatgttcttcgccaataaccacgaccaggagttcgacccccctaaggtgtaccctcccgtccccgccgagaagagaaagcccatccgggtcctgagcctgttcgatggcatcgccaccggtctgctggtgctgaaggacctgggcatccaggtggataggtacattgcctccgaggtgtgcgaggactccatcaccgtgggaatggtgcgtcatcagggcaagatcatgtacgtgggcgacgtgcggagcgtgacacagaagcatatccaggagtggggccctttcgacctggtgatcggcggcagcccttgcaatgacctgagcatcgtgaacccagcccggaagggcctgtacgagggaaccggcagactgttcttcgagttttacagactgctgcacgacgcccggcctaaggaaggcgacgaccggcccttcttttggctgttcgagaatgtggtggccatgggagtcagcgacaagcgggatattagccggttcctggagagcaaccccgtgatgatcgatgccaaggaagtgagcgccgcccaccgggccagatacttctggggcaatctgcctggcatgaacagacccctggccagcaccgtgaacgacaagctggagctgcaggagtgcctggagcacggccggatcgccaagttcagcaaggtgagaaccatcaccacccgaagcaacagcatcaaacaaggcaaggaccagcactttcctgtgttcatgaacgagaaggaggacatcctgtggtgtaccgagatggagagagtgttcgggttcccagtccactacacagatgtcagcaacatgtctagactggccagacagagactgctgggaagaagctggtccgtccctgtgatcagacacctgttcgcccctctgaaggagtacttcgcctgcgtgagcagcggcaacagcaacgccaacagccggggccccagcttctctagcggcctggtgccactgtccctgagagggagccacatgggccccatggagatctacaaaaccgtgagcgcctggaagcggcagcctgtgcgcgtgctgagcctgtttcggaatatcgataaagtcctgaaaagcctgggattcctggagagcggctctggctccggcggtggcaccctgaagtacgtggaggatgtgacaaacgtggtcagacgggatgtggagaagtggggccccttcgatctggtgtacggcagcacccaacccctgggcagctcttgtgaccggtgccctggctggtacatgtttcagttccaccggatcctgcagtacgccctgccgagacaggagtcccagcggccattcttttggattttcatggacaacttgctgctgaccgaggatgaccaggaaactaccactcggttcctgcagaccgaagccgtgaccctgcaggacgtgagaggccgggactaccagaacgccatgcgggtgtggtccaacatccctggactgaaaagcaagcacgcacctctgacccctaaagaagaggagtacctgcaggcccaggtgcggagcagaagcaagctggacgcccctaaggtggatctgctggtgaagaattgcctcctgcccctgagagagtacttcaagtatttcagccagaatagtctgcccctgggcggcccaagcagcggcgcccctcctcccagcggcggcagcccagccggctccccaacctctaccgaggagggcacctctgagtccgccacccccgagagcggccctggcacctccaccgagcccagcgagggcagcgcacccggcagccctgccggcagccccacctccacagaggagggaaccagcaccgagcccagcgaaggcagcgccccaggcaccagcaccgagcctagtgagggcggctctggcggcggcagcgcccaggagattaaacggatcaacaagatcagaagaagacttgtgaaagacagcaacaccaagaaggccggcaagacaggccccatgaaaaccctgctggttagagtgatgacacccgatctgagagagcggctggaaaacctgagaaagaagcctgaaaatatcccccagcccatcagcaatacatctagagccaacctgaataagctgctgaccgattacaccgaaatgaagaaggcgatcctgcatgtgtactgggaagagttccagaaggaccctgtgggcctgatgagccgggtggcccagcctgccagcaagaagatcgatcagaacaagctgaaacctgagatggacgagaagggcaacctgaccaccgccggctttgcctgctctcagtgtggccagcccctgttcgtgtacaagctggagcaggtgtctgagaagggcaaggcttacaccaactacttcggacggtgcaatgtggccgagcacgaaaagctgatcctgctggcccagctgaagcccgagaaggatagcgacgaagccgtgacatatagcctgggaaagtttgggcagagggccctggatttctacagcattcatgtgaccaaggagtccacccaccccgtgaagcccctggcccagatcgccggaaacagatacgcctccggacctgtgggaaaggccctgagcgacgcatgtatgggcacaatcgcctccttcctgtctaagtaccaggacatcatcatcgaacaccagaaggtggtgaagggcaaccagaagagactggagagcctgcgggagctggccggcaaggaaaacctggaataccctagcgtgaccctgccacctcagcctcacaccaaggagggcgttgatgcctacaacgaagtgatcgcccgggtgcgaatgtgggtgaacctgaacctgtggcagaagctgaagctaagcagagatgatgccaagcctctgctgagactgaagggattcccttcctttcctctggtcgagagacaggccaacgaagtggactggtgggacatggtgtgtaacgtgaagaagctgatcaacgagaaaaaggaggatggcaaggtgttttggcagaatctggctggctacaagagacaggaagccctgagaccatacctgagcagcgaggaagatcggaagaagggaaagaaattcgctcggtaccagctgggcgacctgctgctgcacctggaaaagaagcacggcgaggactggggaaaggtgtacgacgaggcctgggagcggattgacaagaaagtggaaggcctgagcaagcacatcaagctggaagaggaacggagaagcgaggacgcccagagcaaggccgccctgaccgactggctgcgggctaaggccagcttcgtgatcgagggcctgaaggaggccgacaaggacgagttctgcagatgcgagctgaagctgcagaagtggtacggggacctgcggggaaagcccttcgccatcgaagccgagaacagcatcctggacatcagcggcttcagcaagcagtacaactgtgccttcatctggcagaaggacggcgtgaagaagctgaacctgtacctgatcatcaactacttcaagggcggcaagctgcggttcaagaagatcaaacctgaagccttcgaagccaacagattctacaccgtgatcaacaaaaagagcggcgagatcgtgcccatggaggtgaacttcaacttcgacgaccccaacctgatcatcctgcctctggcctttggcaagagacagggcagagaattcatctggaacgacctgctgtccctggaaaccggcagcctgaagctggccaacggaagagtgatcgagaagacactgtacaacagaagaacccggcaggatgagcctgccctgttcgtggccctgaccttcgagcggcgggaggtcctggactcctccaatatcaaaccaatgaacctgatcggcgtggcaagaggcgaaaacatccccgccgtgatcgccctgaccgaccccgagggctgcccactgagccggtttaaggatagcctgggaaacccaacccacatcctgagaatcggcgagagctataaggagaagcagcggaccatccaggccaagaaggaggtggagcagcggagagccggcggctacagccggaagtacgccagcaaagccaagaatctggcagacgatatggtgagaaacaccgctagagatctgctgtactacgccgtgacccaggatgccatgctgatcttcgccaacctgagccggggcttcggccggcagggcaagcggaccttcatggccgagagacagtacacacggatggaggactggctgaccgccaagctggcctacgagggcctgagcaagacctacctgtccaagacactggcccagtacacctccaagacatgcagcaactgtgggtttaccatcaccagcgccgactacgacagggtgctggagaagctgaagaagacagcaacaggctggatgaccacaattaacggcaaggagctgaaggtggagggccagattacctactacaacagatacaagagacagaacgtagtcaaggacctgtccgtcgagctggatagactgagcgaagaatctgtgaacaacgacatctcctcctggacaaagggcagaagcggagaagctctgagcctcctgaagaaaagattctcccatagacccgtgcaggagaagttcgtgtgcctgaactgcggcttcgagacacacgcagccgagcaagccgccctgaacatcgccagatcctggctgttcctgcggagccaggagtacaagaaataccagacaaacaagacaaccggcaacaccgataagagagccttcgtcgagacctggcagtccttttaccggaagaagcttaaggaggtgtggaaacctgccgtgcggtctggcggatctggcggaggctccacaagcatgaacggcatgacctacgacgacgtgcacgtgaacttcaccggcgaggagtgggccctgctgagccccagccagaagaggctgtacaaggacgtgatgctggagacctacaggaacctgaccgccatcggctacagctgggaggacaggaacatcgaggagcacttccagaggagcaggaggcacggcaggcacgagaggagccacaccggcgagaaccccagcgtgtacacccagtgcaacaccagccccaagaaaaagagaaaagtctaagctgccttctgcggggcttgccttctggccatgcccttcttctctcccttgcacctgtacctcttggtctttgaataaagcctgagtaggaaggctagcaaaaaaaaaaaaaaaaaaaaaaaaaaaaaaaaaaaaaaaaaaaaaaaaaaaaaaaaaaaaaaaaaaaaaaaaaaaaaaaa

SEQ ID NO: 6805 - RNA, 5797 nt, synthetic construct
  source 1..5797: mol_type = other RNA
aggaaataagagagaaaagaagagtaagaagaaatataagagccaccatggcccctaagaagaagcgtaaagtgagccggatggaacgcctcgtctacgaggtgcggcagaagtgcagaaacatcgaggacatctgcatctcctgcggatctctgaacgtgaccctggagcacccactgttcatcggcggcatgtgccagaactgtaaaaactgttttctggagtgtgcctatcaatacgacgatgacggctaccagagctactgcaccatctgttgcggcggaagagaggtgctgatgtgtggaaataacaactgctgccggtgcttctgcgtggaatgcgtggacctgctggtgggccccggcgccgcccaggccgctattaaggaagatccttggaactgctacatgtgcggccacaagggcacatacggcctgctgagacggagagaggactggcctagcagactgcagatgttcttcgccaataaccacgaccaggagttcgacccccctaaggtgtaccctcccgtccccgccgagaagagaaagcccatccgggtcctgagcctgttcgatggcatcgccaccggtctgctggtgctgaaggacctgggcatccaggtggataggtacattgcctccgaggtgtgcgaggactccatcaccgtgggaatggtgcgtcatcagggcaagatcatgtacgtgggcgacgtgcggagcgtgacacagaagcatatccaggagtggggccctttcgacctggtgatcggcggcagcccttgcaatgacctgagcatcgtgaacccagcccggaagggcctgtacgagggaaccggcagactgttcttcgagttttacagactgctgcacgacgcccggcctaaggaaggcgacgaccggcccttcttttggctgttcgagaatgtggtggccatgggagtcagcgacaagcgggatattagccggttcctggagagcaaccccgtgatgatcgatgccaaggaagtgagcgccgcccaccgggccagatacttctggggcaatctgcctggcatgaacagacccctggccagcaccgtgaacgacaagctggagctgcaggagtgcctggagcacggccggatcgccaagttcagcaaggtgagaaccatcaccacccgaagcaacagcatcaaacaaggcaaggaccagcactttcctgtgttcatgaacgagaaggaggacatcctgtggtgtaccgagatggagagagtgttcgggttcccagtccactacacagatgtcagcaacatgtctagactggccagacagagactgctgggaagaagctggtccgtccctgtgatcagacacctgttcgcccctctgaaggagtacttcgcctgcgtgagcagcggcaacagcaacgccaacagccggggccccagcttctctagcggcctggtgccactgtccctgagagggagccacatgggccccatggagatctacaaaaccgtgagcgcctggaagcggcagcctgtgcgcgtgctgagcctgtttcggaatatcgataaagtcctgaaaagcctgggattcctggagagcggctctggctccggcggtggcaccctgaagtacgtggaggatgtgacaaacgtggtcagacgggatgtggagaagtggggccccttcgatctggtgtacggcagcacccaacccctgggcagctcttgtgaccggtgccctggctggtacatgtttcagttccaccggatcctgcagtacgccctgccgagacaggagtcccagcggccattcttttggattttcatggacaacttgctgctgaccgaggatgaccaggaaactaccactcggttcctgcagaccgaagccgtgaccctgcaggacgtgagaggccgggactaccagaacgccatgcgggtgtggtccaacatccctggactgaaaagcaagcacgcacctctgacccctaaagaagaggagtacctgcaggcccaggtgcggagcagaagcaagctggacgcccctaaggtggatctgctggtgaagaattgcctcctgcccctgagagagtacttcaagtatttcagccagaatagtctgcccctgggcggcccaagcagcggcgcccctcctcccagcggcggcagcccagccggctccccaacctctaccgaggagggcacctctgagtccgccacccccgagagcggccctggcacctccaccgagcccagcgagggcagcgcacccggcagccctgccggcagccccacctccacagaggagggaaccagcaccgagcccagcgaaggcagcgccccaggcaccagcaccgagcctagtgagggcggctctggcggcggcagcgcccaggagattaaacggatcaacaagatcagaagaagacttgtgaaagacagcaacaccaagaaggccggcaagacaggccccatgaaaaccctgctggttagagtgatgacacccgatctgagagagcggctggaaaacctgagaaagaagcctgaaaatatcccccagcccatcagcaatacatctagagccaacctgaataagctgctgaccgattacaccgaaatgaagaaggcgatcctgcatgtgtactgggaagagttccagaaggaccctgtgggcctgatgagccgggtggcccagcctgccagcaagaagatcgatcagaacaagctgaaacctgagatggacgagaagggcaacctgaccaccgccggctttgcctgctctcagtgtggccagcccctgttcgtgtacaagctggagcaggtgtctgagaagggcaaggcttacaccaactacttcggacggtgcaatgtggccgagcacgaaaagctgatcctgctggcccagctgaagcccgagaaggatagcgacgaagccgtgacatatagcctgggaaagtttgggcagagggccctggatttctacagcattcatgtgaccaaggagtccacccaccccgtgaagcccctggcccagatcgccggaaacagatacgcctccggacctgtgggaaaggccctgagcgacgcatgtatgggcacaatcgcctccttcctgtctaagtaccaggacatcatcatcgaacaccagaaggtggtgaagggcaaccagaagagactggagagcctgcgggagctggccggcaaggaaaacctggaataccctagcgtgaccctgccacctcagcctcacaccaaggagggcgttgatgcctacaacgaagtgatcgcccgggtgcgaatgtgggtgaacctgaacctgtggcagaagctgaagctaagcagagatgatgccaagcctctgctgagactgaagggattcccttcctttcctctggtcgagagacaggccaacgaagtggactggtgggacatggtgtgtaacgtgaagaagctgatcaacgagaaaaaggaggatggcaaggtgttttggcagaatctggctggctacaagagacaggaagccctgagaccatacctgagcagcgaggaagatcggaagaagggaaagaaattcgctcggtaccagctgggcgacctgctgctgcacctggaaaagaagcacggcgaggactggggaaaggtgtacgacgaggcctgggagcggattgacaagaaagtggaaggcctgagcaagcacatcaagctggaagaggaacggagaagcgaggacgcccagagcaaggccgccctgaccgactggctgcgggctaaggccagcttcgtgatcgagggcctgaaggaggccgacaaggacgagttctgcagatgcgagctgaagctgcagaagtggtacggggacctgcggggaaagcccttcgccatcgaagccgagaacagcatcctggacatcagcggcttcagcaagcagtacaactgtgccttcatctggcagaaggacggcgtgaagaagctgaacctgtacctgatcatcaactacttcaagggcggcaagctgcggttcaagaagatcaaacctgaagccttcgaagccaacagattctacaccgtgatcaacaaaaagagcggcgagatcgtgcccatggaggtgaacttcaacttcgacgaccccaacctgatcatcctgcctctggcctttggcaagagacagggcagagaattcatctggaacgacctgctgtccctggaaaccggcagcctgaagctggccaacggaagagtgatcgagaagacactgtacaacagaagaacccggcaggatgagcctgccctgttcgtggccctgaccttcgagcggcgggaggtcctggactcctccaatatcaaaccaatgaacctgatcggcgtggcaagaggcgaaaacatccccgccgtgatcgccctgaccgaccccgagggctgcccactgagccggtttaaggatagcctgggaaacccaacccacatcctgagaatcggcgagagctataaggagaagcagcggaccatccaggccaagaaggaggtggagcagcggagagccggcggctacagccggaagtacgccagcaaagccaagaatctggcagacgatatggtgagaaacaccgctagagatctgctgtactacgccgtgacccaggatgccatgctgatcttcgccaacctgagccggggcttcggccggcagggcaagcggaccttcatggccgagagacagtacacacggatggaggactggctgaccgccaagctggcctacgagggcctgagcaagacctacctgtccaagacactggcccagtacacctccaagacatgcagcaactgtgggtttaccatcaccagcgccgactacgacagggtgctggagaagctgaagaagacagcaacaggctggatgaccacaattaacggcaaggagctgaaggtggagggccagattacctactacaacagatacaagagacagaacgtagtcaaggacctgtccgtcgagctggatagactgagcgaagaatctgtgaacaacgacatctcctcctggacaaagggcagaagcggagaagctctgagcctcctgaagaaaagattctcccatagacccgtgcaggagaagttcgtgtgcctgaactgcggcttcgagacacacgcagccgagcaagccgccctgaacatcgccagatcctggctgttcctgcggagccaggagtacaagaaataccagacaaacaagacaaccggcaacaccgataagagagccttcgtcgagacctggcagtccttttaccggaagaagcttaaggaggtgtggaaacctgccgtgcggtctggcggatctggcggaggctccacaagcgcccaggagagcgtgaccttcgaggacgtggccgtgaacttcaccgacagggagtggcagtgcctgacctacgcccagaggcacctgtacaaggacgtgatgctggagaactacggcaacatggtgagcgtgggcttcctgttccccaagccccccctgatcagccacctggagaggggcgtggagccctgcgtgcaggacccccaggacagggagagcctgagctgcagctgcctggtgagcaccagccccaagaaaaagagaaaagtctaagctgccttctgcggggcttgccttctggccatgcccttcttctctcccttgcacctgtacctcttggtctttgaataaagcctgagtaggaaggctagcaaaaaaaaaaaaaaaaaaaaaaaaaaaaaaaaaaaaaaaaaaaaaaaaaaaaaaaaaaaaaaaaaaaaaaaaaaaaaaaa

SEQ ID NO: 6806 - RNA, 5797 nt, synthetic construct
  source 1..5797: mol_type = other RNA
aggaaataagagagaaaagaagagtaagaagaaatataagagccaccatggcccctaagaagaagcgtaaagtgagccggatggaacgcctcgtctacgaggtgcggcagaagtgcagaaacatcgaggacatctgcatctcctgcggatctctgaacgtgaccctggagcacccactgttcatcggcggcatgtgccagaactgtaaaaactgttttctggagtgtgcctatcaatacgacgatgacggctaccagagctactgcaccatctgttgcggcggaagagaggtgctgatgtgtggaaataacaactgctgccggtgcttctgcgtggaatgcgtggacctgctggtgggccccggcgccgcccaggccgctattaaggaagatccttggaactgctacatgtgcggccacaagggcacatacggcctgctgagacggagagaggactggcctagcagactgcagatgttcttcgccaataaccacgaccaggagttcgacccccctaaggtgtaccctcccgtccccgccgagaagagaaagcccatccgggtcctgagcctgttcgatggcatcgccaccggtctgctggtgctgaaggacctgggcatccaggtggataggtacattgcctccgaggtgtgcgaggactccatcaccgtgggaatggtgcgtcatcagggcaagatcatgtacgtgggcgacgtgcggagcgtgacacagaagcatatccaggagtggggccctttcgacctggtgatcggcggcagcccttgcaatgacctgagcatcgtgaacccagcccggaagggcctgtacgagggaaccggcagactgttcttcgagttttacagactgctgcacgacgcccggcctaaggaaggcgacgaccggcccttcttttggctgttcgagaatgtggtggccatgggagtcagcgacaagcgggatattagccggttcctggagagcaaccccgtgatgatcgatgccaaggaagtgagcgccgcccaccgggccagatacttctggggcaatctgcctggcatgaacagacccctggccagcaccgtgaacgacaagctggagctgcaggagtgcctggagcacggccggatcgccaagttcagcaaggtgagaaccatcaccacccgaagcaacagcatcaaacaaggcaaggaccagcactttcctgtgttcatgaacgagaaggaggacatcctgtggtgtaccgagatggagagagtgttcgggttcccagtccactacacagatgtcagcaacatgtctagactggccagacagagactgctgggaagaagctggtccgtccctgtgatcagacacctgttcgcccctctgaaggagtacttcgcctgcgtgagcagcggcaacagcaacgccaacagccggggccccagcttctctagcggcctggtgccactgtccctgagagggagccacatgggccccatggagatctacaaaaccgtgagcgcctggaagcggcagcctgtgcgcgtgctgagcctgtttcggaatatcgataaagtcctgaaaagcctgggattcctggagagcggctctggctccggcggtggcaccctgaagtacgtggaggatgtgacaaacgtggtcagacgggatgtggagaagtggggccccttcgatctggtgtacggcagcacccaacccctgggcagctcttgtgaccggtgccctggctggtacatgtttcagttccaccggatcctgcagtacgccctgccgagacaggagtcccagcggccattcttttggattttcatggacaacttgctgctgaccgaggatgaccaggaaactaccactcggttcctgcagaccgaagccgtgaccctgcaggacgtgagaggccgggactaccagaacgccatgcgggtgtggtccaacatccctggactgaaaagcaagcacgcacctctgacccctaaagaagaggagtacctgcaggcccaggtgcggagcagaagcaagctggacgcccctaaggtggatctgctggtgaagaattgcctcctgcccctgagagagtacttcaagtatttcagccagaatagtctgcccctgggcggcccaagcagcggcgcccctcctcccagcggcggcagcccagccggctccccaacctctaccgaggagggcacctctgagtccgccacccccgagagcggccctggcacctccaccgagcccagcgagggcagcgcacccggcagccctgccggcagccccacctccacagaggagggaaccagcaccgagcccagcgaaggcagcgccccaggcaccagcaccgagcctagtgagggcggctctggcggcggcagcgcccaggagattaaacggatcaacaagatcagaagaagacttgtgaaagacagcaacaccaagaaggccggcaagacaggccccatgaaaaccctgctggttagagtgatgacacccgatctgagagagcggctggaaaacctgagaaagaagcctgaaaatatcccccagcccatcagcaatacatctagagccaacctgaataagctgctgaccgattacaccgaaatgaagaaggcgatcctgcatgtgtactgggaagagttccagaaggaccctgtgggcctgatgagccgggtggcccagcctgccagcaagaagatcgatcagaacaagctgaaacctgagatggacgagaagggcaacctgaccaccgccggctttgcctgctctcagtgtggccagcccctgttcgtgtacaagctggagcaggtgtctgagaagggcaaggcttacaccaactacttcggacggtgcaatgtggccgagcacgaaaagctgatcctgctggcccagctgaagcccgagaaggatagcgacgaagccgtgacatatagcctgggaaagtttgggcagagggccctggatttctacagcattcatgtgaccaaggagtccacccaccccgtgaagcccctggcccagatcgccggaaacagatacgcctccggacctgtgggaaaggccctgagcgacgcatgtatgggcacaatcgcctccttcctgtctaagtaccaggacatcatcatcgaacaccagaaggtggtgaagggcaaccagaagagactggagagcctgcgggagctggccggcaaggaaaacctggaataccctagcgtgaccctgccacctcagcctcacaccaaggagggcgttgatgcctacaacgaagtgatcgcccgggtgcgaatgtgggtgaacctgaacctgtggcagaagctgaagctaagcagagatgatgccaagcctctgctgagactgaagggattcccttcctttcctctggtcgagagacaggccaacgaagtggactggtgggacatggtgtgtaacgtgaagaagctgatcaacgagaaaaaggaggatggcaaggtgttttggcagaatctggctggctacaagagacaggaagccctgagaccatacctgagcagcgaggaagatcggaagaagggaaagaaattcgctcggtaccagctgggcgacctgctgctgcacctggaaaagaagcacggcgaggactggggaaaggtgtacgacgaggcctgggagcggattgacaagaaagtggaaggcctgagcaagcacatcaagctggaagaggaacggagaagcgaggacgcccagagcaaggccgccctgaccgactggctgcgggctaaggccagcttcgtgatcgagggcctgaaggaggccgacaaggacgagttctgcagatgcgagctgaagctgcagaagtggtacggggacctgcggggaaagcccttcgccatcgaagccgagaacagcatcctggacatcagcggcttcagcaagcagtacaactgtgccttcatctggcagaaggacggcgtgaagaagctgaacctgtacctgatcatcaactacttcaagggcggcaagctgcggttcaagaagatcaaacctgaagccttcgaagccaacagattctacaccgtgatcaacaaaaagagcggcgagatcgtgcccatggaggtgaacttcaacttcgacgaccccaacctgatcatcctgcctctggcctttggcaagagacagggcagagaattcatctggaacgacctgctgtccctggaaaccggcagcctgaagctggccaacggaagagtgatcgagaagacactgtacaacagaagaacccggcaggatgagcctgccctgttcgtggccctgaccttcgagcggcgggaggtcctggactcctccaatatcaaaccaatgaacctgatcggcgtggcaagaggcgaaaacatccccgccgtgatcgccctgaccgaccccgagggctgcccactgagccggtttaaggatagcctgggaaacccaacccacatcctgagaatcggcgagagctataaggagaagcagcggaccatccaggccaagaaggaggtggagcagcggagagccggcggctacagccggaagtacgccagcaaagccaagaatctggcagacgatatggtgagaaacaccgctagagatctgctgtactacgccgtgacccaggatgccatgctgatcttcgccaacctgagccggggcttcggccggcagggcaagcggaccttcatggccgagagacagtacacacggatggaggactggctgaccgccaagctggcctacgagggcctgagcaagacctacctgtccaagacactggcccagtacacctccaagacatgcagcaactgtgggtttaccatcaccagcgccgactacgacagggtgctggagaagctgaagaagacagcaacaggctggatgaccacaattaacggcaaggagctgaaggtggagggccagattacctactacaacagatacaagagacagaacgtagtcaaggacctgtccgtcgagctggatagactgagcgaagaatctgtgaacaacgacatctcctcctggacaaagggcagaagcggagaagctctgagcctcctgaagaaaagattctcccatagacccgtgcaggagaagttcgtgtgcctgaactgcggcttcgagacacacgcagccgagcaagccgccctgaacatcgccagatcctggctgttcctgcggagccaggagtacaagaaataccagacaaacaagacaaccggcaacaccgataagagagccttcgtcgagacctggcagtccttttaccggaagaagcttaaggaggtgtggaaacctgccgtgcggtctggcggatctggcggaggctccacaagcagccagagcctggtgaccttcggcgacgtggccatcaacttcagccaggaggagtgggagtggctgaacagcgcccagaggaacctgtacaggagcgtgatgctggagaactacaggaacctggtgagcctgggcctgtgcgtgagcaagcccgacatgatcagcagcctggagcagaggaaggagccctggatggtgaagaggaagctgaccaggggcaggtgccccgacctgaaggccgtgaccagccccaagaaaaagagaaaagtctaagctgccttctgcggggcttgccttctggccatgcccttcttctctcccttgcacctgtacctcttggtctttgaataaagcctgagtaggaaggctagcaaaaaaaaaaaaaaaaaaaaaaaaaaaaaaaaaaaaaaaaaaaaaaaaaaaaaaaaaaaaaaaaaaaaaaaaaaaaaaaa

SEQ ID NO: 6807 - RNA, 5797 nt, synthetic construct
  source 1..5797: mol_type = other RNA
aggaaataagagagaaaagaagagtaagaagaaatataagagccaccatggcccctaagaagaagcgtaaagtgagccggatggaacgcctcgtctacgaggtgcggcagaagtgcagaaacatcgaggacatctgcatctcctgcggatctctgaacgtgaccctggagcacccactgttcatcggcggcatgtgccagaactgtaaaaactgttttctggagtgtgcctatcaatacgacgatgacggctaccagagctactgcaccatctgttgcggcggaagagaggtgctgatgtgtggaaataacaactgctgccggtgcttctgcgtggaatgcgtggacctgctggtgggccccggcgccgcccaggccgctattaaggaagatccttggaactgctacatgtgcggccacaagggcacatacggcctgctgagacggagagaggactggcctagcagactgcagatgttcttcgccaataaccacgaccaggagttcgacccccctaaggtgtaccctcccgtccccgccgagaagagaaagcccatccgggtcctgagcctgttcgatggcatcgccaccggtctgctggtgctgaaggacctgggcatccaggtggataggtacattgcctccgaggtgtgcgaggactccatcaccgtgggaatggtgcgtcatcagggcaagatcatgtacgtgggcgacgtgcggagcgtgacacagaagcatatccaggagtggggccctttcgacctggtgatcggcggcagcccttgcaatgacctgagcatcgtgaacccagcccggaagggcctgtacgagggaaccggcagactgttcttcgagttttacagactgctgcacgacgcccggcctaaggaaggcgacgaccggcccttcttttggctgttcgagaatgtggtggccatgggagtcagcgacaagcgggatattagccggttcctggagagcaaccccgtgatgatcgatgccaaggaagtgagcgccgcccaccgggccagatacttctggggcaatctgcctggcatgaacagacccctggccagcaccgtgaacgacaagctggagctgcaggagtgcctggagcacggccggatcgccaagttcagcaaggtgagaaccatcaccacccgaagcaacagcatcaaacaaggcaaggaccagcactttcctgtgttcatgaacgagaaggaggacatcctgtggtgtaccgagatggagagagtgttcgggttcccagtccactacacagatgtcagcaacatgtctagactggccagacagagactgctgggaagaagctggtccgtccctgtgatcagacacctgttcgcccctctgaaggagtacttcgcctgcgtgagcagcggcaacagcaacgccaacagccggggccccagcttctctagcggcctggtgccactgtccctgagagggagccacatgggccccatggagatctacaaaaccgtgagcgcctggaagcggcagcctgtgcgcgtgctgagcctgtttcggaatatcgataaagtcctgaaaagcctgggattcctggagagcggctctggctccggcggtggcaccctgaagtacgtggaggatgtgacaaacgtggtcagacgggatgtggagaagtggggccccttcgatctggtgtacggcagcacccaacccctgggcagctcttgtgaccggtgccctggctggtacatgtttcagttccaccggatcctgcagtacgccctgccgagacaggagtcccagcggccattcttttggattttcatggacaacttgctgctgaccgaggatgaccaggaaactaccactcggttcctgcagaccgaagccgtgaccctgcaggacgtgagaggccgggactaccagaacgccatgcgggtgtggtccaacatccctggactgaaaagcaagcacgcacctctgacccctaaagaagaggagtacctgcaggcccaggtgcggagcagaagcaagctggacgcccctaaggtggatctgctggtgaagaattgcctcctgcccctgagagagtacttcaagtatttcagccagaatagtctgcccctgggcggcccaagcagcggcgcccctcctcccagcggcggcagcccagccggctccccaacctctaccgaggagggcacctctgagtccgccacccccgagagcggccctggcacctccaccgagcccagcgagggcagcgcacccggcagccctgccggcagccccacctccacagaggagggaaccagcaccgagcccagcgaaggcagcgccccaggcaccagcaccgagcctagtgagggcggctctggcggcggcagcgcccaggagattaaacggatcaacaagatcagaagaagacttgtgaaagacagcaacaccaagaaggccggcaagacaggccccatgaaaaccctgctggttagagtgatgacacccgatctgagagagcggctggaaaacctgagaaagaagcctgaaaatatcccccagcccatcagcaatacatctagagccaacctgaataagctgctgaccgattacaccgaaatgaagaaggcgatcctgcatgtgtactgggaagagttccagaaggaccctgtgggcctgatgagccgggtggcccagcctgccagcaagaagatcgatcagaacaagctgaaacctgagatggacgagaagggcaacctgaccaccgccggctttgcctgctctcagtgtggccagcccctgttcgtgtacaagctggagcaggtgtctgagaagggcaaggcttacaccaactacttcggacggtgcaatgtggccgagcacgaaaagctgatcctgctggcccagctgaagcccgagaaggatagcgacgaagccgtgacatatagcctgggaaagtttgggcagagggccctggatttctacagcattcatgtgaccaaggagtccacccaccccgtgaagcccctggcccagatcgccggaaacagatacgcctccggacctgtgggaaaggccctgagcgacgcatgtatgggcacaatcgcctccttcctgtctaagtaccaggacatcatcatcgaacaccagaaggtggtgaagggcaaccagaagagactggagagcctgcgggagctggccggcaaggaaaacctggaataccctagcgtgaccctgccacctcagcctcacaccaaggagggcgttgatgcctacaacgaagtgatcgcccgggtgcgaatgtgggtgaacctgaacctgtggcagaagctgaagctaagcagagatgatgccaagcctctgctgagactgaagggattcccttcctttcctctggtcgagagacaggccaacgaagtggactggtgggacatggtgtgtaacgtgaagaagctgatcaacgagaaaaaggaggatggcaaggtgttttggcagaatctggctggctacaagagacaggaagccctgagaccatacctgagcagcgaggaagatcggaagaagggaaagaaattcgctcggtaccagctgggcgacctgctgctgcacctggaaaagaagcacggcgaggactggggaaaggtgtacgacgaggcctgggagcggattgacaagaaagtggaaggcctgagcaagcacatcaagctggaagaggaacggagaagcgaggacgcccagagcaaggccgccctgaccgactggctgcgggctaaggccagcttcgtgatcgagggcctgaaggaggccgacaaggacgagttctgcagatgcgagctgaagctgcagaagtggtacggggacctgcggggaaagcccttcgccatcgaagccgagaacagcatcctggacatcagcggcttcagcaagcagtacaactgtgccttcatctggcagaaggacggcgtgaagaagctgaacctgtacctgatcatcaactacttcaagggcggcaagctgcggttcaagaagatcaaacctgaagccttcgaagccaacagattctacaccgtgatcaacaaaaagagcggcgagatcgtgcccatggaggtgaacttcaacttcgacgaccccaacctgatcatcctgcctctggcctttggcaagagacagggcagagaattcatctggaacgacctgctgtccctggaaaccggcagcctgaagctggccaacggaagagtgatcgagaagacactgtacaacagaagaacccggcaggatgagcctgccctgttcgtggccctgaccttcgagcggcgggaggtcctggactcctccaatatcaaaccaatgaacctgatcggcgtggcaagaggcgaaaacatccccgccgtgatcgccctgaccgaccccgagggctgcccactgagccggtttaaggatagcctgggaaacccaacccacatcctgagaatcggcgagagctataaggagaagcagcggaccatccaggccaagaaggaggtggagcagcggagagccggcggctacagccggaagtacgccagcaaagccaagaatctggcagacgatatggtgagaaacaccgctagagatctgctgtactacgccgtgacccaggatgccatgctgatcttcgccaacctgagccggggcttcggccggcagggcaagcggaccttcatggccgagagacagtacacacggatggaggactggctgaccgccaagctggcctacgagggcctgagcaagacctacctgtccaagacactggcccagtacacctccaagacatgcagcaactgtgggtttaccatcaccagcgccgactacgacagggtgctggagaagctgaagaagacagcaacaggctggatgaccacaattaacggcaaggagctgaaggtggagggccagattacctactacaacagatacaagagacagaacgtagtcaaggacctgtccgtcgagctggatagactgagcgaagaatctgtgaacaacgacatctcctcctggacaaagggcagaagcggagaagctctgagcctcctgaagaaaagattctcccatagacccgtgcaggagaagttcgtgtgcctgaactgcggcttcgagacacacgcagccgagcaagccgccctgaacatcgccagatcctggctgttcctgcggagccaggagtacaagaaataccagacaaacaagacaaccggcaacaccgataagagagccttcgtcgagacctggcagtccttttaccggaagaagcttaaggaggtgtggaaacctgccgtgcggtctggcggatctggcggaggctccacaagcttccagggcagcgtgaccttcagggacgtggccatcgacttcagccaggaggagtgggagtggctgcagcccgcccagagggacctgtacaggcacgtgatgctggagaactacggccacctggtgagcctgggcctgaacatcagcaagccccacgtggtgagcctgctggagcagggcagggacccctggcccgacaacggcgccgtgggcggcggcctgttcagcgagagcaagggcgagaccagccccaagaaaaagagaaaagtctaagctgccttctgcggggcttgccttctggccatgcccttcttctctcccttgcacctgtacctcttggtctttgaataaagcctgagtaggaaggctagcaaaaaaaaaaaaaaaaaaaaaaaaaaaaaaaaaaaaaaaaaaaaaaaaaaaaaaaaaaaaaaaaaaaaaaaaaaaaaaaa

SEQ ID NO: 6808 - RNA, 5797 nt, synthetic construct
  source 1..5797: mol_type = other RNA
aggaaataagagagaaaagaagagtaagaagaaatataagagccaccatggcccctaagaagaagcgtaaagtgagccggatggaacgcctcgtctacgaggtgcggcagaagtgcagaaacatcgaggacatctgcatctcctgcggatctctgaacgtgaccctggagcacccactgttcatcggcggcatgtgccagaactgtaaaaactgttttctggagtgtgcctatcaatacgacgatgacggctaccagagctactgcaccatctgttgcggcggaagagaggtgctgatgtgtggaaataacaactgctgccggtgcttctgcgtggaatgcgtggacctgctggtgggccccggcgccgcccaggccgctattaaggaagatccttggaactgctacatgtgcggccacaagggcacatacggcctgctgagacggagagaggactggcctagcagactgcagatgttcttcgccaataaccacgaccaggagttcgacccccctaaggtgtaccctcccgtccccgccgagaagagaaagcccatccgggtcctgagcctgttcgatggcatcgccaccggtctgctggtgctgaaggacctgggcatccaggtggataggtacattgcctccgaggtgtgcgaggactccatcaccgtgggaatggtgcgtcatcagggcaagatcatgtacgtgggcgacgtgcggagcgtgacacagaagcatatccaggagtggggccctttcgacctggtgatcggcggcagcccttgcaatgacctgagcatcgtgaacccagcccggaagggcctgtacgagggaaccggcagactgttcttcgagttttacagactgctgcacgacgcccggcctaaggaaggcgacgaccggcccttcttttggctgttcgagaatgtggtggccatgggagtcagcgacaagcgggatattagccggttcctggagagcaaccccgtgatgatcgatgccaaggaagtgagcgccgcccaccgggccagatacttctggggcaatctgcctggcatgaacagacccctggccagcaccgtgaacgacaagctggagctgcaggagtgcctggagcacggccggatcgccaagttcagcaaggtgagaaccatcaccacccgaagcaacagcatcaaacaaggcaaggaccagcactttcctgtgttcatgaacgagaaggaggacatcctgtggtgtaccgagatggagagagtgttcgggttcccagtccactacacagatgtcagcaacatgtctagactggccagacagagactgctgggaagaagctggtccgtccctgtgatcagacacctgttcgcccctctgaaggagtacttcgcctgcgtgagcagcggcaacagcaacgccaacagccggggccccagcttctctagcggcctggtgccactgtccctgagagggagccacatgggccccatggagatctacaaaaccgtgagcgcctggaagcggcagcctgtgcgcgtgctgagcctgtttcggaatatcgataaagtcctgaaaagcctgggattcctggagagcggctctggctccggcggtggcaccctgaagtacgtggaggatgtgacaaacgtggtcagacgggatgtggagaagtggggccccttcgatctggtgtacggcagcacccaacccctgggcagctcttgtgaccggtgccctggctggtacatgtttcagttccaccggatcctgcagtacgccctgccgagacaggagtcccagcggccattcttttggattttcatggacaacttgctgctgaccgaggatgaccaggaaactaccactcggttcctgcagaccgaagccgtgaccctgcaggacgtgagaggccgggactaccagaacgccatgcgggtgtggtccaacatccctggactgaaaagcaagcacgcacctctgacccctaaagaagaggagtacctgcaggcccaggtgcggagcagaagcaagctggacgcccctaaggtggatctgctggtgaagaattgcctcctgcccctgagagagtacttcaagtatttcagccagaatagtctgcccctgggcggcccaagcagcggcgcccctcctcccagcggcggcagcccagccggctccccaacctctaccgaggagggcacctctgagtccgccacccccgagagcggccctggcacctccaccgagcccagcgagggcagcgcacccggcagccctgccggcagccccacctccacagaggagggaaccagcaccgagcccagcgaaggcagcgccccaggcaccagcaccgagcctagtgagggcggctctggcggcggcagcgcccaggagattaaacggatcaacaagatcagaagaagacttgtgaaagacagcaacaccaagaaggccggcaagacaggccccatgaaaaccctgctggttagagtgatgacacccgatctgagagagcggctggaaaacctgagaaagaagcctgaaaatatcccccagcccatcagcaatacatctagagccaacctgaataagctgctgaccgattacaccgaaatgaagaaggcgatcctgcatgtgtactgggaagagttccagaaggaccctgtgggcctgatgagccgggtggcccagcctgccagcaagaagatcgatcagaacaagctgaaacctgagatggacgagaagggcaacctgaccaccgccggctttgcctgctctcagtgtggccagcccctgttcgtgtacaagctggagcaggtgtctgagaagggcaaggcttacaccaactacttcggacggtgcaatgtggccgagcacgaaaagctgatcctgctggcccagctgaagcccgagaaggatagcgacgaagccgtgacatatagcctgggaaagtttgggcagagggccctggatttctacagcattcatgtgaccaaggagtccacccaccccgtgaagcccctggcccagatcgccggaaacagatacgcctccggacctgtgggaaaggccctgagcgacgcatgtatgggcacaatcgcctccttcctgtctaagtaccaggacatcatcatcgaacaccagaaggtggtgaagggcaaccagaagagactggagagcctgcgggagctggccggcaaggaaaacctggaataccctagcgtgaccctgccacctcagcctcacaccaaggagggcgttgatgcctacaacgaagtgatcgcccgggtgcgaatgtgggtgaacctgaacctgtggcagaagctgaagctaagcagagatgatgccaagcctctgctgagactgaagggattcccttcctttcctctggtcgagagacaggccaacgaagtggactggtgggacatggtgtgtaacgtgaagaagctgatcaacgagaaaaaggaggatggcaaggtgttttggcagaatctggctggctacaagagacaggaagccctgagaccatacctgagcagcgaggaagatcggaagaagggaaagaaattcgctcggtaccagctgggcgacctgctgctgcacctggaaaagaagcacggcgaggactggggaaaggtgtacgacgaggcctgggagcggattgacaagaaagtggaaggcctgagcaagcacatcaagctggaagaggaacggagaagcgaggacgcccagagcaaggccgccctgaccgactggctgcgggctaaggccagcttcgtgatcgagggcctgaaggaggccgacaaggacgagttctgcagatgcgagctgaagctgcagaagtggtacggggacctgcggggaaagcccttcgccatcgaagccgagaacagcatcctggacatcagcggcttcagcaagcagtacaactgtgccttcatctggcagaaggacggcgtgaagaagctgaacctgtacctgatcatcaactacttcaagggcggcaagctgcggttcaagaagatcaaacctgaagccttcgaagccaacagattctacaccgtgatcaacaaaaagagcggcgagatcgtgcccatggaggtgaacttcaacttcgacgaccccaacctgatcatcctgcctctggcctttggcaagagacagggcagagaattcatctggaacgacctgctgtccctggaaaccggcagcctgaagctggccaacggaagagtgatcgagaagacactgtacaacagaagaacccggcaggatgagcctgccctgttcgtggccctgaccttcgagcggcgggaggtcctggactcctccaatatcaaaccaatgaacctgatcggcgtggcaagaggcgaaaacatccccgccgtgatcgccctgaccgaccccgagggctgcccactgagccggtttaaggatagcctgggaaacccaacccacatcctgagaatcggcgagagctataaggagaagcagcggaccatccaggccaagaaggaggtggagcagcggagagccggcggctacagccggaagtacgccagcaaagccaagaatctggcagacgatatggtgagaaacaccgctagagatctgctgtactacgccgtgacccaggatgccatgctgatcttcgccaacctgagccggggcttcggccggcagggcaagcggaccttcatggccgagagacagtacacacggatggaggactggctgaccgccaagctggcctacgagggcctgagcaagacctacctgtccaagacactggcccagtacacctccaagacatgcagcaactgtgggtttaccatcaccagcgccgactacgacagggtgctggagaagctgaagaagacagcaacaggctggatgaccacaattaacggcaaggagctgaaggtggagggccagattacctactacaacagatacaagagacagaacgtagtcaaggacctgtccgtcgagctggatagactgagcgaagaatctgtgaacaacgacatctcctcctggacaaagggcagaagcggagaagctctgagcctcctgaagaaaagattctcccatagacccgtgcaggagaagttcgtgtgcctgaactgcggcttcgagacacacgcagccgagcaagccgccctgaacatcgccagatcctggctgttcctgcggagccaggagtacaagaaataccagacaaacaagacaaccggcaacaccgataagagagccttcgtcgagacctggcagtccttttaccggaagaagcttaaggaggtgtggaaacctgccgtgcggtctggcggatctggcggaggctccacaagcatggacagcgtgaccatcgaggacgtggccgtggacttcaccctggaggagtgggccctgctggaccccagccagaggaagctgtacagggacgtgatgcaggagaccctgaggaacctggccgccgtgggcgccaagagggagtaccacgacatcgaggaccagtacaagaaccagggcaggaagctgaggaccttcatggtggagaggttctgcaagagcaaggacatcagcctgtgcggcaccagccccaagaaaaagagaaaagtctaagctgccttctgcggggcttgccttctggccatgcccttcttctctcccttgcacctgtacctcttggtctttgaataaagcctgagtaggaaggctagcaaaaaaaaaaaaaaaaaaaaaaaaaaaaaaaaaaaaaaaaaaaaaaaaaaaaaaaaaaaaaaaaaaaaaaaaaaaaaaaa

SEQ ID NO: 6809 - RNA, 5797 nt, synthetic construct
  source 1..5797: mol_type = other RNA
aggaaataagagagaaaagaagagtaagaagaaatataagagccaccatggcccctaagaagaagcgtaaagtgagccggatggaacgcctcgtctacgaggtgcggcagaagtgcagaaacatcgaggacatctgcatctcctgcggatctctgaacgtgaccctggagcacccactgttcatcggcggcatgtgccagaactgtaaaaactgttttctggagtgtgcctatcaatacgacgatgacggctaccagagctactgcaccatctgttgcggcggaagagaggtgctgatgtgtggaaataacaactgctgccggtgcttctgcgtggaatgcgtggacctgctggtgggccccggcgccgcccaggccgctattaaggaagatccttggaactgctacatgtgcggccacaagggcacatacggcctgctgagacggagagaggactggcctagcagactgcagatgttcttcgccaataaccacgaccaggagttcgacccccctaaggtgtaccctcccgtccccgccgagaagagaaagcccatccgggtcctgagcctgttcgatggcatcgccaccggtctgctggtgctgaaggacctgggcatccaggtggataggtacattgcctccgaggtgtgcgaggactccatcaccgtgggaatggtgcgtcatcagggcaagatcatgtacgtgggcgacgtgcggagcgtgacacagaagcatatccaggagtggggccctttcgacctggtgatcggcggcagcccttgcaatgacctgagcatcgtgaacccagcccggaagggcctgtacgagggaaccggcagactgttcttcgagttttacagactgctgcacgacgcccggcctaaggaaggcgacgaccggcccttcttttggctgttcgagaatgtggtggccatgggagtcagcgacaagcgggatattagccggttcctggagagcaaccccgtgatgatcgatgccaaggaagtgagcgccgcccaccgggccagatacttctggggcaatctgcctggcatgaacagacccctggccagcaccgtgaacgacaagctggagctgcaggagtgcctggagcacggccggatcgccaagttcagcaaggtgagaaccatcaccacccgaagcaacagcatcaaacaaggcaaggaccagcactttcctgtgttcatgaacgagaaggaggacatcctgtggtgtaccgagatggagagagtgttcgggttcccagtccactacacagatgtcagcaacatgtctagactggccagacagagactgctgggaagaagctggtccgtccctgtgatcagacacctgttcgcccctctgaaggagtacttcgcctgcgtgagcagcggcaacagcaacgccaacagccggggccccagcttctctagcggcctggtgccactgtccctgagagggagccacatgggccccatggagatctacaaaaccgtgagcgcctggaagcggcagcctgtgcgcgtgctgagcctgtttcggaatatcgataaagtcctgaaaagcctgggattcctggagagcggctctggctccggcggtggcaccctgaagtacgtggaggatgtgacaaacgtggtcagacgggatgtggagaagtggggccccttcgatctggtgtacggcagcacccaacccctgggcagctcttgtgaccggtgccctggctggtacatgtttcagttccaccggatcctgcagtacgccctgccgagacaggagtcccagcggccattcttttggattttcatggacaacttgctgctgaccgaggatgaccaggaaactaccactcggttcctgcagaccgaagccgtgaccctgcaggacgtgagaggccgggactaccagaacgccatgcgggtgtggtccaacatccctggactgaaaagcaagcacgcacctctgacccctaaagaagaggagtacctgcaggcccaggtgcggagcagaagcaagctggacgcccctaaggtggatctgctggtgaagaattgcctcctgcccctgagagagtacttcaagtatttcagccagaatagtctgcccctgggcggcccaagcagcggcgcccctcctcccagcggcggcagcccagccggctccccaacctctaccgaggagggcacctctgagtccgccacccccgagagcggccctggcacctccaccgagcccagcgagggcagcgcacccggcagccctgccggcagccccacctccacagaggagggaaccagcaccgagcccagcgaaggcagcgccccaggcaccagcaccgagcctagtgagggcggctctggcggcggcagcgcccaggagattaaacggatcaacaagatcagaagaagacttgtgaaagacagcaacaccaagaaggccggcaagacaggccccatgaaaaccctgctggttagagtgatgacacccgatctgagagagcggctggaaaacctgagaaagaagcctgaaaatatcccccagcccatcagcaatacatctagagccaacctgaataagctgctgaccgattacaccgaaatgaagaaggcgatcctgcatgtgtactgggaagagttccagaaggaccctgtgggcctgatgagccgggtggcccagcctgccagcaagaagatcgatcagaacaagctgaaacctgagatggacgagaagggcaacctgaccaccgccggctttgcctgctctcagtgtggccagcccctgttcgtgtacaagctggagcaggtgtctgagaagggcaaggcttacaccaactacttcggacggtgcaatgtggccgagcacgaaaagctgatcctgctggcccagctgaagcccgagaaggatagcgacgaagccgtgacatatagcctgggaaagtttgggcagagggccctggatttctacagcattcatgtgaccaaggagtccacccaccccgtgaagcccctggcccagatcgccggaaacagatacgcctccggacctgtgggaaaggccctgagcgacgcatgtatgggcacaatcgcctccttcctgtctaagtaccaggacatcatcatcgaacaccagaaggtggtgaagggcaaccagaagagactggagagcctgcgggagctggccggcaaggaaaacctggaataccctagcgtgaccctgccacctcagcctcacaccaaggagggcgttgatgcctacaacgaagtgatcgcccgggtgcgaatgtgggtgaacctgaacctgtggcagaagctgaagctaagcagagatgatgccaagcctctgctgagactgaagggattcccttcctttcctctggtcgagagacaggccaacgaagtggactggtgggacatggtgtgtaacgtgaagaagctgatcaacgagaaaaaggaggatggcaaggtgttttggcagaatctggctggctacaagagacaggaagccctgagaccatacctgagcagcgaggaagatcggaagaagggaaagaaattcgctcggtaccagctgggcgacctgctgctgcacctggaaaagaagcacggcgaggactggggaaaggtgtacgacgaggcctgggagcggattgacaagaaagtggaaggcctgagcaagcacatcaagctggaagaggaacggagaagcgaggacgcccagagcaaggccgccctgaccgactggctgcgggctaaggccagcttcgtgatcgagggcctgaaggaggccgacaaggacgagttctgcagatgcgagctgaagctgcagaagtggtacggggacctgcggggaaagcccttcgccatcgaagccgagaacagcatcctggacatcagcggcttcagcaagcagtacaactgtgccttcatctggcagaaggacggcgtgaagaagctgaacctgtacctgatcatcaactacttcaagggcggcaagctgcggttcaagaagatcaaacctgaagccttcgaagccaacagattctacaccgtgatcaacaaaaagagcggcgagatcgtgcccatggaggtgaacttcaacttcgacgaccccaacctgatcatcctgcctctggcctttggcaagagacagggcagagaattcatctggaacgacctgctgtccctggaaaccggcagcctgaagctggccaacggaagagtgatcgagaagacactgtacaacagaagaacccggcaggatgagcctgccctgttcgtggccctgaccttcgagcggcgggaggtcctggactcctccaatatcaaaccaatgaacctgatcggcgtggcaagaggcgaaaacatccccgccgtgatcgccctgaccgaccccgagggctgcccactgagccggtttaaggatagcctgggaaacccaacccacatcctgagaatcggcgagagctataaggagaagcagcggaccatccaggccaagaaggaggtggagcagcggagagccggcggctacagccggaagtacgccagcaaagccaagaatctggcagacgatatggtgagaaacaccgctagagatctgctgtactacgccgtgacccaggatgccatgctgatcttcgccaacctgagccggggcttcggccggcagggcaagcggaccttcatggccgagagacagtacacacggatggaggactggctgaccgccaagctggcctacgagggcctgagcaagacctacctgtccaagacactggcccagtacacctccaagacatgcagcaactgtgggtttaccatcaccagcgccgactacgacagggtgctggagaagctgaagaagacagcaacaggctggatgaccacaattaacggcaaggagctgaaggtggagggccagattacctactacaacagatacaagagacagaacgtagtcaaggacctgtccgtcgagctggatagactgagcgaagaatctgtgaacaacgacatctcctcctggacaaagggcagaagcggagaagctctgagcctcctgaagaaaagattctcccatagacccgtgcaggagaagttcgtgtgcctgaactgcggcttcgagacacacgcagccgagcaagccgccctgaacatcgccagatcctggctgttcctgcggagccaggagtacaagaaataccagacaaacaagacaaccggcaacaccgataagagagccttcgtcgagacctggcagtccttttaccggaagaagcttaaggaggtgtggaaacctgccgtgcggtctggcggatctggcggaggctccacaagcatgggccccctgaccttcaccgacgtggccatcgagttcagcctggaggagtggcagtgcctggacaccgcccagcagaacctgtacaggaacgtgatgctggagaactacaggaacctggtgttcctgggcatcgccgtgagcaagcccgacctgatcacctgcctggagaaggagaaggagccctgcaagatgaagaggcacgagatggtggacgagccccccgacggcgtgagcctgctgaccagccccaagaaaaagagaaaagtctaagctgccttctgcggggcttgccttctggccatgcccttcttctctcccttgcacctgtacctcttggtctttgaataaagcctgagtaggaaggctagcaaaaaaaaaaaaaaaaaaaaaaaaaaaaaaaaaaaaaaaaaaaaaaaaaaaaaaaaaaaaaaaaaaaaaaaaaaaaaaaa

SEQ ID NO: 6810 - RNA, 5797 nt, synthetic construct
  source 1..5797: mol_type = other RNA
aggaaataagagagaaaagaagagtaagaagaaatataagagccaccatggcccctaagaagaagcgtaaagtgagccggatggaacgcctcgtctacgaggtgcggcagaagtgcagaaacatcgaggacatctgcatctcctgcggatctctgaacgtgaccctggagcacccactgttcatcggcggcatgtgccagaactgtaaaaactgttttctggagtgtgcctatcaatacgacgatgacggctaccagagctactgcaccatctgttgcggcggaagagaggtgctgatgtgtggaaataacaactgctgccggtgcttctgcgtggaatgcgtggacctgctggtgggccccggcgccgcccaggccgctattaaggaagatccttggaactgctacatgtgcggccacaagggcacatacggcctgctgagacggagagaggactggcctagcagactgcagatgttcttcgccaataaccacgaccaggagttcgacccccctaaggtgtaccctcccgtccccgccgagaagagaaagcccatccgggtcctgagcctgttcgatggcatcgccaccggtctgctggtgctgaaggacctgggcatccaggtggataggtacattgcctccgaggtgtgcgaggactccatcaccgtgggaatggtgcgtcatcagggcaagatcatgtacgtgggcgacgtgcggagcgtgacacagaagcatatccaggagtggggccctttcgacctggtgatcggcggcagcccttgcaatgacctgagcatcgtgaacccagcccggaagggcctgtacgagggaaccggcagactgttcttcgagttttacagactgctgcacgacgcccggcctaaggaaggcgacgaccggcccttcttttggctgttcgagaatgtggtggccatgggagtcagcgacaagcgggatattagccggttcctggagagcaaccccgtgatgatcgatgccaaggaagtgagcgccgcccaccgggccagatacttctggggcaatctgcctggcatgaacagacccctggccagcaccgtgaacgacaagctggagctgcaggagtgcctggagcacggccggatcgccaagttcagcaaggtgagaaccatcaccacccgaagcaacagcatcaaacaaggcaaggaccagcactttcctgtgttcatgaacgagaaggaggacatcctgtggtgtaccgagatggagagagtgttcgggttcccagtccactacacagatgtcagcaacatgtctagactggccagacagagactgctgggaagaagctggtccgtccctgtgatcagacacctgttcgcccctctgaaggagtacttcgcctgcgtgagcagcggcaacagcaacgccaacagccggggccccagcttctctagcggcctggtgccactgtccctgagagggagccacatgggccccatggagatctacaaaaccgtgagcgcctggaagcggcagcctgtgcgcgtgctgagcctgtttcggaatatcgataaagtcctgaaaagcctgggattcctggagagcggctctggctccggcggtggcaccctgaagtacgtggaggatgtgacaaacgtggtcagacgggatgtggagaagtggggccccttcgatctggtgtacggcagcacccaacccctgggcagctcttgtgaccggtgccctggctggtacatgtttcagttccaccggatcctgcagtacgccctgccgagacaggagtcccagcggccattcttttggattttcatggacaacttgctgctgaccgaggatgaccaggaaactaccactcggttcctgcagaccgaagccgtgaccctgcaggacgtgagaggccgggactaccagaacgccatgcgggtgtggtccaacatccctggactgaaaagcaagcacgcacctctgacccctaaagaagaggagtacctgcaggcccaggtgcggagcagaagcaagctggacgcccctaaggtggatctgctggtgaagaattgcctcctgcccctgagagagtacttcaagtatttcagccagaatagtctgcccctgggcggcccaagcagcggcgcccctcctcccagcggcggcagcccagccggctccccaacctctaccgaggagggcacctctgagtccgccacccccgagagcggccctggcacctccaccgagcccagcgagggcagcgcacccggcagccctgccggcagccccacctccacagaggagggaaccagcaccgagcccagcgaaggcagcgccccaggcaccagcaccgagcctagtgagggcggctctggcggcggcagcgcccaggagattaaacggatcaacaagatcagaagaagacttgtgaaagacagcaacaccaagaaggccggcaagacaggccccatgaaaaccctgctggttagagtgatgacacccgatctgagagagcggctggaaaacctgagaaagaagcctgaaaatatcccccagcccatcagcaatacatctagagccaacctgaataagctgctgaccgattacaccgaaatgaagaaggcgatcctgcatgtgtactgggaagagttccagaaggaccctgtgggcctgatgagccgggtggcccagcctgccagcaagaagatcgatcagaacaagctgaaacctgagatggacgagaagggcaacctgaccaccgccggctttgcctgctctcagtgtggccagcccctgttcgtgtacaagctggagcaggtgtctgagaagggcaaggcttacaccaactacttcggacggtgcaatgtggccgagcacgaaaagctgatcctgctggcccagctgaagcccgagaaggatagcgacgaagccgtgacatatagcctgggaaagtttgggcagagggccctggatttctacagcattcatgtgaccaaggagtccacccaccccgtgaagcccctggcccagatcgccggaaacagatacgcctccggacctgtgggaaaggccctgagcgacgcatgtatgggcacaatcgcctccttcctgtctaagtaccaggacatcatcatcgaacaccagaaggtggtgaagggcaaccagaagagactggagagcctgcgggagctggccggcaaggaaaacctggaataccctagcgtgaccctgccacctcagcctcacaccaaggagggcgttgatgcctacaacgaagtgatcgcccgggtgcgaatgtgggtgaacctgaacctgtggcagaagctgaagctaagcagagatgatgccaagcctctgctgagactgaagggattcccttcctttcctctggtcgagagacaggccaacgaagtggactggtgggacatggtgtgtaacgtgaagaagctgatcaacgagaaaaaggaggatggcaaggtgttttggcagaatctggctggctacaagagacaggaagccctgagaccatacctgagcagcgaggaagatcggaagaagggaaagaaattcgctcggtaccagctgggcgacctgctgctgcacctggaaaagaagcacggcgaggactggggaaaggtgtacgacgaggcctgggagcggattgacaagaaagtggaaggcctgagcaagcacatcaagctggaagaggaacggagaagcgaggacgcccagagcaaggccgccctgaccgactggctgcgggctaaggccagcttcgtgatcgagggcctgaaggaggccgacaaggacgagttctgcagatgcgagctgaagctgcagaagtggtacggggacctgcggggaaagcccttcgccatcgaagccgagaacagcatcctggacatcagcggcttcagcaagcagtacaactgtgccttcatctggcagaaggacggcgtgaagaagctgaacctgtacctgatcatcaactacttcaagggcggcaagctgcggttcaagaagatcaaacctgaagccttcgaagccaacagattctacaccgtgatcaacaaaaagagcggcgagatcgtgcccatggaggtgaacttcaacttcgacgaccccaacctgatcatcctgcctctggcctttggcaagagacagggcagagaattcatctggaacgacctgctgtccctggaaaccggcagcctgaagctggccaacggaagagtgatcgagaagacactgtacaacagaagaacccggcaggatgagcctgccctgttcgtggccctgaccttcgagcggcgggaggtcctggactcctccaatatcaaaccaatgaacctgatcggcgtggcaagaggcgaaaacatccccgccgtgatcgccctgaccgaccccgagggctgcccactgagccggtttaaggatagcctgggaaacccaacccacatcctgagaatcggcgagagctataaggagaagcagcggaccatccaggccaagaaggaggtggagcagcggagagccggcggctacagccggaagtacgccagcaaagccaagaatctggcagacgatatggtgagaaacaccgctagagatctgctgtactacgccgtgacccaggatgccatgctgatcttcgccaacctgagccggggcttcggccggcagggcaagcggaccttcatggccgagagacagtacacacggatggaggactggctgaccgccaagctggcctacgagggcctgagcaagacctacctgtccaagacactggcccagtacacctccaagacatgcagcaactgtgggtttaccatcaccagcgccgactacgacagggtgctggagaagctgaagaagacagcaacaggctggatgaccacaattaacggcaaggagctgaaggtggagggccagattacctactacaacagatacaagagacagaacgtagtcaaggacctgtccgtcgagctggatagactgagcgaagaatctgtgaacaacgacatctcctcctggacaaagggcagaagcggagaagctctgagcctcctgaagaaaagattctcccatagacccgtgcaggagaagttcgtgtgcctgaactgcggcttcgagacacacgcagccgagcaagccgccctgaacatcgccagatcctggctgttcctgcggagccaggagtacaagaaataccagacaaacaagacaaccggcaacaccgataagagagccttcgtcgagacctggcagtccttttaccggaagaagcttaaggaggtgtggaaacctgccgtgcggtctggcggatctggcggaggctccacaagcttccagggcagcctgagcttcagggacgtggccgtgggcttcaccaggaaggagtggcagcagctggaccccacccagaggaccctgtacagggacgtgatgctggagaactacagccacctggtgagcgtgggctgccaggtgaccaagcccgccgtgatcagcaggctggagcagggccaggagccctggatgaaggaggaggagatcctgaggtggagcttccccgaggtgctgcaggtgaccagccccaagaaaaagagaaaagtctaagctgccttctgcggggcttgccttctggccatgcccttcttctctcccttgcacctgtacctcttggtctttgaataaagcctgagtaggaaggctagcaaaaaaaaaaaaaaaaaaaaaaaaaaaaaaaaaaaaaaaaaaaaaaaaaaaaaaaaaaaaaaaaaaaaaaaaaaaaaaaa

SEQ ID NO: 6811 - RNA, 5797 nt, synthetic construct
  source 1..5797: mol_type = other RNA
aggaaataagagagaaaagaagagtaagaagaaatataagagccaccatggcccctaagaagaagcgtaaagtgagccggatggaacgcctcgtctacgaggtgcggcagaagtgcagaaacatcgaggacatctgcatctcctgcggatctctgaacgtgaccctggagcacccactgttcatcggcggcatgtgccagaactgtaaaaactgttttctggagtgtgcctatcaatacgacgatgacggctaccagagctactgcaccatctgttgcggcggaagagaggtgctgatgtgtggaaataacaactgctgccggtgcttctgcgtggaatgcgtggacctgctggtgggccccggcgccgcccaggccgctattaaggaagatccttggaactgctacatgtgcggccacaagggcacatacggcctgctgagacggagagaggactggcctagcagactgcagatgttcttcgccaataaccacgaccaggagttcgacccccctaaggtgtaccctcccgtccccgccgagaagagaaagcccatccgggtcctgagcctgttcgatggcatcgccaccggtctgctggtgctgaaggacctgggcatccaggtggataggtacattgcctccgaggtgtgcgaggactccatcaccgtgggaatggtgcgtcatcagggcaagatcatgtacgtgggcgacgtgcggagcgtgacacagaagcatatccaggagtggggccctttcgacctggtgatcggcggcagcccttgcaatgacctgagcatcgtgaacccagcccggaagggcctgtacgagggaaccggcagactgttcttcgagttttacagactgctgcacgacgcccggcctaaggaaggcgacgaccggcccttcttttggctgttcgagaatgtggtggccatgggagtcagcgacaagcgggatattagccggttcctggagagcaaccccgtgatgatcgatgccaaggaagtgagcgccgcccaccgggccagatacttctggggcaatctgcctggcatgaacagacccctggccagcaccgtgaacgacaagctggagctgcaggagtgcctggagcacggccggatcgccaagttcagcaaggtgagaaccatcaccacccgaagcaacagcatcaaacaaggcaaggaccagcactttcctgtgttcatgaacgagaaggaggacatcctgtggtgtaccgagatggagagagtgttcgggttcccagtccactacacagatgtcagcaacatgtctagactggccagacagagactgctgggaagaagctggtccgtccctgtgatcagacacctgttcgcccctctgaaggagtacttcgcctgcgtgagcagcggcaacagcaacgccaacagccggggccccagcttctctagcggcctggtgccactgtccctgagagggagccacatgggccccatggagatctacaaaaccgtgagcgcctggaagcggcagcctgtgcgcgtgctgagcctgtttcggaatatcgataaagtcctgaaaagcctgggattcctggagagcggctctggctccggcggtggcaccctgaagtacgtggaggatgtgacaaacgtggtcagacgggatgtggagaagtggggccccttcgatctggtgtacggcagcacccaacccctgggcagctcttgtgaccggtgccctggctggtacatgtttcagttccaccggatcctgcagtacgccctgccgagacaggagtcccagcggccattcttttggattttcatggacaacttgctgctgaccgaggatgaccaggaaactaccactcggttcctgcagaccgaagccgtgaccctgcaggacgtgagaggccgggactaccagaacgccatgcgggtgtggtccaacatccctggactgaaaagcaagcacgcacctctgacccctaaagaagaggagtacctgcaggcccaggtgcggagcagaagcaagctggacgcccctaaggtggatctgctggtgaagaattgcctcctgcccctgagagagtacttcaagtatttcagccagaatagtctgcccctgggcggcccaagcagcggcgcccctcctcccagcggcggcagcccagccggctccccaacctctaccgaggagggcacctctgagtccgccacccccgagagcggccctggcacctccaccgagcccagcgagggcagcgcacccggcagccctgccggcagccccacctccacagaggagggaaccagcaccgagcccagcgaaggcagcgccccaggcaccagcaccgagcctagtgagggcggctctggcggcggcagcgcccaggagattaaacggatcaacaagatcagaagaagacttgtgaaagacagcaacaccaagaaggccggcaagacaggccccatgaaaaccctgctggttagagtgatgacacccgatctgagagagcggctggaaaacctgagaaagaagcctgaaaatatcccccagcccatcagcaatacatctagagccaacctgaataagctgctgaccgattacaccgaaatgaagaaggcgatcctgcatgtgtactgggaagagttccagaaggaccctgtgggcctgatgagccgggtggcccagcctgccagcaagaagatcgatcagaacaagctgaaacctgagatggacgagaagggcaacctgaccaccgccggctttgcctgctctcagtgtggccagcccctgttcgtgtacaagctggagcaggtgtctgagaagggcaaggcttacaccaactacttcggacggtgcaatgtggccgagcacgaaaagctgatcctgctggcccagctgaagcccgagaaggatagcgacgaagccgtgacatatagcctgggaaagtttgggcagagggccctggatttctacagcattcatgtgaccaaggagtccacccaccccgtgaagcccctggcccagatcgccggaaacagatacgcctccggacctgtgggaaaggccctgagcgacgcatgtatgggcacaatcgcctccttcctgtctaagtaccaggacatcatcatcgaacaccagaaggtggtgaagggcaaccagaagagactggagagcctgcgggagctggccggcaaggaaaacctggaataccctagcgtgaccctgccacctcagcctcacaccaaggagggcgttgatgcctacaacgaagtgatcgcccgggtgcgaatgtgggtgaacctgaacctgtggcagaagctgaagctaagcagagatgatgccaagcctctgctgagactgaagggattcccttcctttcctctggtcgagagacaggccaacgaagtggactggtgggacatggtgtgtaacgtgaagaagctgatcaacgagaaaaaggaggatggcaaggtgttttggcagaatctggctggctacaagagacaggaagccctgagaccatacctgagcagcgaggaagatcggaagaagggaaagaaattcgctcggtaccagctgggcgacctgctgctgcacctggaaaagaagcacggcgaggactggggaaaggtgtacgacgaggcctgggagcggattgacaagaaagtggaaggcctgagcaagcacatcaagctggaagaggaacggagaagcgaggacgcccagagcaaggccgccctgaccgactggctgcgggctaaggccagcttcgtgatcgagggcctgaaggaggccgacaaggacgagttctgcagatgcgagctgaagctgcagaagtggtacggggacctgcggggaaagcccttcgccatcgaagccgagaacagcatcctggacatcagcggcttcagcaagcagtacaactgtgccttcatctggcagaaggacggcgtgaagaagctgaacctgtacctgatcatcaactacttcaagggcggcaagctgcggttcaagaagatcaaacctgaagccttcgaagccaacagattctacaccgtgatcaacaaaaagagcggcgagatcgtgcccatggaggtgaacttcaacttcgacgaccccaacctgatcatcctgcctctggcctttggcaagagacagggcagagaattcatctggaacgacctgctgtccctggaaaccggcagcctgaagctggccaacggaagagtgatcgagaagacactgtacaacagaagaacccggcaggatgagcctgccctgttcgtggccctgaccttcgagcggcgggaggtcctggactcctccaatatcaaaccaatgaacctgatcggcgtggcaagaggcgaaaacatccccgccgtgatcgccctgaccgaccccgagggctgcccactgagccggtttaaggatagcctgggaaacccaacccacatcctgagaatcggcgagagctataaggagaagcagcggaccatccaggccaagaaggaggtggagcagcggagagccggcggctacagccggaagtacgccagcaaagccaagaatctggcagacgatatggtgagaaacaccgctagagatctgctgtactacgccgtgacccaggatgccatgctgatcttcgccaacctgagccggggcttcggccggcagggcaagcggaccttcatggccgagagacagtacacacggatggaggactggctgaccgccaagctggcctacgagggcctgagcaagacctacctgtccaagacactggcccagtacacctccaagacatgcagcaactgtgggtttaccatcaccagcgccgactacgacagggtgctggagaagctgaagaagacagcaacaggctggatgaccacaattaacggcaaggagctgaaggtggagggccagattacctactacaacagatacaagagacagaacgtagtcaaggacctgtccgtcgagctggatagactgagcgaagaatctgtgaacaacgacatctcctcctggacaaagggcagaagcggagaagctctgagcctcctgaagaaaagattctcccatagacccgtgcaggagaagttcgtgtgcctgaactgcggcttcgagacacacgcagccgagcaagccgccctgaacatcgccagatcctggctgttcctgcggagccaggagtacaagaaataccagacaaacaagacaaccggcaacaccgataagagagccttcgtcgagacctggcagtccttttaccggaagaagcttaaggaggtgtggaaacctgccgtgcggtctggcggatctggcggaggctccacaagcgagatgagggtgatgttcgaggagatcaccgtgagcttcagccaggaggagtgggagtacctggacgagggccagaaggagctgtaccaggaggtgatgaaggagaaccacgagaccctgatcttcctggagaccaacctgcagttcgtgaaccccgacatgctgagcaagatcaggagggacagcaggatgagcaggaagaggaaggccaccaggagctacgccgccgacgacgaggccaagaccagccccaagaaaaagagaaaagtctaagctgccttctgcggggcttgccttctggccatgcccttcttctctcccttgcacctgtacctcttggtctttgaataaagcctgagtaggaaggctagcaaaaaaaaaaaaaaaaaaaaaaaaaaaaaaaaaaaaaaaaaaaaaaaaaaaaaaaaaaaaaaaaaaaaaaaaaaaaaaaa

SEQ ID NO: 6812 - RNA, 5797 nt, synthetic construct
  source 1..5797: mol_type = other RNA
aggaaataagagagaaaagaagagtaagaagaaatataagagccaccatggcccctaagaagaagcgtaaagtgagccggatggaacgcctcgtctacgaggtgcggcagaagtgcagaaacatcgaggacatctgcatctcctgcggatctctgaacgtgaccctggagcacccactgttcatcggcggcatgtgccagaactgtaaaaactgttttctggagtgtgcctatcaatacgacgatgacggctaccagagctactgcaccatctgttgcggcggaagagaggtgctgatgtgtggaaataacaactgctgccggtgcttctgcgtggaatgcgtggacctgctggtgggccccggcgccgcccaggccgctattaaggaagatccttggaactgctacatgtgcggccacaagggcacatacggcctgctgagacggagagaggactggcctagcagactgcagatgttcttcgccaataaccacgaccaggagttcgacccccctaaggtgtaccctcccgtccccgccgagaagagaaagcccatccgggtcctgagcctgttcgatggcatcgccaccggtctgctggtgctgaaggacctgggcatccaggtggataggtacattgcctccgaggtgtgcgaggactccatcaccgtgggaatggtgcgtcatcagggcaagatcatgtacgtgggcgacgtgcggagcgtgacacagaagcatatccaggagtggggccctttcgacctggtgatcggcggcagcccttgcaatgacctgagcatcgtgaacccagcccggaagggcctgtacgagggaaccggcagactgttcttcgagttttacagactgctgcacgacgcccggcctaaggaaggcgacgaccggcccttcttttggctgttcgagaatgtggtggccatgggagtcagcgacaagcgggatattagccggttcctggagagcaaccccgtgatgatcgatgccaaggaagtgagcgccgcccaccgggccagatacttctggggcaatctgcctggcatgaacagacccctggccagcaccgtgaacgacaagctggagctgcaggagtgcctggagcacggccggatcgccaagttcagcaaggtgagaaccatcaccacccgaagcaacagcatcaaacaaggcaaggaccagcactttcctgtgttcatgaacgagaaggaggacatcctgtggtgtaccgagatggagagagtgttcgggttcccagtccactacacagatgtcagcaacatgtctagactggccagacagagactgctgggaagaagctggtccgtccctgtgatcagacacctgttcgcccctctgaaggagtacttcgcctgcgtgagcagcggcaacagcaacgccaacagccggggccccagcttctctagcggcctggtgccactgtccctgagagggagccacatgggccccatggagatctacaaaaccgtgagcgcctggaagcggcagcctgtgcgcgtgctgagcctgtttcggaatatcgataaagtcctgaaaagcctgggattcctggagagcggctctggctccggcggtggcaccctgaagtacgtggaggatgtgacaaacgtggtcagacgggatgtggagaagtggggccccttcgatctggtgtacggcagcacccaacccctgggcagctcttgtgaccggtgccctggctggtacatgtttcagttccaccggatcctgcagtacgccctgccgagacaggagtcccagcggccattcttttggattttcatggacaacttgctgctgaccgaggatgaccaggaaactaccactcggttcctgcagaccgaagccgtgaccctgcaggacgtgagaggccgggactaccagaacgccatgcgggtgtggtccaacatccctggactgaaaagcaagcacgcacctctgacccctaaagaagaggagtacctgcaggcccaggtgcggagcagaagcaagctggacgcccctaaggtggatctgctggtgaagaattgcctcctgcccctgagagagtacttcaagtatttcagccagaatagtctgcccctgggcggcccaagcagcggcgcccctcctcccagcggcggcagcccagccggctccccaacctctaccgaggagggcacctctgagtccgccacccccgagagcggccctggcacctccaccgagcccagcgagggcagcgcacccggcagccctgccggcagccccacctccacagaggagggaaccagcaccgagcccagcgaaggcagcgccccaggcaccagcaccgagcctagtgagggcggctctggcggcggcagcgcccaggagattaaacggatcaacaagatcagaagaagacttgtgaaagacagcaacaccaagaaggccggcaagacaggccccatgaaaaccctgctggttagagtgatgacacccgatctgagagagcggctggaaaacctgagaaagaagcctgaaaatatcccccagcccatcagcaatacatctagagccaacctgaataagctgctgaccgattacaccgaaatgaagaaggcgatcctgcatgtgtactgggaagagttccagaaggaccctgtgggcctgatgagccgggtggcccagcctgccagcaagaagatcgatcagaacaagctgaaacctgagatggacgagaagggcaacctgaccaccgccggctttgcctgctctcagtgtggccagcccctgttcgtgtacaagctggagcaggtgtctgagaagggcaaggcttacaccaactacttcggacggtgcaatgtggccgagcacgaaaagctgatcctgctggcccagctgaagcccgagaaggatagcgacgaagccgtgacatatagcctgggaaagtttgggcagagggccctggatttctacagcattcatgtgaccaaggagtccacccaccccgtgaagcccctggcccagatcgccggaaacagatacgcctccggacctgtgggaaaggccctgagcgacgcatgtatgggcacaatcgcctccttcctgtctaagtaccaggacatcatcatcgaacaccagaaggtggtgaagggcaaccagaagagactggagagcctgcgggagctggccggcaaggaaaacctggaataccctagcgtgaccctgccacctcagcctcacaccaaggagggcgttgatgcctacaacgaagtgatcgcccgggtgcgaatgtgggtgaacctgaacctgtggcagaagctgaagctaagcagagatgatgccaagcctctgctgagactgaagggattcccttcctttcctctggtcgagagacaggccaacgaagtggactggtgggacatggtgtgtaacgtgaagaagctgatcaacgagaaaaaggaggatggcaaggtgttttggcagaatctggctggctacaagagacaggaagccctgagaccatacctgagcagcgaggaagatcggaagaagggaaagaaattcgctcggtaccagctgggcgacctgctgctgcacctggaaaagaagcacggcgaggactggggaaaggtgtacgacgaggcctgggagcggattgacaagaaagtggaaggcctgagcaagcacatcaagctggaagaggaacggagaagcgaggacgcccagagcaaggccgccctgaccgactggctgcgggctaaggccagcttcgtgatcgagggcctgaaggaggccgacaaggacgagttctgcagatgcgagctgaagctgcagaagtggtacggggacctgcggggaaagcccttcgccatcgaagccgagaacagcatcctggacatcagcggcttcagcaagcagtacaactgtgccttcatctggcagaaggacggcgtgaagaagctgaacctgtacctgatcatcaactacttcaagggcggcaagctgcggttcaagaagatcaaacctgaagccttcgaagccaacagattctacaccgtgatcaacaaaaagagcggcgagatcgtgcccatggaggtgaacttcaacttcgacgaccccaacctgatcatcctgcctctggcctttggcaagagacagggcagagaattcatctggaacgacctgctgtccctggaaaccggcagcctgaagctggccaacggaagagtgatcgagaagacactgtacaacagaagaacccggcaggatgagcctgccctgttcgtggccctgaccttcgagcggcgggaggtcctggactcctccaatatcaaaccaatgaacctgatcggcgtggcaagaggcgaaaacatccccgccgtgatcgccctgaccgaccccgagggctgcccactgagccggtttaaggatagcctgggaaacccaacccacatcctgagaatcggcgagagctataaggagaagcagcggaccatccaggccaagaaggaggtggagcagcggagagccggcggctacagccggaagtacgccagcaaagccaagaatctggcagacgatatggtgagaaacaccgctagagatctgctgtactacgccgtgacccaggatgccatgctgatcttcgccaacctgagccggggcttcggccggcagggcaagcggaccttcatggccgagagacagtacacacggatggaggactggctgaccgccaagctggcctacgagggcctgagcaagacctacctgtccaagacactggcccagtacacctccaagacatgcagcaactgtgggtttaccatcaccagcgccgactacgacagggtgctggagaagctgaagaagacagcaacaggctggatgaccacaattaacggcaaggagctgaaggtggagggccagattacctactacaacagatacaagagacagaacgtagtcaaggacctgtccgtcgagctggatagactgagcgaagaatctgtgaacaacgacatctcctcctggacaaagggcagaagcggagaagctctgagcctcctgaagaaaagattctcccatagacccgtgcaggagaagttcgtgtgcctgaactgcggcttcgagacacacgcagccgagcaagccgccctgaacatcgccagatcctggctgttcctgcggagccaggagtacaagaaataccagacaaacaagacaaccggcaacaccgataagagagccttcgtcgagacctggcagtccttttaccggaagaagcttaaggaggtgtggaaacctgccgtgcggtctggcggatctggcggaggctccacaagcccccaggaggccgtgaccttcaaggacgtggtggtggacttcacccaggaggagtggaagtgcctggacagcagccagaaggagttctacagggacgtgatgctggagaactacagcaacctggtgagcctgggcctggccttccccaagccctacgtgatcgaccagctggagaggagggaggccccctggatccccgagggcgacatccccaggatcagccaccccgagaggaagaagaagaccagccccaagaaaaagagaaaagtctaagctgccttctgcggggcttgccttctggccatgcccttcttctctcccttgcacctgtacctcttggtctttgaataaagcctgagtaggaaggctagcaaaaaaaaaaaaaaaaaaaaaaaaaaaaaaaaaaaaaaaaaaaaaaaaaaaaaaaaaaaaaaaaaaaaaaaaaaaaaaaa

SEQ ID NO: 6813 - RNA, 5797 nt, synthetic construct
  source 1..5797: mol_type = other RNA
aggaaataagagagaaaagaagagtaagaagaaatataagagccaccatggcccctaagaagaagcgtaaagtgagccggatggaacgcctcgtctacgaggtgcggcagaagtgcagaaacatcgaggacatctgcatctcctgcggatctctgaacgtgaccctggagcacccactgttcatcggcggcatgtgccagaactgtaaaaactgttttctggagtgtgcctatcaatacgacgatgacggctaccagagctactgcaccatctgttgcggcggaagagaggtgctgatgtgtggaaataacaactgctgccggtgcttctgcgtggaatgcgtggacctgctggtgggccccggcgccgcccaggccgctattaaggaagatccttggaactgctacatgtgcggccacaagggcacatacggcctgctgagacggagagaggactggcctagcagactgcagatgttcttcgccaataaccacgaccaggagttcgacccccctaaggtgtaccctcccgtccccgccgagaagagaaagcccatccgggtcctgagcctgttcgatggcatcgccaccggtctgctggtgctgaaggacctgggcatccaggtggataggtacattgcctccgaggtgtgcgaggactccatcaccgtgggaatggtgcgtcatcagggcaagatcatgtacgtgggcgacgtgcggagcgtgacacagaagcatatccaggagtggggccctttcgacctggtgatcggcggcagcccttgcaatgacctgagcatcgtgaacccagcccggaagggcctgtacgagggaaccggcagactgttcttcgagttttacagactgctgcacgacgcccggcctaaggaaggcgacgaccggcccttcttttggctgttcgagaatgtggtggccatgggagtcagcgacaagcgggatattagccggttcctggagagcaaccccgtgatgatcgatgccaaggaagtgagcgccgcccaccgggccagatacttctggggcaatctgcctggcatgaacagacccctggccagcaccgtgaacgacaagctggagctgcaggagtgcctggagcacggccggatcgccaagttcagcaaggtgagaaccatcaccacccgaagcaacagcatcaaacaaggcaaggaccagcactttcctgtgttcatgaacgagaaggaggacatcctgtggtgtaccgagatggagagagtgttcgggttcccagtccactacacagatgtcagcaacatgtctagactggccagacagagactgctgggaagaagctggtccgtccctgtgatcagacacctgttcgcccctctgaaggagtacttcgcctgcgtgagcagcggcaacagcaacgccaacagccggggccccagcttctctagcggcctggtgccactgtccctgagagggagccacatgggccccatggagatctacaaaaccgtgagcgcctggaagcggcagcctgtgcgcgtgctgagcctgtttcggaatatcgataaagtcctgaaaagcctgggattcctggagagcggctctggctccggcggtggcaccctgaagtacgtggaggatgtgacaaacgtggtcagacgggatgtggagaagtggggccccttcgatctggtgtacggcagcacccaacccctgggcagctcttgtgaccggtgccctggctggtacatgtttcagttccaccggatcctgcagtacgccctgccgagacaggagtcccagcggccattcttttggattttcatggacaacttgctgctgaccgaggatgaccaggaaactaccactcggttcctgcagaccgaagccgtgaccctgcaggacgtgagaggccgggactaccagaacgccatgcgggtgtggtccaacatccctggactgaaaagcaagcacgcacctctgacccctaaagaagaggagtacctgcaggcccaggtgcggagcagaagcaagctggacgcccctaaggtggatctgctggtgaagaattgcctcctgcccctgagagagtacttcaagtatttcagccagaatagtctgcccctgggcggcccaagcagcggcgcccctcctcccagcggcggcagcccagccggctccccaacctctaccgaggagggcacctctgagtccgccacccccgagagcggccctggcacctccaccgagcccagcgagggcagcgcacccggcagccctgccggcagccccacctccacagaggagggaaccagcaccgagcccagcgaaggcagcgccccaggcaccagcaccgagcctagtgagggcggctctggcggcggcagcgcccaggagattaaacggatcaacaagatcagaagaagacttgtgaaagacagcaacaccaagaaggccggcaagacaggccccatgaaaaccctgctggttagagtgatgacacccgatctgagagagcggctggaaaacctgagaaagaagcctgaaaatatcccccagcccatcagcaatacatctagagccaacctgaataagctgctgaccgattacaccgaaatgaagaaggcgatcctgcatgtgtactgggaagagttccagaaggaccctgtgggcctgatgagccgggtggcccagcctgccagcaagaagatcgatcagaacaagctgaaacctgagatggacgagaagggcaacctgaccaccgccggctttgcctgctctcagtgtggccagcccctgttcgtgtacaagctggagcaggtgtctgagaagggcaaggcttacaccaactacttcggacggtgcaatgtggccgagcacgaaaagctgatcctgctggcccagctgaagcccgagaaggatagcgacgaagccgtgacatatagcctgggaaagtttgggcagagggccctggatttctacagcattcatgtgaccaaggagtccacccaccccgtgaagcccctggcccagatcgccggaaacagatacgcctccggacctgtgggaaaggccctgagcgacgcatgtatgggcacaatcgcctccttcctgtctaagtaccaggacatcatcatcgaacaccagaaggtggtgaagggcaaccagaagagactggagagcctgcgggagctggccggcaaggaaaacctggaataccctagcgtgaccctgccacctcagcctcacaccaaggagggcgttgatgcctacaacgaagtgatcgcccgggtgcgaatgtgggtgaacctgaacctgtggcagaagctgaagctaagcagagatgatgccaagcctctgctgagactgaagggattcccttcctttcctctggtcgagagacaggccaacgaagtggactggtgggacatggtgtgtaacgtgaagaagctgatcaacgagaaaaaggaggatggcaaggtgttttggcagaatctggctggctacaagagacaggaagccctgagaccatacctgagcagcgaggaagatcggaagaagggaaagaaattcgctcggtaccagctgggcgacctgctgctgcacctggaaaagaagcacggcgaggactggggaaaggtgtacgacgaggcctgggagcggattgacaagaaagtggaaggcctgagcaagcacatcaagctggaagaggaacggagaagcgaggacgcccagagcaaggccgccctgaccgactggctgcgggctaaggccagcttcgtgatcgagggcctgaaggaggccgacaaggacgagttctgcagatgcgagctgaagctgcagaagtggtacggggacctgcggggaaagcccttcgccatcgaagccgagaacagcatcctggacatcagcggcttcagcaagcagtacaactgtgccttcatctggcagaaggacggcgtgaagaagctgaacctgtacctgatcatcaactacttcaagggcggcaagctgcggttcaagaagatcaaacctgaagccttcgaagccaacagattctacaccgtgatcaacaaaaagagcggcgagatcgtgcccatggaggtgaacttcaacttcgacgaccccaacctgatcatcctgcctctggcctttggcaagagacagggcagagaattcatctggaacgacctgctgtccctggaaaccggcagcctgaagctggccaacggaagagtgatcgagaagacactgtacaacagaagaacccggcaggatgagcctgccctgttcgtggccctgaccttcgagcggcgggaggtcctggactcctccaatatcaaaccaatgaacctgatcggcgtggcaagaggcgaaaacatccccgccgtgatcgccctgaccgaccccgagggctgcccactgagccggtttaaggatagcctgggaaacccaacccacatcctgagaatcggcgagagctataaggagaagcagcggaccatccaggccaagaaggaggtggagcagcggagagccggcggctacagccggaagtacgccagcaaagccaagaatctggcagacgatatggtgagaaacaccgctagagatctgctgtactacgccgtgacccaggatgccatgctgatcttcgccaacctgagccggggcttcggccggcagggcaagcggaccttcatggccgagagacagtacacacggatggaggactggctgaccgccaagctggcctacgagggcctgagcaagacctacctgtccaagacactggcccagtacacctccaagacatgcagcaactgtgggtttaccatcaccagcgccgactacgacagggtgctggagaagctgaagaagacagcaacaggctggatgaccacaattaacggcaaggagctgaaggtggagggccagattacctactacaacagatacaagagacagaacgtagtcaaggacctgtccgtcgagctggatagactgagcgaagaatctgtgaacaacgacatctcctcctggacaaagggcagaagcggagaagctctgagcctcctgaagaaaagattctcccatagacccgtgcaggagaagttcgtgtgcctgaactgcggcttcgagacacacgcagccgagcaagccgccctgaacatcgccagatcctggctgttcctgcggagccaggagtacaagaaataccagacaaacaagacaaccggcaacaccgataagagagccttcgtcgagacctggcagtccttttaccggaagaagcttaaggaggtgtggaaacctgccgtgcggtctggcggatctggcggaggctccacaagcccccagggccccgtgaccttccaggacgtggccgtggtgttcacccaggaggagtggaggtacctggaccccagccagaaggagctgtacagggacgtgatgctggagaactacaggaacctgctgtacctgggcctggtggtgagcaagcccaacgtgatctacaggttcgagcagggcgaggccagctggaggcccgaccagagggacagcggcagcacctgcagcgacgaggagaccggcaccagccccaagaaaaagagaaaagtctaagctgccttctgcggggcttgccttctggccatgcccttcttctctcccttgcacctgtacctcttggtctttgaataaagcctgagtaggaaggctagcaaaaaaaaaaaaaaaaaaaaaaaaaaaaaaaaaaaaaaaaaaaaaaaaaaaaaaaaaaaaaaaaaaaaaaaaaaaaaaaa

SEQ ID NO: 6814 - RNA, 5797 nt, synthetic construct
  source 1..5797: mol_type = other RNA
aggaaataagagagaaaagaagagtaagaagaaatataagagccaccatggcccctaagaagaagcgtaaagtgagccggatggaacgcctcgtctacgaggtgcggcagaagtgcagaaacatcgaggacatctgcatctcctgcggatctctgaacgtgaccctggagcacccactgttcatcggcggcatgtgccagaactgtaaaaactgttttctggagtgtgcctatcaatacgacgatgacggctaccagagctactgcaccatctgttgcggcggaagagaggtgctgatgtgtggaaataacaactgctgccggtgcttctgcgtggaatgcgtggacctgctggtgggccccggcgccgcccaggccgctattaaggaagatccttggaactgctacatgtgcggccacaagggcacatacggcctgctgagacggagagaggactggcctagcagactgcagatgttcttcgccaataaccacgaccaggagttcgacccccctaaggtgtaccctcccgtccccgccgagaagagaaagcccatccgggtcctgagcctgttcgatggcatcgccaccggtctgctggtgctgaaggacctgggcatccaggtggataggtacattgcctccgaggtgtgcgaggactccatcaccgtgggaatggtgcgtcatcagggcaagatcatgtacgtgggcgacgtgcggagcgtgacacagaagcatatccaggagtggggccctttcgacctggtgatcggcggcagcccttgcaatgacctgagcatcgtgaacccagcccggaagggcctgtacgagggaaccggcagactgttcttcgagttttacagactgctgcacgacgcccggcctaaggaaggcgacgaccggcccttcttttggctgttcgagaatgtggtggccatgggagtcagcgacaagcgggatattagccggttcctggagagcaaccccgtgatgatcgatgccaaggaagtgagcgccgcccaccgggccagatacttctggggcaatctgcctggcatgaacagacccctggccagcaccgtgaacgacaagctggagctgcaggagtgcctggagcacggccggatcgccaagttcagcaaggtgagaaccatcaccacccgaagcaacagcatcaaacaaggcaaggaccagcactttcctgtgttcatgaacgagaaggaggacatcctgtggtgtaccgagatggagagagtgttcgggttcccagtccactacacagatgtcagcaacatgtctagactggccagacagagactgctgggaagaagctggtccgtccctgtgatcagacacctgttcgcccctctgaaggagtacttcgcctgcgtgagcagcggcaacagcaacgccaacagccggggccccagcttctctagcggcctggtgccactgtccctgagagggagccacatgggccccatggagatctacaaaaccgtgagcgcctggaagcggcagcctgtgcgcgtgctgagcctgtttcggaatatcgataaagtcctgaaaagcctgggattcctggagagcggctctggctccggcggtggcaccctgaagtacgtggaggatgtgacaaacgtggtcagacgggatgtggagaagtggggccccttcgatctggtgtacggcagcacccaacccctgggcagctcttgtgaccggtgccctggctggtacatgtttcagttccaccggatcctgcagtacgccctgccgagacaggagtcccagcggccattcttttggattttcatggacaacttgctgctgaccgaggatgaccaggaaactaccactcggttcctgcagaccgaagccgtgaccctgcaggacgtgagaggccgggactaccagaacgccatgcgggtgtggtccaacatccctggactgaaaagcaagcacgcacctctgacccctaaagaagaggagtacctgcaggcccaggtgcggagcagaagcaagctggacgcccctaaggtggatctgctggtgaagaattgcctcctgcccctgagagagtacttcaagtatttcagccagaatagtctgcccctgggcggcccaagcagcggcgcccctcctcccagcggcggcagcccagccggctccccaacctctaccgaggagggcacctctgagtccgccacccccgagagcggccctggcacctccaccgagcccagcgagggcagcgcacccggcagccctgccggcagccccacctccacagaggagggaaccagcaccgagcccagcgaaggcagcgccccaggcaccagcaccgagcctagtgagggcggctctggcggcggcagcgcccaggagattaaacggatcaacaagatcagaagaagacttgtgaaagacagcaacaccaagaaggccggcaagacaggccccatgaaaaccctgctggttagagtgatgacacccgatctgagagagcggctggaaaacctgagaaagaagcctgaaaatatcccccagcccatcagcaatacatctagagccaacctgaataagctgctgaccgattacaccgaaatgaagaaggcgatcctgcatgtgtactgggaagagttccagaaggaccctgtgggcctgatgagccgggtggcccagcctgccagcaagaagatcgatcagaacaagctgaaacctgagatggacgagaagggcaacctgaccaccgccggctttgcctgctctcagtgtggccagcccctgttcgtgtacaagctggagcaggtgtctgagaagggcaaggcttacaccaactacttcggacggtgcaatgtggccgagcacgaaaagctgatcctgctggcccagctgaagcccgagaaggatagcgacgaagccgtgacatatagcctgggaaagtttgggcagagggccctggatttctacagcattcatgtgaccaaggagtccacccaccccgtgaagcccctggcccagatcgccggaaacagatacgcctccggacctgtgggaaaggccctgagcgacgcatgtatgggcacaatcgcctccttcctgtctaagtaccaggacatcatcatcgaacaccagaaggtggtgaagggcaaccagaagagactggagagcctgcgggagctggccggcaaggaaaacctggaataccctagcgtgaccctgccacctcagcctcacaccaaggagggcgttgatgcctacaacgaagtgatcgcccgggtgcgaatgtgggtgaacctgaacctgtggcagaagctgaagctaagcagagatgatgccaagcctctgctgagactgaagggattcccttcctttcctctggtcgagagacaggccaacgaagtggactggtgggacatggtgtgtaacgtgaagaagctgatcaacgagaaaaaggaggatggcaaggtgttttggcagaatctggctggctacaagagacaggaagccctgagaccatacctgagcagcgaggaagatcggaagaagggaaagaaattcgctcggtaccagctgggcgacctgctgctgcacctggaaaagaagcacggcgaggactggggaaaggtgtacgacgaggcctgggagcggattgacaagaaagtggaaggcctgagcaagcacatcaagctggaagaggaacggagaagcgaggacgcccagagcaaggccgccctgaccgactggctgcgggctaaggccagcttcgtgatcgagggcctgaaggaggccgacaaggacgagttctgcagatgcgagctgaagctgcagaagtggtacggggacctgcggggaaagcccttcgccatcgaagccgagaacagcatcctggacatcagcggcttcagcaagcagtacaactgtgccttcatctggcagaaggacggcgtgaagaagctgaacctgtacctgatcatcaactacttcaagggcggcaagctgcggttcaagaagatcaaacctgaagccttcgaagccaacagattctacaccgtgatcaacaaaaagagcggcgagatcgtgcccatggaggtgaacttcaacttcgacgaccccaacctgatcatcctgcctctggcctttggcaagagacagggcagagaattcatctggaacgacctgctgtccctggaaaccggcagcctgaagctggccaacggaagagtgatcgagaagacactgtacaacagaagaacccggcaggatgagcctgccctgttcgtggccctgaccttcgagcggcgggaggtcctggactcctccaatatcaaaccaatgaacctgatcggcgtggcaagaggcgaaaacatccccgccgtgatcgccctgaccgaccccgagggctgcccactgagccggtttaaggatagcctgggaaacccaacccacatcctgagaatcggcgagagctataaggagaagcagcggaccatccaggccaagaaggaggtggagcagcggagagccggcggctacagccggaagtacgccagcaaagccaagaatctggcagacgatatggtgagaaacaccgctagagatctgctgtactacgccgtgacccaggatgccatgctgatcttcgccaacctgagccggggcttcggccggcagggcaagcggaccttcatggccgagagacagtacacacggatggaggactggctgaccgccaagctggcctacgagggcctgagcaagacctacctgtccaagacactggcccagtacacctccaagacatgcagcaactgtgggtttaccatcaccagcgccgactacgacagggtgctggagaagctgaagaagacagcaacaggctggatgaccacaattaacggcaaggagctgaaggtggagggccagattacctactacaacagatacaagagacagaacgtagtcaaggacctgtccgtcgagctggatagactgagcgaagaatctgtgaacaacgacatctcctcctggacaaagggcagaagcggagaagctctgagcctcctgaagaaaagattctcccatagacccgtgcaggagaagttcgtgtgcctgaactgcggcttcgagacacacgcagccgagcaagccgccctgaacatcgccagatcctggctgttcctgcggagccaggagtacaagaaataccagacaaacaagacaaccggcaacaccgataagagagccttcgtcgagacctggcagtccttttaccggaagaagcttaaggaggtgtggaaacctgccgtgcggtctggcggatctggcggaggctccacaagcctgcaggtgagcgtgagcttcgaggacgtgaccgtggacttcagcagggaggagtggcagcacctggacagcgcccagaggaggctgtaccaggacgtgatgctggagaactacagccacctgctgagcctgggctacgaggtgcccaagcccgaggtgatcttcaagctggagcagggcgaggagccctgggccctgaaggagaagaccctgcaccacagctgcagcgacgacaccaccctgaccagccccaagaaaaagagaaaagtctaagctgccttctgcggggcttgccttctggccatgcccttcttctctcccttgcacctgtacctcttggtctttgaataaagcctgagtaggaaggctagcaaaaaaaaaaaaaaaaaaaaaaaaaaaaaaaaaaaaaaaaaaaaaaaaaaaaaaaaaaaaaaaaaaaaaaaaaaaaaaaa

SEQ ID NO: 6815 - RNA, 5797 nt, synthetic construct
  source 1..5797: mol_type = other RNA
aggaaataagagagaaaagaagagtaagaagaaatataagagccaccatggcccctaagaagaagcgtaaagtgagccggatggaacgcctcgtctacgaggtgcggcagaagtgcagaaacatcgaggacatctgcatctcctgcggatctctgaacgtgaccctggagcacccactgttcatcggcggcatgtgccagaactgtaaaaactgttttctggagtgtgcctatcaatacgacgatgacggctaccagagctactgcaccatctgttgcggcggaagagaggtgctgatgtgtggaaataacaactgctgccggtgcttctgcgtggaatgcgtggacctgctggtgggccccggcgccgcccaggccgctattaaggaagatccttggaactgctacatgtgcggccacaagggcacatacggcctgctgagacggagagaggactggcctagcagactgcagatgttcttcgccaataaccacgaccaggagttcgacccccctaaggtgtaccctcccgtccccgccgagaagagaaagcccatccgggtcctgagcctgttcgatggcatcgccaccggtctgctggtgctgaaggacctgggcatccaggtggataggtacattgcctccgaggtgtgcgaggactccatcaccgtgggaatggtgcgtcatcagggcaagatcatgtacgtgggcgacgtgcggagcgtgacacagaagcatatccaggagtggggccctttcgacctggtgatcggcggcagcccttgcaatgacctgagcatcgtgaacccagcccggaagggcctgtacgagggaaccggcagactgttcttcgagttttacagactgctgcacgacgcccggcctaaggaaggcgacgaccggcccttcttttggctgttcgagaatgtggtggccatgggagtcagcgacaagcgggatattagccggttcctggagagcaaccccgtgatgatcgatgccaaggaagtgagcgccgcccaccgggccagatacttctggggcaatctgcctggcatgaacagacccctggccagcaccgtgaacgacaagctggagctgcaggagtgcctggagcacggccggatcgccaagttcagcaaggtgagaaccatcaccacccgaagcaacagcatcaaacaaggcaaggaccagcactttcctgtgttcatgaacgagaaggaggacatcctgtggtgtaccgagatggagagagtgttcgggttcccagtccactacacagatgtcagcaacatgtctagactggccagacagagactgctgggaagaagctggtccgtccctgtgatcagacacctgttcgcccctctgaaggagtacttcgcctgcgtgagcagcggcaacagcaacgccaacagccggggccccagcttctctagcggcctggtgccactgtccctgagagggagccacatgggccccatggagatctacaaaaccgtgagcgcctggaagcggcagcctgtgcgcgtgctgagcctgtttcggaatatcgataaagtcctgaaaagcctgggattcctggagagcggctctggctccggcggtggcaccctgaagtacgtggaggatgtgacaaacgtggtcagacgggatgtggagaagtggggccccttcgatctggtgtacggcagcacccaacccctgggcagctcttgtgaccggtgccctggctggtacatgtttcagttccaccggatcctgcagtacgccctgccgagacaggagtcccagcggccattcttttggattttcatggacaacttgctgctgaccgaggatgaccaggaaactaccactcggttcctgcagaccgaagccgtgaccctgcaggacgtgagaggccgggactaccagaacgccatgcgggtgtggtccaacatccctggactgaaaagcaagcacgcacctctgacccctaaagaagaggagtacctgcaggcccaggtgcggagcagaagcaagctggacgcccctaaggtggatctgctggtgaagaattgcctcctgcccctgagagagtacttcaagtatttcagccagaatagtctgcccctgggcggcccaagcagcggcgcccctcctcccagcggcggcagcccagccggctccccaacctctaccgaggagggcacctctgagtccgccacccccgagagcggccctggcacctccaccgagcccagcgagggcagcgcacccggcagccctgccggcagccccacctccacagaggagggaaccagcaccgagcccagcgaaggcagcgccccaggcaccagcaccgagcctagtgagggcggctctggcggcggcagcgcccaggagattaaacggatcaacaagatcagaagaagacttgtgaaagacagcaacaccaagaaggccggcaagacaggccccatgaaaaccctgctggttagagtgatgacacccgatctgagagagcggctggaaaacctgagaaagaagcctgaaaatatcccccagcccatcagcaatacatctagagccaacctgaataagctgctgaccgattacaccgaaatgaagaaggcgatcctgcatgtgtactgggaagagttccagaaggaccctgtgggcctgatgagccgggtggcccagcctgccagcaagaagatcgatcagaacaagctgaaacctgagatggacgagaagggcaacctgaccaccgccggctttgcctgctctcagtgtggccagcccctgttcgtgtacaagctggagcaggtgtctgagaagggcaaggcttacaccaactacttcggacggtgcaatgtggccgagcacgaaaagctgatcctgctggcccagctgaagcccgagaaggatagcgacgaagccgtgacatatagcctgggaaagtttgggcagagggccctggatttctacagcattcatgtgaccaaggagtccacccaccccgtgaagcccctggcccagatcgccggaaacagatacgcctccggacctgtgggaaaggccctgagcgacgcatgtatgggcacaatcgcctccttcctgtctaagtaccaggacatcatcatcgaacaccagaaggtggtgaagggcaaccagaagagactggagagcctgcgggagctggccggcaaggaaaacctggaataccctagcgtgaccctgccacctcagcctcacaccaaggagggcgttgatgcctacaacgaagtgatcgcccgggtgcgaatgtgggtgaacctgaacctgtggcagaagctgaagctaagcagagatgatgccaagcctctgctgagactgaagggattcccttcctttcctctggtcgagagacaggccaacgaagtggactggtgggacatggtgtgtaacgtgaagaagctgatcaacgagaaaaaggaggatggcaaggtgttttggcagaatctggctggctacaagagacaggaagccctgagaccatacctgagcagcgaggaagatcggaagaagggaaagaaattcgctcggtaccagctgggcgacctgctgctgcacctggaaaagaagcacggcgaggactggggaaaggtgtacgacgaggcctgggagcggattgacaagaaagtggaaggcctgagcaagcacatcaagctggaagaggaacggagaagcgaggacgcccagagcaaggccgccctgaccgactggctgcgggctaaggccagcttcgtgatcgagggcctgaaggaggccgacaaggacgagttctgcagatgcgagctgaagctgcagaagtggtacggggacctgcggggaaagcccttcgccatcgaagccgagaacagcatcctggacatcagcggcttcagcaagcagtacaactgtgccttcatctggcagaaggacggcgtgaagaagctgaacctgtacctgatcatcaactacttcaagggcggcaagctgcggttcaagaagatcaaacctgaagccttcgaagccaacagattctacaccgtgatcaacaaaaagagcggcgagatcgtgcccatggaggtgaacttcaacttcgacgaccccaacctgatcatcctgcctctggcctttggcaagagacagggcagagaattcatctggaacgacctgctgtccctggaaaccggcagcctgaagctggccaacggaagagtgatcgagaagacactgtacaacagaagaacccggcaggatgagcctgccctgttcgtggccctgaccttcgagcggcgggaggtcctggactcctccaatatcaaaccaatgaacctgatcggcgtggcaagaggcgaaaacatccccgccgtgatcgccctgaccgaccccgagggctgcccactgagccggtttaaggatagcctgggaaacccaacccacatcctgagaatcggcgagagctataaggagaagcagcggaccatccaggccaagaaggaggtggagcagcggagagccggcggctacagccggaagtacgccagcaaagccaagaatctggcagacgatatggtgagaaacaccgctagagatctgctgtactacgccgtgacccaggatgccatgctgatcttcgccaacctgagccggggcttcggccggcagggcaagcggaccttcatggccgagagacagtacacacggatggaggactggctgaccgccaagctggcctacgagggcctgagcaagacctacctgtccaagacactggcccagtacacctccaagacatgcagcaactgtgggtttaccatcaccagcgccgactacgacagggtgctggagaagctgaagaagacagcaacaggctggatgaccacaattaacggcaaggagctgaaggtggagggccagattacctactacaacagatacaagagacagaacgtagtcaaggacctgtccgtcgagctggatagactgagcgaagaatctgtgaacaacgacatctcctcctggacaaagggcagaagcggagaagctctgagcctcctgaagaaaagattctcccatagacccgtgcaggagaagttcgtgtgcctgaactgcggcttcgagacacacgcagccgagcaagccgccctgaacatcgccagatcctggctgttcctgcggagccaggagtacaagaaataccagacaaacaagacaaccggcaacaccgataagagagccttcgtcgagacctggcagtccttttaccggaagaagcttaaggaggtgtggaaacctgccgtgcggtctggcggatctggcggaggctccacaagcgcccagggcctggtgcccttcgaggaggtggccgtgtacttcaccaggaccgagtgggccctgctggaccccgcccagagggccctgtacagggccgtgatgcaggagaactacgagaacgtgaccagcctgggcttcgccgtgagcaagcccgacgtgatcagccagctggagaggggcgaggagccctgggtgcccgagctgcagggcagcgagcacagggagatcctgggcggcaccggcaccagccccaagaaaaagagaaaagtctaagctgccttctgcggggcttgccttctggccatgcccttcttctctcccttgcacctgtacctcttggtctttgaataaagcctgagtaggaaggctagcaaaaaaaaaaaaaaaaaaaaaaaaaaaaaaaaaaaaaaaaaaaaaaaaaaaaaaaaaaaaaaaaaaaaaaaaaaaaaaaa

SEQ ID NO: 6816 - RNA, 5797 nt, synthetic construct
  source 1..5797: mol_type = other RNA
aggaaataagagagaaaagaagagtaagaagaaatataagagccaccatggcccctaagaagaagcgtaaagtgagccggatggaacgcctcgtctacgaggtgcggcagaagtgcagaaacatcgaggacatctgcatctcctgcggatctctgaacgtgaccctggagcacccactgttcatcggcggcatgtgccagaactgtaaaaactgttttctggagtgtgcctatcaatacgacgatgacggctaccagagctactgcaccatctgttgcggcggaagagaggtgctgatgtgtggaaataacaactgctgccggtgcttctgcgtggaatgcgtggacctgctggtgggccccggcgccgcccaggccgctattaaggaagatccttggaactgctacatgtgcggccacaagggcacatacggcctgctgagacggagagaggactggcctagcagactgcagatgttcttcgccaataaccacgaccaggagttcgacccccctaaggtgtaccctcccgtccccgccgagaagagaaagcccatccgggtcctgagcctgttcgatggcatcgccaccggtctgctggtgctgaaggacctgggcatccaggtggataggtacattgcctccgaggtgtgcgaggactccatcaccgtgggaatggtgcgtcatcagggcaagatcatgtacgtgggcgacgtgcggagcgtgacacagaagcatatccaggagtggggccctttcgacctggtgatcggcggcagcccttgcaatgacctgagcatcgtgaacccagcccggaagggcctgtacgagggaaccggcagactgttcttcgagttttacagactgctgcacgacgcccggcctaaggaaggcgacgaccggcccttcttttggctgttcgagaatgtggtggccatgggagtcagcgacaagcgggatattagccggttcctggagagcaaccccgtgatgatcgatgccaaggaagtgagcgccgcccaccgggccagatacttctggggcaatctgcctggcatgaacagacccctggccagcaccgtgaacgacaagctggagctgcaggagtgcctggagcacggccggatcgccaagttcagcaaggtgagaaccatcaccacccgaagcaacagcatcaaacaaggcaaggaccagcactttcctgtgttcatgaacgagaaggaggacatcctgtggtgtaccgagatggagagagtgttcgggttcccagtccactacacagatgtcagcaacatgtctagactggccagacagagactgctgggaagaagctggtccgtccctgtgatcagacacctgttcgcccctctgaaggagtacttcgcctgcgtgagcagcggcaacagcaacgccaacagccggggccccagcttctctagcggcctggtgccactgtccctgagagggagccacatgggccccatggagatctacaaaaccgtgagcgcctggaagcggcagcctgtgcgcgtgctgagcctgtttcggaatatcgataaagtcctgaaaagcctgggattcctggagagcggctctggctccggcggtggcaccctgaagtacgtggaggatgtgacaaacgtggtcagacgggatgtggagaagtggggccccttcgatctggtgtacggcagcacccaacccctgggcagctcttgtgaccggtgccctggctggtacatgtttcagttccaccggatcctgcagtacgccctgccgagacaggagtcccagcggccattcttttggattttcatggacaacttgctgctgaccgaggatgaccaggaaactaccactcggttcctgcagaccgaagccgtgaccctgcaggacgtgagaggccgggactaccagaacgccatgcgggtgtggtccaacatccctggactgaaaagcaagcacgcacctctgacccctaaagaagaggagtacctgcaggcccaggtgcggagcagaagcaagctggacgcccctaaggtggatctgctggtgaagaattgcctcctgcccctgagagagtacttcaagtatttcagccagaatagtctgcccctgggcggcccaagcagcggcgcccctcctcccagcggcggcagcccagccggctccccaacctctaccgaggagggcacctctgagtccgccacccccgagagcggccctggcacctccaccgagcccagcgagggcagcgcacccggcagccctgccggcagccccacctccacagaggagggaaccagcaccgagcccagcgaaggcagcgccccaggcaccagcaccgagcctagtgagggcggctctggcggcggcagcgcccaggagattaaacggatcaacaagatcagaagaagacttgtgaaagacagcaacaccaagaaggccggcaagacaggccccatgaaaaccctgctggttagagtgatgacacccgatctgagagagcggctggaaaacctgagaaagaagcctgaaaatatcccccagcccatcagcaatacatctagagccaacctgaataagctgctgaccgattacaccgaaatgaagaaggcgatcctgcatgtgtactgggaagagttccagaaggaccctgtgggcctgatgagccgggtggcccagcctgccagcaagaagatcgatcagaacaagctgaaacctgagatggacgagaagggcaacctgaccaccgccggctttgcctgctctcagtgtggccagcccctgttcgtgtacaagctggagcaggtgtctgagaagggcaaggcttacaccaactacttcggacggtgcaatgtggccgagcacgaaaagctgatcctgctggcccagctgaagcccgagaaggatagcgacgaagccgtgacatatagcctgggaaagtttgggcagagggccctggatttctacagcattcatgtgaccaaggagtccacccaccccgtgaagcccctggcccagatcgccggaaacagatacgcctccggacctgtgggaaaggccctgagcgacgcatgtatgggcacaatcgcctccttcctgtctaagtaccaggacatcatcatcgaacaccagaaggtggtgaagggcaaccagaagagactggagagcctgcgggagctggccggcaaggaaaacctggaataccctagcgtgaccctgccacctcagcctcacaccaaggagggcgttgatgcctacaacgaagtgatcgcccgggtgcgaatgtgggtgaacctgaacctgtggcagaagctgaagctaagcagagatgatgccaagcctctgctgagactgaagggattcccttcctttcctctggtcgagagacaggccaacgaagtggactggtgggacatggtgtgtaacgtgaagaagctgatcaacgagaaaaaggaggatggcaaggtgttttggcagaatctggctggctacaagagacaggaagccctgagaccatacctgagcagcgaggaagatcggaagaagggaaagaaattcgctcggtaccagctgggcgacctgctgctgcacctggaaaagaagcacggcgaggactggggaaaggtgtacgacgaggcctgggagcggattgacaagaaagtggaaggcctgagcaagcacatcaagctggaagaggaacggagaagcgaggacgcccagagcaaggccgccctgaccgactggctgcgggctaaggccagcttcgtgatcgagggcctgaaggaggccgacaaggacgagttctgcagatgcgagctgaagctgcagaagtggtacggggacctgcggggaaagcccttcgccatcgaagccgagaacagcatcctggacatcagcggcttcagcaagcagtacaactgtgccttcatctggcagaaggacggcgtgaagaagctgaacctgtacctgatcatcaactacttcaagggcggcaagctgcggttcaagaagatcaaacctgaagccttcgaagccaacagattctacaccgtgatcaacaaaaagagcggcgagatcgtgcccatggaggtgaacttcaacttcgacgaccccaacctgatcatcctgcctctggcctttggcaagagacagggcagagaattcatctggaacgacctgctgtccctggaaaccggcagcctgaagctggccaacggaagagtgatcgagaagacactgtacaacagaagaacccggcaggatgagcctgccctgttcgtggccctgaccttcgagcggcgggaggtcctggactcctccaatatcaaaccaatgaacctgatcggcgtggcaagaggcgaaaacatccccgccgtgatcgccctgaccgaccccgagggctgcccactgagccggtttaaggatagcctgggaaacccaacccacatcctgagaatcggcgagagctataaggagaagcagcggaccatccaggccaagaaggaggtggagcagcggagagccggcggctacagccggaagtacgccagcaaagccaagaatctggcagacgatatggtgagaaacaccgctagagatctgctgtactacgccgtgacccaggatgccatgctgatcttcgccaacctgagccggggcttcggccggcagggcaagcggaccttcatggccgagagacagtacacacggatggaggactggctgaccgccaagctggcctacgagggcctgagcaagacctacctgtccaagacactggcccagtacacctccaagacatgcagcaactgtgggtttaccatcaccagcgccgactacgacagggtgctggagaagctgaagaagacagcaacaggctggatgaccacaattaacggcaaggagctgaaggtggagggccagattacctactacaacagatacaagagacagaacgtagtcaaggacctgtccgtcgagctggatagactgagcgaagaatctgtgaacaacgacatctcctcctggacaaagggcagaagcggagaagctctgagcctcctgaagaaaagattctcccatagacccgtgcaggagaagttcgtgtgcctgaactgcggcttcgagacacacgcagccgagcaagccgccctgaacatcgccagatcctggctgttcctgcggagccaggagtacaagaaataccagacaaacaagacaaccggcaacaccgataagagagccttcgtcgagacctggcagtccttttaccggaagaagcttaaggaggtgtggaaacctgccgtgcggtctggcggatctggcggaggctccacaagcagccagggcagcgtgagcttcaaggacgtgaccgtggacttcacccaggaggagtggcagcagctggaccccgcccagaaggccctgtacagggacgtgatgctggagaactactgccacttcgtgagcgtgggcttccacatgaccaagcccgacatgatcaggaagctggagcagggcgaggagctgtggacccagaggatcttccccagctacagctacctggccgaggacggcaagaccaccagccccaagaaaaagagaaaagtctaagctgccttctgcggggcttgccttctggccatgcccttcttctctcccttgcacctgtacctcttggtctttgaataaagcctgagtaggaaggctagcaaaaaaaaaaaaaaaaaaaaaaaaaaaaaaaaaaaaaaaaaaaaaaaaaaaaaaaaaaaaaaaaaaaaaaaaaaaaaaaa

SEQ ID NO: 6817 - RNA, 5797 nt, synthetic construct
  source 1..5797: mol_type = other RNA
aggaaataagagagaaaagaagagtaagaagaaatataagagccaccatggcccctaagaagaagcgtaaagtgagccggatggaacgcctcgtctacgaggtgcggcagaagtgcagaaacatcgaggacatctgcatctcctgcggatctctgaacgtgaccctggagcacccactgttcatcggcggcatgtgccagaactgtaaaaactgttttctggagtgtgcctatcaatacgacgatgacggctaccagagctactgcaccatctgttgcggcggaagagaggtgctgatgtgtggaaataacaactgctgccggtgcttctgcgtggaatgcgtggacctgctggtgggccccggcgccgcccaggccgctattaaggaagatccttggaactgctacatgtgcggccacaagggcacatacggcctgctgagacggagagaggactggcctagcagactgcagatgttcttcgccaataaccacgaccaggagttcgacccccctaaggtgtaccctcccgtccccgccgagaagagaaagcccatccgggtcctgagcctgttcgatggcatcgccaccggtctgctggtgctgaaggacctgggcatccaggtggataggtacattgcctccgaggtgtgcgaggactccatcaccgtgggaatggtgcgtcatcagggcaagatcatgtacgtgggcgacgtgcggagcgtgacacagaagcatatccaggagtggggccctttcgacctggtgatcggcggcagcccttgcaatgacctgagcatcgtgaacccagcccggaagggcctgtacgagggaaccggcagactgttcttcgagttttacagactgctgcacgacgcccggcctaaggaaggcgacgaccggcccttcttttggctgttcgagaatgtggtggccatgggagtcagcgacaagcgggatattagccggttcctggagagcaaccccgtgatgatcgatgccaaggaagtgagcgccgcccaccgggccagatacttctggggcaatctgcctggcatgaacagacccctggccagcaccgtgaacgacaagctggagctgcaggagtgcctggagcacggccggatcgccaagttcagcaaggtgagaaccatcaccacccgaagcaacagcatcaaacaaggcaaggaccagcactttcctgtgttcatgaacgagaaggaggacatcctgtggtgtaccgagatggagagagtgttcgggttcccagtccactacacagatgtcagcaacatgtctagactggccagacagagactgctgggaagaagctggtccgtccctgtgatcagacacctgttcgcccctctgaaggagtacttcgcctgcgtgagcagcggcaacagcaacgccaacagccggggccccagcttctctagcggcctggtgccactgtccctgagagggagccacatgggccccatggagatctacaaaaccgtgagcgcctggaagcggcagcctgtgcgcgtgctgagcctgtttcggaatatcgataaagtcctgaaaagcctgggattcctggagagcggctctggctccggcggtggcaccctgaagtacgtggaggatgtgacaaacgtggtcagacgggatgtggagaagtggggccccttcgatctggtgtacggcagcacccaacccctgggcagctcttgtgaccggtgccctggctggtacatgtttcagttccaccggatcctgcagtacgccctgccgagacaggagtcccagcggccattcttttggattttcatggacaacttgctgctgaccgaggatgaccaggaaactaccactcggttcctgcagaccgaagccgtgaccctgcaggacgtgagaggccgggactaccagaacgccatgcgggtgtggtccaacatccctggactgaaaagcaagcacgcacctctgacccctaaagaagaggagtacctgcaggcccaggtgcggagcagaagcaagctggacgcccctaaggtggatctgctggtgaagaattgcctcctgcccctgagagagtacttcaagtatttcagccagaatagtctgcccctgggcggcccaagcagcggcgcccctcctcccagcggcggcagcccagccggctccccaacctctaccgaggagggcacctctgagtccgccacccccgagagcggccctggcacctccaccgagcccagcgagggcagcgcacccggcagccctgccggcagccccacctccacagaggagggaaccagcaccgagcccagcgaaggcagcgccccaggcaccagcaccgagcctagtgagggcggctctggcggcggcagcgcccaggagattaaacggatcaacaagatcagaagaagacttgtgaaagacagcaacaccaagaaggccggcaagacaggccccatgaaaaccctgctggttagagtgatgacacccgatctgagagagcggctggaaaacctgagaaagaagcctgaaaatatcccccagcccatcagcaatacatctagagccaacctgaataagctgctgaccgattacaccgaaatgaagaaggcgatcctgcatgtgtactgggaagagttccagaaggaccctgtgggcctgatgagccgggtggcccagcctgccagcaagaagatcgatcagaacaagctgaaacctgagatggacgagaagggcaacctgaccaccgccggctttgcctgctctcagtgtggccagcccctgttcgtgtacaagctggagcaggtgtctgagaagggcaaggcttacaccaactacttcggacggtgcaatgtggccgagcacgaaaagctgatcctgctggcccagctgaagcccgagaaggatagcgacgaagccgtgacatatagcctgggaaagtttgggcagagggccctggatttctacagcattcatgtgaccaaggagtccacccaccccgtgaagcccctggcccagatcgccggaaacagatacgcctccggacctgtgggaaaggccctgagcgacgcatgtatgggcacaatcgcctccttcctgtctaagtaccaggacatcatcatcgaacaccagaaggtggtgaagggcaaccagaagagactggagagcctgcgggagctggccggcaaggaaaacctggaataccctagcgtgaccctgccacctcagcctcacaccaaggagggcgttgatgcctacaacgaagtgatcgcccgggtgcgaatgtgggtgaacctgaacctgtggcagaagctgaagctaagcagagatgatgccaagcctctgctgagactgaagggattcccttcctttcctctggtcgagagacaggccaacgaagtggactggtgggacatggtgtgtaacgtgaagaagctgatcaacgagaaaaaggaggatggcaaggtgttttggcagaatctggctggctacaagagacaggaagccctgagaccatacctgagcagcgaggaagatcggaagaagggaaagaaattcgctcggtaccagctgggcgacctgctgctgcacctggaaaagaagcacggcgaggactggggaaaggtgtacgacgaggcctgggagcggattgacaagaaagtggaaggcctgagcaagcacatcaagctggaagaggaacggagaagcgaggacgcccagagcaaggccgccctgaccgactggctgcgggctaaggccagcttcgtgatcgagggcctgaaggaggccgacaaggacgagttctgcagatgcgagctgaagctgcagaagtggtacggggacctgcggggaaagcccttcgccatcgaagccgagaacagcatcctggacatcagcggcttcagcaagcagtacaactgtgccttcatctggcagaaggacggcgtgaagaagctgaacctgtacctgatcatcaactacttcaagggcggcaagctgcggttcaagaagatcaaacctgaagccttcgaagccaacagattctacaccgtgatcaacaaaaagagcggcgagatcgtgcccatggaggtgaacttcaacttcgacgaccccaacctgatcatcctgcctctggcctttggcaagagacagggcagagaattcatctggaacgacctgctgtccctggaaaccggcagcctgaagctggccaacggaagagtgatcgagaagacactgtacaacagaagaacccggcaggatgagcctgccctgttcgtggccctgaccttcgagcggcgggaggtcctggactcctccaatatcaaaccaatgaacctgatcggcgtggcaagaggcgaaaacatccccgccgtgatcgccctgaccgaccccgagggctgcccactgagccggtttaaggatagcctgggaaacccaacccacatcctgagaatcggcgagagctataaggagaagcagcggaccatccaggccaagaaggaggtggagcagcggagagccggcggctacagccggaagtacgccagcaaagccaagaatctggcagacgatatggtgagaaacaccgctagagatctgctgtactacgccgtgacccaggatgccatgctgatcttcgccaacctgagccggggcttcggccggcagggcaagcggaccttcatggccgagagacagtacacacggatggaggactggctgaccgccaagctggcctacgagggcctgagcaagacctacctgtccaagacactggcccagtacacctccaagacatgcagcaactgtgggtttaccatcaccagcgccgactacgacagggtgctggagaagctgaagaagacagcaacaggctggatgaccacaattaacggcaaggagctgaaggtggagggccagattacctactacaacagatacaagagacagaacgtagtcaaggacctgtccgtcgagctggatagactgagcgaagaatctgtgaacaacgacatctcctcctggacaaagggcagaagcggagaagctctgagcctcctgaagaaaagattctcccatagacccgtgcaggagaagttcgtgtgcctgaactgcggcttcgagacacacgcagccgagcaagccgccctgaacatcgccagatcctggctgttcctgcggagccaggagtacaagaaataccagacaaacaagacaaccggcaacaccgataagagagccttcgtcgagacctggcagtccttttaccggaagaagcttaaggaggtgtggaaacctgccgtgcggtctggcggatctggcggaggctccacaagcaccctgctgaccttcagggacgtggccatcgagttcagcctggaggagtggaagtgcctggaccccgcccagcagaacctgtacagggacgtgatgctggagaactacaggaacctgttcagcatcggcctgaccgtgagcaagcccggcctgatcacctgcctggagcagaggaaggagccctggaacgtgaagaggcaggaggccgtggacggccaccccgccatgagcagccacgtgaccaccagccccaagaaaaagagaaaagtctaagctgccttctgcggggcttgccttctggccatgcccttcttctctcccttgcacctgtacctcttggtctttgaataaagcctgagtaggaaggctagcaaaaaaaaaaaaaaaaaaaaaaaaaaaaaaaaaaaaaaaaaaaaaaaaaaaaaaaaaaaaaaaaaaaaaaaaaaaaaaaa

SEQ ID NO: 6818 - RNA, 5797 nt, synthetic construct
  source 1..5797: mol_type = other RNA
aggaaataagagagaaaagaagagtaagaagaaatataagagccaccatggcccctaagaagaagcgtaaagtgagccggatggaacgcctcgtctacgaggtgcggcagaagtgcagaaacatcgaggacatctgcatctcctgcggatctctgaacgtgaccctggagcacccactgttcatcggcggcatgtgccagaactgtaaaaactgttttctggagtgtgcctatcaatacgacgatgacggctaccagagctactgcaccatctgttgcggcggaagagaggtgctgatgtgtggaaataacaactgctgccggtgcttctgcgtggaatgcgtggacctgctggtgggccccggcgccgcccaggccgctattaaggaagatccttggaactgctacatgtgcggccacaagggcacatacggcctgctgagacggagagaggactggcctagcagactgcagatgttcttcgccaataaccacgaccaggagttcgacccccctaaggtgtaccctcccgtccccgccgagaagagaaagcccatccgggtcctgagcctgttcgatggcatcgccaccggtctgctggtgctgaaggacctgggcatccaggtggataggtacattgcctccgaggtgtgcgaggactccatcaccgtgggaatggtgcgtcatcagggcaagatcatgtacgtgggcgacgtgcggagcgtgacacagaagcatatccaggagtggggccctttcgacctggtgatcggcggcagcccttgcaatgacctgagcatcgtgaacccagcccggaagggcctgtacgagggaaccggcagactgttcttcgagttttacagactgctgcacgacgcccggcctaaggaaggcgacgaccggcccttcttttggctgttcgagaatgtggtggccatgggagtcagcgacaagcgggatattagccggttcctggagagcaaccccgtgatgatcgatgccaaggaagtgagcgccgcccaccgggccagatacttctggggcaatctgcctggcatgaacagacccctggccagcaccgtgaacgacaagctggagctgcaggagtgcctggagcacggccggatcgccaagttcagcaaggtgagaaccatcaccacccgaagcaacagcatcaaacaaggcaaggaccagcactttcctgtgttcatgaacgagaaggaggacatcctgtggtgtaccgagatggagagagtgttcgggttcccagtccactacacagatgtcagcaacatgtctagactggccagacagagactgctgggaagaagctggtccgtccctgtgatcagacacctgttcgcccctctgaaggagtacttcgcctgcgtgagcagcggcaacagcaacgccaacagccggggccccagcttctctagcggcctggtgccactgtccctgagagggagccacatgggccccatggagatctacaaaaccgtgagcgcctggaagcggcagcctgtgcgcgtgctgagcctgtttcggaatatcgataaagtcctgaaaagcctgggattcctggagagcggctctggctccggcggtggcaccctgaagtacgtggaggatgtgacaaacgtggtcagacgggatgtggagaagtggggccccttcgatctggtgtacggcagcacccaacccctgggcagctcttgtgaccggtgccctggctggtacatgtttcagttccaccggatcctgcagtacgccctgccgagacaggagtcccagcggccattcttttggattttcatggacaacttgctgctgaccgaggatgaccaggaaactaccactcggttcctgcagaccgaagccgtgaccctgcaggacgtgagaggccgggactaccagaacgccatgcgggtgtggtccaacatccctggactgaaaagcaagcacgcacctctgacccctaaagaagaggagtacctgcaggcccaggtgcggagcagaagcaagctggacgcccctaaggtggatctgctggtgaagaattgcctcctgcccctgagagagtacttcaagtatttcagccagaatagtctgcccctgggcggcccaagcagcggcgcccctcctcccagcggcggcagcccagccggctccccaacctctaccgaggagggcacctctgagtccgccacccccgagagcggccctggcacctccaccgagcccagcgagggcagcgcacccggcagccctgccggcagccccacctccacagaggagggaaccagcaccgagcccagcgaaggcagcgccccaggcaccagcaccgagcctagtgagggcggctctggcggcggcagcgcccaggagattaaacggatcaacaagatcagaagaagacttgtgaaagacagcaacaccaagaaggccggcaagacaggccccatgaaaaccctgctggttagagtgatgacacccgatctgagagagcggctggaaaacctgagaaagaagcctgaaaatatcccccagcccatcagcaatacatctagagccaacctgaataagctgctgaccgattacaccgaaatgaagaaggcgatcctgcatgtgtactgggaagagttccagaaggaccctgtgggcctgatgagccgggtggcccagcctgccagcaagaagatcgatcagaacaagctgaaacctgagatggacgagaagggcaacctgaccaccgccggctttgcctgctctcagtgtggccagcccctgttcgtgtacaagctggagcaggtgtctgagaagggcaaggcttacaccaactacttcggacggtgcaatgtggccgagcacgaaaagctgatcctgctggcccagctgaagcccgagaaggatagcgacgaagccgtgacatatagcctgggaaagtttgggcagagggccctggatttctacagcattcatgtgaccaaggagtccacccaccccgtgaagcccctggcccagatcgccggaaacagatacgcctccggacctgtgggaaaggccctgagcgacgcatgtatgggcacaatcgcctccttcctgtctaagtaccaggacatcatcatcgaacaccagaaggtggtgaagggcaaccagaagagactggagagcctgcgggagctggccggcaaggaaaacctggaataccctagcgtgaccctgccacctcagcctcacaccaaggagggcgttgatgcctacaacgaagtgatcgcccgggtgcgaatgtgggtgaacctgaacctgtggcagaagctgaagctaagcagagatgatgccaagcctctgctgagactgaagggattcccttcctttcctctggtcgagagacaggccaacgaagtggactggtgggacatggtgtgtaacgtgaagaagctgatcaacgagaaaaaggaggatggcaaggtgttttggcagaatctggctggctacaagagacaggaagccctgagaccatacctgagcagcgaggaagatcggaagaagggaaagaaattcgctcggtaccagctgggcgacctgctgctgcacctggaaaagaagcacggcgaggactggggaaaggtgtacgacgaggcctgggagcggattgacaagaaagtggaaggcctgagcaagcacatcaagctggaagaggaacggagaagcgaggacgcccagagcaaggccgccctgaccgactggctgcgggctaaggccagcttcgtgatcgagggcctgaaggaggccgacaaggacgagttctgcagatgcgagctgaagctgcagaagtggtacggggacctgcggggaaagcccttcgccatcgaagccgagaacagcatcctggacatcagcggcttcagcaagcagtacaactgtgccttcatctggcagaaggacggcgtgaagaagctgaacctgtacctgatcatcaactacttcaagggcggcaagctgcggttcaagaagatcaaacctgaagccttcgaagccaacagattctacaccgtgatcaacaaaaagagcggcgagatcgtgcccatggaggtgaacttcaacttcgacgaccccaacctgatcatcctgcctctggcctttggcaagagacagggcagagaattcatctggaacgacctgctgtccctggaaaccggcagcctgaagctggccaacggaagagtgatcgagaagacactgtacaacagaagaacccggcaggatgagcctgccctgttcgtggccctgaccttcgagcggcgggaggtcctggactcctccaatatcaaaccaatgaacctgatcggcgtggcaagaggcgaaaacatccccgccgtgatcgccctgaccgaccccgagggctgcccactgagccggtttaaggatagcctgggaaacccaacccacatcctgagaatcggcgagagctataaggagaagcagcggaccatccaggccaagaaggaggtggagcagcggagagccggcggctacagccggaagtacgccagcaaagccaagaatctggcagacgatatggtgagaaacaccgctagagatctgctgtactacgccgtgacccaggatgccatgctgatcttcgccaacctgagccggggcttcggccggcagggcaagcggaccttcatggccgagagacagtacacacggatggaggactggctgaccgccaagctggcctacgagggcctgagcaagacctacctgtccaagacactggcccagtacacctccaagacatgcagcaactgtgggtttaccatcaccagcgccgactacgacagggtgctggagaagctgaagaagacagcaacaggctggatgaccacaattaacggcaaggagctgaaggtggagggccagattacctactacaacagatacaagagacagaacgtagtcaaggacctgtccgtcgagctggatagactgagcgaagaatctgtgaacaacgacatctcctcctggacaaagggcagaagcggagaagctctgagcctcctgaagaaaagattctcccatagacccgtgcaggagaagttcgtgtgcctgaactgcggcttcgagacacacgcagccgagcaagccgccctgaacatcgccagatcctggctgttcctgcggagccaggagtacaagaaataccagacaaacaagacaaccggcaacaccgataagagagccttcgtcgagacctggcagtccttttaccggaagaagcttaaggaggtgtggaaacctgccgtgcggtctggcggatctggcggaggctccacaagcctgcagggcagcctgagcttcgaggacgtgaccgtgggcttcagccaggaggagtggcagaggctggaccccgcccagaggaccctgtacagggacgtgatgctggagaactacagccacctggtggccgtgggctgctgcgtgcccaagcccgacgtgatcttcaggctggagcagggccagcagccctggctggtggaggaggagagcctggaccagagctgccccgaggtgtgcagggtgaccagccccaagaaaaagagaaaagtctaagctgccttctgcggggcttgccttctggccatgcccttcttctctcccttgcacctgtacctcttggtctttgaataaagcctgagtaggaaggctagcaaaaaaaaaaaaaaaaaaaaaaaaaaaaaaaaaaaaaaaaaaaaaaaaaaaaaaaaaaaaaaaaaaaaaaaaaaaaaaaa

SEQ ID NO: 6819 - RNA, 5797 nt, synthetic construct
  source 1..5797: mol_type = other RNA
aggaaataagagagaaaagaagagtaagaagaaatataagagccaccatggcccctaagaagaagcgtaaagtgagccggatggaacgcctcgtctacgaggtgcggcagaagtgcagaaacatcgaggacatctgcatctcctgcggatctctgaacgtgaccctggagcacccactgttcatcggcggcatgtgccagaactgtaaaaactgttttctggagtgtgcctatcaatacgacgatgacggctaccagagctactgcaccatctgttgcggcggaagagaggtgctgatgtgtggaaataacaactgctgccggtgcttctgcgtggaatgcgtggacctgctggtgggccccggcgccgcccaggccgctattaaggaagatccttggaactgctacatgtgcggccacaagggcacatacggcctgctgagacggagagaggactggcctagcagactgcagatgttcttcgccaataaccacgaccaggagttcgacccccctaaggtgtaccctcccgtccccgccgagaagagaaagcccatccgggtcctgagcctgttcgatggcatcgccaccggtctgctggtgctgaaggacctgggcatccaggtggataggtacattgcctccgaggtgtgcgaggactccatcaccgtgggaatggtgcgtcatcagggcaagatcatgtacgtgggcgacgtgcggagcgtgacacagaagcatatccaggagtggggccctttcgacctggtgatcggcggcagcccttgcaatgacctgagcatcgtgaacccagcccggaagggcctgtacgagggaaccggcagactgttcttcgagttttacagactgctgcacgacgcccggcctaaggaaggcgacgaccggcccttcttttggctgttcgagaatgtggtggccatgggagtcagcgacaagcgggatattagccggttcctggagagcaaccccgtgatgatcgatgccaaggaagtgagcgccgcccaccgggccagatacttctggggcaatctgcctggcatgaacagacccctggccagcaccgtgaacgacaagctggagctgcaggagtgcctggagcacggccggatcgccaagttcagcaaggtgagaaccatcaccacccgaagcaacagcatcaaacaaggcaaggaccagcactttcctgtgttcatgaacgagaaggaggacatcctgtggtgtaccgagatggagagagtgttcgggttcccagtccactacacagatgtcagcaacatgtctagactggccagacagagactgctgggaagaagctggtccgtccctgtgatcagacacctgttcgcccctctgaaggagtacttcgcctgcgtgagcagcggcaacagcaacgccaacagccggggccccagcttctctagcggcctggtgccactgtccctgagagggagccacatgggccccatggagatctacaaaaccgtgagcgcctggaagcggcagcctgtgcgcgtgctgagcctgtttcggaatatcgataaagtcctgaaaagcctgggattcctggagagcggctctggctccggcggtggcaccctgaagtacgtggaggatgtgacaaacgtggtcagacgggatgtggagaagtggggccccttcgatctggtgtacggcagcacccaacccctgggcagctcttgtgaccggtgccctggctggtacatgtttcagttccaccggatcctgcagtacgccctgccgagacaggagtcccagcggccattcttttggattttcatggacaacttgctgctgaccgaggatgaccaggaaactaccactcggttcctgcagaccgaagccgtgaccctgcaggacgtgagaggccgggactaccagaacgccatgcgggtgtggtccaacatccctggactgaaaagcaagcacgcacctctgacccctaaagaagaggagtacctgcaggcccaggtgcggagcagaagcaagctggacgcccctaaggtggatctgctggtgaagaattgcctcctgcccctgagagagtacttcaagtatttcagccagaatagtctgcccctgggcggcccaagcagcggcgcccctcctcccagcggcggcagcccagccggctccccaacctctaccgaggagggcacctctgagtccgccacccccgagagcggccctggcacctccaccgagcccagcgagggcagcgcacccggcagccctgccggcagccccacctccacagaggagggaaccagcaccgagcccagcgaaggcagcgccccaggcaccagcaccgagcctagtgagggcggctctggcggcggcagcgcccaggagattaaacggatcaacaagatcagaagaagacttgtgaaagacagcaacaccaagaaggccggcaagacaggccccatgaaaaccctgctggttagagtgatgacacccgatctgagagagcggctggaaaacctgagaaagaagcctgaaaatatcccccagcccatcagcaatacatctagagccaacctgaataagctgctgaccgattacaccgaaatgaagaaggcgatcctgcatgtgtactgggaagagttccagaaggaccctgtgggcctgatgagccgggtggcccagcctgccagcaagaagatcgatcagaacaagctgaaacctgagatggacgagaagggcaacctgaccaccgccggctttgcctgctctcagtgtggccagcccctgttcgtgtacaagctggagcaggtgtctgagaagggcaaggcttacaccaactacttcggacggtgcaatgtggccgagcacgaaaagctgatcctgctggcccagctgaagcccgagaaggatagcgacgaagccgtgacatatagcctgggaaagtttgggcagagggccctggatttctacagcattcatgtgaccaaggagtccacccaccccgtgaagcccctggcccagatcgccggaaacagatacgcctccggacctgtgggaaaggccctgagcgacgcatgtatgggcacaatcgcctccttcctgtctaagtaccaggacatcatcatcgaacaccagaaggtggtgaagggcaaccagaagagactggagagcctgcgggagctggccggcaaggaaaacctggaataccctagcgtgaccctgccacctcagcctcacaccaaggagggcgttgatgcctacaacgaagtgatcgcccgggtgcgaatgtgggtgaacctgaacctgtggcagaagctgaagctaagcagagatgatgccaagcctctgctgagactgaagggattcccttcctttcctctggtcgagagacaggccaacgaagtggactggtgggacatggtgtgtaacgtgaagaagctgatcaacgagaaaaaggaggatggcaaggtgttttggcagaatctggctggctacaagagacaggaagccctgagaccatacctgagcagcgaggaagatcggaagaagggaaagaaattcgctcggtaccagctgggcgacctgctgctgcacctggaaaagaagcacggcgaggactggggaaaggtgtacgacgaggcctgggagcggattgacaagaaagtggaaggcctgagcaagcacatcaagctggaagaggaacggagaagcgaggacgcccagagcaaggccgccctgaccgactggctgcgggctaaggccagcttcgtgatcgagggcctgaaggaggccgacaaggacgagttctgcagatgcgagctgaagctgcagaagtggtacggggacctgcggggaaagcccttcgccatcgaagccgagaacagcatcctggacatcagcggcttcagcaagcagtacaactgtgccttcatctggcagaaggacggcgtgaagaagctgaacctgtacctgatcatcaactacttcaagggcggcaagctgcggttcaagaagatcaaacctgaagccttcgaagccaacagattctacaccgtgatcaacaaaaagagcggcgagatcgtgcccatggaggtgaacttcaacttcgacgaccccaacctgatcatcctgcctctggcctttggcaagagacagggcagagaattcatctggaacgacctgctgtccctggaaaccggcagcctgaagctggccaacggaagagtgatcgagaagacactgtacaacagaagaacccggcaggatgagcctgccctgttcgtggccctgaccttcgagcggcgggaggtcctggactcctccaatatcaaaccaatgaacctgatcggcgtggcaagaggcgaaaacatccccgccgtgatcgccctgaccgaccccgagggctgcccactgagccggtttaaggatagcctgggaaacccaacccacatcctgagaatcggcgagagctataaggagaagcagcggaccatccaggccaagaaggaggtggagcagcggagagccggcggctacagccggaagtacgccagcaaagccaagaatctggcagacgatatggtgagaaacaccgctagagatctgctgtactacgccgtgacccaggatgccatgctgatcttcgccaacctgagccggggcttcggccggcagggcaagcggaccttcatggccgagagacagtacacacggatggaggactggctgaccgccaagctggcctacgagggcctgagcaagacctacctgtccaagacactggcccagtacacctccaagacatgcagcaactgtgggtttaccatcaccagcgccgactacgacagggtgctggagaagctgaagaagacagcaacaggctggatgaccacaattaacggcaaggagctgaaggtggagggccagattacctactacaacagatacaagagacagaacgtagtcaaggacctgtccgtcgagctggatagactgagcgaagaatctgtgaacaacgacatctcctcctggacaaagggcagaagcggagaagctctgagcctcctgaagaaaagattctcccatagacccgtgcaggagaagttcgtgtgcctgaactgcggcttcgagacacacgcagccgagcaagccgccctgaacatcgccagatcctggctgttcctgcggagccaggagtacaagaaataccagacaaacaagacaaccggcaacaccgataagagagccttcgtcgagacctggcagtccttttaccggaagaagcttaaggaggtgtggaaacctgccgtgcggtctggcggatctggcggaggctccacaagcatggacatggcccaggagcccgtgaccttcagggacgtggccatctacttcagcagggaggagtgggcctgcctggagcccagccagaggaccctgtacagggacgtgatgctggacaacttcagcagcgtggccgccctgggcttctgcagccccaggcccgacctggtgagcaggctggagcagtgggaggagccctgggtggaggacagggagaggcccgagctgcaggccgtgaggaggaccagccccaagaaaaagagaaaagtctaagctgccttctgcggggcttgccttctggccatgcccttcttctctcccttgcacctgtacctcttggtctttgaataaagcctgagtaggaaggctagcaaaaaaaaaaaaaaaaaaaaaaaaaaaaaaaaaaaaaaaaaaaaaaaaaaaaaaaaaaaaaaaaaaaaaaaaaaaaaaaa

SEQ ID NO: 6820 - RNA, 5797 nt, synthetic construct
  source 1..5797: mol_type = other RNA
aggaaataagagagaaaagaagagtaagaagaaatataagagccaccatggcccctaagaagaagcgtaaagtgagccggatggaacgcctcgtctacgaggtgcggcagaagtgcagaaacatcgaggacatctgcatctcctgcggatctctgaacgtgaccctggagcacccactgttcatcggcggcatgtgccagaactgtaaaaactgttttctggagtgtgcctatcaatacgacgatgacggctaccagagctactgcaccatctgttgcggcggaagagaggtgctgatgtgtggaaataacaactgctgccggtgcttctgcgtggaatgcgtggacctgctggtgggccccggcgccgcccaggccgctattaaggaagatccttggaactgctacatgtgcggccacaagggcacatacggcctgctgagacggagagaggactggcctagcagactgcagatgttcttcgccaataaccacgaccaggagttcgacccccctaaggtgtaccctcccgtccccgccgagaagagaaagcccatccgggtcctgagcctgttcgatggcatcgccaccggtctgctggtgctgaaggacctgggcatccaggtggataggtacattgcctccgaggtgtgcgaggactccatcaccgtgggaatggtgcgtcatcagggcaagatcatgtacgtgggcgacgtgcggagcgtgacacagaagcatatccaggagtggggccctttcgacctggtgatcggcggcagcccttgcaatgacctgagcatcgtgaacccagcccggaagggcctgtacgagggaaccggcagactgttcttcgagttttacagactgctgcacgacgcccggcctaaggaaggcgacgaccggcccttcttttggctgttcgagaatgtggtggccatgggagtcagcgacaagcgggatattagccggttcctggagagcaaccccgtgatgatcgatgccaaggaagtgagcgccgcccaccgggccagatacttctggggcaatctgcctggcatgaacagacccctggccagcaccgtgaacgacaagctggagctgcaggagtgcctggagcacggccggatcgccaagttcagcaaggtgagaaccatcaccacccgaagcaacagcatcaaacaaggcaaggaccagcactttcctgtgttcatgaacgagaaggaggacatcctgtggtgtaccgagatggagagagtgttcgggttcccagtccactacacagatgtcagcaacatgtctagactggccagacagagactgctgggaagaagctggtccgtccctgtgatcagacacctgttcgcccctctgaaggagtacttcgcctgcgtgagcagcggcaacagcaacgccaacagccggggccccagcttctctagcggcctggtgccactgtccctgagagggagccacatgggccccatggagatctacaaaaccgtgagcgcctggaagcggcagcctgtgcgcgtgctgagcctgtttcggaatatcgataaagtcctgaaaagcctgggattcctggagagcggctctggctccggcggtggcaccctgaagtacgtggaggatgtgacaaacgtggtcagacgggatgtggagaagtggggccccttcgatctggtgtacggcagcacccaacccctgggcagctcttgtgaccggtgccctggctggtacatgtttcagttccaccggatcctgcagtacgccctgccgagacaggagtcccagcggccattcttttggattttcatggacaacttgctgctgaccgaggatgaccaggaaactaccactcggttcctgcagaccgaagccgtgaccctgcaggacgtgagaggccgggactaccagaacgccatgcgggtgtggtccaacatccctggactgaaaagcaagcacgcacctctgacccctaaagaagaggagtacctgcaggcccaggtgcggagcagaagcaagctggacgcccctaaggtggatctgctggtgaagaattgcctcctgcccctgagagagtacttcaagtatttcagccagaatagtctgcccctgggcggcccaagcagcggcgcccctcctcccagcggcggcagcccagccggctccccaacctctaccgaggagggcacctctgagtccgccacccccgagagcggccctggcacctccaccgagcccagcgagggcagcgcacccggcagccctgccggcagccccacctccacagaggagggaaccagcaccgagcccagcgaaggcagcgccccaggcaccagcaccgagcctagtgagggcggctctggcggcggcagcgcccaggagattaaacggatcaacaagatcagaagaagacttgtgaaagacagcaacaccaagaaggccggcaagacaggccccatgaaaaccctgctggttagagtgatgacacccgatctgagagagcggctggaaaacctgagaaagaagcctgaaaatatcccccagcccatcagcaatacatctagagccaacctgaataagctgctgaccgattacaccgaaatgaagaaggcgatcctgcatgtgtactgggaagagttccagaaggaccctgtgggcctgatgagccgggtggcccagcctgccagcaagaagatcgatcagaacaagctgaaacctgagatggacgagaagggcaacctgaccaccgccggctttgcctgctctcagtgtggccagcccctgttcgtgtacaagctggagcaggtgtctgagaagggcaaggcttacaccaactacttcggacggtgcaatgtggccgagcacgaaaagctgatcctgctggcccagctgaagcccgagaaggatagcgacgaagccgtgacatatagcctgggaaagtttgggcagagggccctggatttctacagcattcatgtgaccaaggagtccacccaccccgtgaagcccctggcccagatcgccggaaacagatacgcctccggacctgtgggaaaggccctgagcgacgcatgtatgggcacaatcgcctccttcctgtctaagtaccaggacatcatcatcgaacaccagaaggtggtgaagggcaaccagaagagactggagagcctgcgggagctggccggcaaggaaaacctggaataccctagcgtgaccctgccacctcagcctcacaccaaggagggcgttgatgcctacaacgaagtgatcgcccgggtgcgaatgtgggtgaacctgaacctgtggcagaagctgaagctaagcagagatgatgccaagcctctgctgagactgaagggattcccttcctttcctctggtcgagagacaggccaacgaagtggactggtgggacatggtgtgtaacgtgaagaagctgatcaacgagaaaaaggaggatggcaaggtgttttggcagaatctggctggctacaagagacaggaagccctgagaccatacctgagcagcgaggaagatcggaagaagggaaagaaattcgctcggtaccagctgggcgacctgctgctgcacctggaaaagaagcacggcgaggactggggaaaggtgtacgacgaggcctgggagcggattgacaagaaagtggaaggcctgagcaagcacatcaagctggaagaggaacggagaagcgaggacgcccagagcaaggccgccctgaccgactggctgcgggctaaggccagcttcgtgatcgagggcctgaaggaggccgacaaggacgagttctgcagatgcgagctgaagctgcagaagtggtacggggacctgcggggaaagcccttcgccatcgaagccgagaacagcatcctggacatcagcggcttcagcaagcagtacaactgtgccttcatctggcagaaggacggcgtgaagaagctgaacctgtacctgatcatcaactacttcaagggcggcaagctgcggttcaagaagatcaaacctgaagccttcgaagccaacagattctacaccgtgatcaacaaaaagagcggcgagatcgtgcccatggaggtgaacttcaacttcgacgaccccaacctgatcatcctgcctctggcctttggcaagagacagggcagagaattcatctggaacgacctgctgtccctggaaaccggcagcctgaagctggccaacggaagagtgatcgagaagacactgtacaacagaagaacccggcaggatgagcctgccctgttcgtggccctgaccttcgagcggcgggaggtcctggactcctccaatatcaaaccaatgaacctgatcggcgtggcaagaggcgaaaacatccccgccgtgatcgccctgaccgaccccgagggctgcccactgagccggtttaaggatagcctgggaaacccaacccacatcctgagaatcggcgagagctataaggagaagcagcggaccatccaggccaagaaggaggtggagcagcggagagccggcggctacagccggaagtacgccagcaaagccaagaatctggcagacgatatggtgagaaacaccgctagagatctgctgtactacgccgtgacccaggatgccatgctgatcttcgccaacctgagccggggcttcggccggcagggcaagcggaccttcatggccgagagacagtacacacggatggaggactggctgaccgccaagctggcctacgagggcctgagcaagacctacctgtccaagacactggcccagtacacctccaagacatgcagcaactgtgggtttaccatcaccagcgccgactacgacagggtgctggagaagctgaagaagacagcaacaggctggatgaccacaattaacggcaaggagctgaaggtggagggccagattacctactacaacagatacaagagacagaacgtagtcaaggacctgtccgtcgagctggatagactgagcgaagaatctgtgaacaacgacatctcctcctggacaaagggcagaagcggagaagctctgagcctcctgaagaaaagattctcccatagacccgtgcaggagaagttcgtgtgcctgaactgcggcttcgagacacacgcagccgagcaagccgccctgaacatcgccagatcctggctgttcctgcggagccaggagtacaagaaataccagacaaacaagacaaccggcaacaccgataagagagccttcgtcgagacctggcagtccttttaccggaagaagcttaaggaggtgtggaaacctgccgtgcggtctggcggatctggcggaggctccacaagcagccacggccccctgagcttcgaggacgtggccgtggccttcaccaaggaggagtggcagcagctggaccccgcccagaggaccctgtacagggacgtgatgctggagaacttcagccacctggtgagcctgggccaccccgtgagcaagcccgacgtgatcagcaagctggagcagggcgaggagccctggatcatcaagagggacatccccaactggatctaccccgagagggagaacaggaccagccccaagaaaaagagaaaagtctaagctgccttctgcggggcttgccttctggccatgcccttcttctctcccttgcacctgtacctcttggtctttgaataaagcctgagtaggaaggctagcaaaaaaaaaaaaaaaaaaaaaaaaaaaaaaaaaaaaaaaaaaaaaaaaaaaaaaaaaaaaaaaaaaaaaaaaaaaaaaaa

SEQ ID NO: 6821 - RNA, 5797 nt, synthetic construct
  source 1..5797: mol_type = other RNA
aggaaataagagagaaaagaagagtaagaagaaatataagagccaccatggcccctaagaagaagcgtaaagtgagccggatggaacgcctcgtctacgaggtgcggcagaagtgcagaaacatcgaggacatctgcatctcctgcggatctctgaacgtgaccctggagcacccactgttcatcggcggcatgtgccagaactgtaaaaactgttttctggagtgtgcctatcaatacgacgatgacggctaccagagctactgcaccatctgttgcggcggaagagaggtgctgatgtgtggaaataacaactgctgccggtgcttctgcgtggaatgcgtggacctgctggtgggccccggcgccgcccaggccgctattaaggaagatccttggaactgctacatgtgcggccacaagggcacatacggcctgctgagacggagagaggactggcctagcagactgcagatgttcttcgccaataaccacgaccaggagttcgacccccctaaggtgtaccctcccgtccccgccgagaagagaaagcccatccgggtcctgagcctgttcgatggcatcgccaccggtctgctggtgctgaaggacctgggcatccaggtggataggtacattgcctccgaggtgtgcgaggactccatcaccgtgggaatggtgcgtcatcagggcaagatcatgtacgtgggcgacgtgcggagcgtgacacagaagcatatccaggagtggggccctttcgacctggtgatcggcggcagcccttgcaatgacctgagcatcgtgaacccagcccggaagggcctgtacgagggaaccggcagactgttcttcgagttttacagactgctgcacgacgcccggcctaaggaaggcgacgaccggcccttcttttggctgttcgagaatgtggtggccatgggagtcagcgacaagcgggatattagccggttcctggagagcaaccccgtgatgatcgatgccaaggaagtgagcgccgcccaccgggccagatacttctggggcaatctgcctggcatgaacagacccctggccagcaccgtgaacgacaagctggagctgcaggagtgcctggagcacggccggatcgccaagttcagcaaggtgagaaccatcaccacccgaagcaacagcatcaaacaaggcaaggaccagcactttcctgtgttcatgaacgagaaggaggacatcctgtggtgtaccgagatggagagagtgttcgggttcccagtccactacacagatgtcagcaacatgtctagactggccagacagagactgctgggaagaagctggtccgtccctgtgatcagacacctgttcgcccctctgaaggagtacttcgcctgcgtgagcagcggcaacagcaacgccaacagccggggccccagcttctctagcggcctggtgccactgtccctgagagggagccacatgggccccatggagatctacaaaaccgtgagcgcctggaagcggcagcctgtgcgcgtgctgagcctgtttcggaatatcgataaagtcctgaaaagcctgggattcctggagagcggctctggctccggcggtggcaccctgaagtacgtggaggatgtgacaaacgtggtcagacgggatgtggagaagtggggccccttcgatctggtgtacggcagcacccaacccctgggcagctcttgtgaccggtgccctggctggtacatgtttcagttccaccggatcctgcagtacgccctgccgagacaggagtcccagcggccattcttttggattttcatggacaacttgctgctgaccgaggatgaccaggaaactaccactcggttcctgcagaccgaagccgtgaccctgcaggacgtgagaggccgggactaccagaacgccatgcgggtgtggtccaacatccctggactgaaaagcaagcacgcacctctgacccctaaagaagaggagtacctgcaggcccaggtgcggagcagaagcaagctggacgcccctaaggtggatctgctggtgaagaattgcctcctgcccctgagagagtacttcaagtatttcagccagaatagtctgcccctgggcggcccaagcagcggcgcccctcctcccagcggcggcagcccagccggctccccaacctctaccgaggagggcacctctgagtccgccacccccgagagcggccctggcacctccaccgagcccagcgagggcagcgcacccggcagccctgccggcagccccacctccacagaggagggaaccagcaccgagcccagcgaaggcagcgccccaggcaccagcaccgagcctagtgagggcggctctggcggcggcagcgcccaggagattaaacggatcaacaagatcagaagaagacttgtgaaagacagcaacaccaagaaggccggcaagacaggccccatgaaaaccctgctggttagagtgatgacacccgatctgagagagcggctggaaaacctgagaaagaagcctgaaaatatcccccagcccatcagcaatacatctagagccaacctgaataagctgctgaccgattacaccgaaatgaagaaggcgatcctgcatgtgtactgggaagagttccagaaggaccctgtgggcctgatgagccgggtggcccagcctgccagcaagaagatcgatcagaacaagctgaaacctgagatggacgagaagggcaacctgaccaccgccggctttgcctgctctcagtgtggccagcccctgttcgtgtacaagctggagcaggtgtctgagaagggcaaggcttacaccaactacttcggacggtgcaatgtggccgagcacgaaaagctgatcctgctggcccagctgaagcccgagaaggatagcgacgaagccgtgacatatagcctgggaaagtttgggcagagggccctggatttctacagcattcatgtgaccaaggagtccacccaccccgtgaagcccctggcccagatcgccggaaacagatacgcctccggacctgtgggaaaggccctgagcgacgcatgtatgggcacaatcgcctccttcctgtctaagtaccaggacatcatcatcgaacaccagaaggtggtgaagggcaaccagaagagactggagagcctgcgggagctggccggcaaggaaaacctggaataccctagcgtgaccctgccacctcagcctcacaccaaggagggcgttgatgcctacaacgaagtgatcgcccgggtgcgaatgtgggtgaacctgaacctgtggcagaagctgaagctaagcagagatgatgccaagcctctgctgagactgaagggattcccttcctttcctctggtcgagagacaggccaacgaagtggactggtgggacatggtgtgtaacgtgaagaagctgatcaacgagaaaaaggaggatggcaaggtgttttggcagaatctggctggctacaagagacaggaagccctgagaccatacctgagcagcgaggaagatcggaagaagggaaagaaattcgctcggtaccagctgggcgacctgctgctgcacctggaaaagaagcacggcgaggactggggaaaggtgtacgacgaggcctgggagcggattgacaagaaagtggaaggcctgagcaagcacatcaagctggaagaggaacggagaagcgaggacgcccagagcaaggccgccctgaccgactggctgcgggctaaggccagcttcgtgatcgagggcctgaaggaggccgacaaggacgagttctgcagatgcgagctgaagctgcagaagtggtacggggacctgcggggaaagcccttcgccatcgaagccgagaacagcatcctggacatcagcggcttcagcaagcagtacaactgtgccttcatctggcagaaggacggcgtgaagaagctgaacctgtacctgatcatcaactacttcaagggcggcaagctgcggttcaagaagatcaaacctgaagccttcgaagccaacagattctacaccgtgatcaacaaaaagagcggcgagatcgtgcccatggaggtgaacttcaacttcgacgaccccaacctgatcatcctgcctctggcctttggcaagagacagggcagagaattcatctggaacgacctgctgtccctggaaaccggcagcctgaagctggccaacggaagagtgatcgagaagacactgtacaacagaagaacccggcaggatgagcctgccctgttcgtggccctgaccttcgagcggcgggaggtcctggactcctccaatatcaaaccaatgaacctgatcggcgtggcaagaggcgaaaacatccccgccgtgatcgccctgaccgaccccgagggctgcccactgagccggtttaaggatagcctgggaaacccaacccacatcctgagaatcggcgagagctataaggagaagcagcggaccatccaggccaagaaggaggtggagcagcggagagccggcggctacagccggaagtacgccagcaaagccaagaatctggcagacgatatggtgagaaacaccgctagagatctgctgtactacgccgtgacccaggatgccatgctgatcttcgccaacctgagccggggcttcggccggcagggcaagcggaccttcatggccgagagacagtacacacggatggaggactggctgaccgccaagctggcctacgagggcctgagcaagacctacctgtccaagacactggcccagtacacctccaagacatgcagcaactgtgggtttaccatcaccagcgccgactacgacagggtgctggagaagctgaagaagacagcaacaggctggatgaccacaattaacggcaaggagctgaaggtggagggccagattacctactacaacagatacaagagacagaacgtagtcaaggacctgtccgtcgagctggatagactgagcgaagaatctgtgaacaacgacatctcctcctggacaaagggcagaagcggagaagctctgagcctcctgaagaaaagattctcccatagacccgtgcaggagaagttcgtgtgcctgaactgcggcttcgagacacacgcagccgagcaagccgccctgaacatcgccagatcctggctgttcctgcggagccaggagtacaagaaataccagacaaacaagacaaccggcaacaccgataagagagccttcgtcgagacctggcagtccttttaccggaagaagcttaaggaggtgtggaaacctgccgtgcggtctggcggatctggcggaggctccacaagcgacctggtgacctacgacgacgtgcacgtgaacttcacccaggaggagtgggccctgctggaccccagccagaagaacctgtacaaggacgtgatgctggagacctacaggaacctgagcgccatcggctacatctgggaggtgcacaccagcgaggaccacttccagaccagcaggagccacggcaggcacgagaggagctgcaccgccgtgcagcccagcgagttcatccagtgcggcaagaccagccccaagaaaaagagaaaagtctaagctgccttctgcggggcttgccttctggccatgcccttcttctctcccttgcacctgtacctcttggtctttgaataaagcctgagtaggaaggctagcaaaaaaaaaaaaaaaaaaaaaaaaaaaaaaaaaaaaaaaaaaaaaaaaaaaaaaaaaaaaaaaaaaaaaaaaaaaaaaaa

SEQ ID NO: 6822 - RNA, 5797 nt, synthetic construct
  source 1..5797: mol_type = other RNA
aggaaataagagagaaaagaagagtaagaagaaatataagagccaccatggcccctaagaagaagcgtaaagtgagccggatggaacgcctcgtctacgaggtgcggcagaagtgcagaaacatcgaggacatctgcatctcctgcggatctctgaacgtgaccctggagcacccactgttcatcggcggcatgtgccagaactgtaaaaactgttttctggagtgtgcctatcaatacgacgatgacggctaccagagctactgcaccatctgttgcggcggaagagaggtgctgatgtgtggaaataacaactgctgccggtgcttctgcgtggaatgcgtggacctgctggtgggccccggcgccgcccaggccgctattaaggaagatccttggaactgctacatgtgcggccacaagggcacatacggcctgctgagacggagagaggactggcctagcagactgcagatgttcttcgccaataaccacgaccaggagttcgacccccctaaggtgtaccctcccgtccccgccgagaagagaaagcccatccgggtcctgagcctgttcgatggcatcgccaccggtctgctggtgctgaaggacctgggcatccaggtggataggtacattgcctccgaggtgtgcgaggactccatcaccgtgggaatggtgcgtcatcagggcaagatcatgtacgtgggcgacgtgcggagcgtgacacagaagcatatccaggagtggggccctttcgacctggtgatcggcggcagcccttgcaatgacctgagcatcgtgaacccagcccggaagggcctgtacgagggaaccggcagactgttcttcgagttttacagactgctgcacgacgcccggcctaaggaaggcgacgaccggcccttcttttggctgttcgagaatgtggtggccatgggagtcagcgacaagcgggatattagccggttcctggagagcaaccccgtgatgatcgatgccaaggaagtgagcgccgcccaccgggccagatacttctggggcaatctgcctggcatgaacagacccctggccagcaccgtgaacgacaagctggagctgcaggagtgcctggagcacggccggatcgccaagttcagcaaggtgagaaccatcaccacccgaagcaacagcatcaaacaaggcaaggaccagcactttcctgtgttcatgaacgagaaggaggacatcctgtggtgtaccgagatggagagagtgttcgggttcccagtccactacacagatgtcagcaacatgtctagactggccagacagagactgctgggaagaagctggtccgtccctgtgatcagacacctgttcgcccctctgaaggagtacttcgcctgcgtgagcagcggcaacagcaacgccaacagccggggccccagcttctctagcggcctggtgccactgtccctgagagggagccacatgggccccatggagatctacaaaaccgtgagcgcctggaagcggcagcctgtgcgcgtgctgagcctgtttcggaatatcgataaagtcctgaaaagcctgggattcctggagagcggctctggctccggcggtggcaccctgaagtacgtggaggatgtgacaaacgtggtcagacgggatgtggagaagtggggccccttcgatctggtgtacggcagcacccaacccctgggcagctcttgtgaccggtgccctggctggtacatgtttcagttccaccggatcctgcagtacgccctgccgagacaggagtcccagcggccattcttttggattttcatggacaacttgctgctgaccgaggatgaccaggaaactaccactcggttcctgcagaccgaagccgtgaccctgcaggacgtgagaggccgggactaccagaacgccatgcgggtgtggtccaacatccctggactgaaaagcaagcacgcacctctgacccctaaagaagaggagtacctgcaggcccaggtgcggagcagaagcaagctggacgcccctaaggtggatctgctggtgaagaattgcctcctgcccctgagagagtacttcaagtatttcagccagaatagtctgcccctgggcggcccaagcagcggcgcccctcctcccagcggcggcagcccagccggctccccaacctctaccgaggagggcacctctgagtccgccacccccgagagcggccctggcacctccaccgagcccagcgagggcagcgcacccggcagccctgccggcagccccacctccacagaggagggaaccagcaccgagcccagcgaaggcagcgccccaggcaccagcaccgagcctagtgagggcggctctggcggcggcagcgcccaggagattaaacggatcaacaagatcagaagaagacttgtgaaagacagcaacaccaagaaggccggcaagacaggccccatgaaaaccctgctggttagagtgatgacacccgatctgagagagcggctggaaaacctgagaaagaagcctgaaaatatcccccagcccatcagcaatacatctagagccaacctgaataagctgctgaccgattacaccgaaatgaagaaggcgatcctgcatgtgtactgggaagagttccagaaggaccctgtgggcctgatgagccgggtggcccagcctgccagcaagaagatcgatcagaacaagctgaaacctgagatggacgagaagggcaacctgaccaccgccggctttgcctgctctcagtgtggccagcccctgttcgtgtacaagctggagcaggtgtctgagaagggcaaggcttacaccaactacttcggacggtgcaatgtggccgagcacgaaaagctgatcctgctggcccagctgaagcccgagaaggatagcgacgaagccgtgacatatagcctgggaaagtttgggcagagggccctggatttctacagcattcatgtgaccaaggagtccacccaccccgtgaagcccctggcccagatcgccggaaacagatacgcctccggacctgtgggaaaggccctgagcgacgcatgtatgggcacaatcgcctccttcctgtctaagtaccaggacatcatcatcgaacaccagaaggtggtgaagggcaaccagaagagactggagagcctgcgggagctggccggcaaggaaaacctggaataccctagcgtgaccctgccacctcagcctcacaccaaggagggcgttgatgcctacaacgaagtgatcgcccgggtgcgaatgtgggtgaacctgaacctgtggcagaagctgaagctaagcagagatgatgccaagcctctgctgagactgaagggattcccttcctttcctctggtcgagagacaggccaacgaagtggactggtgggacatggtgtgtaacgtgaagaagctgatcaacgagaaaaaggaggatggcaaggtgttttggcagaatctggctggctacaagagacaggaagccctgagaccatacctgagcagcgaggaagatcggaagaagggaaagaaattcgctcggtaccagctgggcgacctgctgctgcacctggaaaagaagcacggcgaggactggggaaaggtgtacgacgaggcctgggagcggattgacaagaaagtggaaggcctgagcaagcacatcaagctggaagaggaacggagaagcgaggacgcccagagcaaggccgccctgaccgactggctgcgggctaaggccagcttcgtgatcgagggcctgaaggaggccgacaaggacgagttctgcagatgcgagctgaagctgcagaagtggtacggggacctgcggggaaagcccttcgccatcgaagccgagaacagcatcctggacatcagcggcttcagcaagcagtacaactgtgccttcatctggcagaaggacggcgtgaagaagctgaacctgtacctgatcatcaactacttcaagggcggcaagctgcggttcaagaagatcaaacctgaagccttcgaagccaacagattctacaccgtgatcaacaaaaagagcggcgagatcgtgcccatggaggtgaacttcaacttcgacgaccccaacctgatcatcctgcctctggcctttggcaagagacagggcagagaattcatctggaacgacctgctgtccctggaaaccggcagcctgaagctggccaacggaagagtgatcgagaagacactgtacaacagaagaacccggcaggatgagcctgccctgttcgtggccctgaccttcgagcggcgggaggtcctggactcctccaatatcaaaccaatgaacctgatcggcgtggcaagaggcgaaaacatccccgccgtgatcgccctgaccgaccccgagggctgcccactgagccggtttaaggatagcctgggaaacccaacccacatcctgagaatcggcgagagctataaggagaagcagcggaccatccaggccaagaaggaggtggagcagcggagagccggcggctacagccggaagtacgccagcaaagccaagaatctggcagacgatatggtgagaaacaccgctagagatctgctgtactacgccgtgacccaggatgccatgctgatcttcgccaacctgagccggggcttcggccggcagggcaagcggaccttcatggccgagagacagtacacacggatggaggactggctgaccgccaagctggcctacgagggcctgagcaagacctacctgtccaagacactggcccagtacacctccaagacatgcagcaactgtgggtttaccatcaccagcgccgactacgacagggtgctggagaagctgaagaagacagcaacaggctggatgaccacaattaacggcaaggagctgaaggtggagggccagattacctactacaacagatacaagagacagaacgtagtcaaggacctgtccgtcgagctggatagactgagcgaagaatctgtgaacaacgacatctcctcctggacaaagggcagaagcggagaagctctgagcctcctgaagaaaagattctcccatagacccgtgcaggagaagttcgtgtgcctgaactgcggcttcgagacacacgcagccgagcaagccgccctgaacatcgccagatcctggctgttcctgcggagccaggagtacaagaaataccagacaaacaagacaaccggcaacaccgataagagagccttcgtcgagacctggcagtccttttaccggaagaagcttaaggaggtgtggaaacctgccgtgcggtctggcggatctggcggaggctccacaagcatgccccagggcagcgtgagcttcaaggacgtgaccgtggacttcacccaggaggagtggcagcagctggacagcgcccagaaggccctgtacagggacgtgatgctggagaactactgccacttcgtgagcgtgggcttccacatgaccaagcccgacatgatccacaagctggagcagggcaaggagctgtggaccaccggcaggatcttccccagcaggagctacctgggcgagagcgtgaccagccccaagaaaaagagaaaagtctaagctgccttctgcggggcttgccttctggccatgcccttcttctctcccttgcacctgtacctcttggtctttgaataaagcctgagtaggaaggctagcaaaaaaaaaaaaaaaaaaaaaaaaaaaaaaaaaaaaaaaaaaaaaaaaaaaaaaaaaaaaaaaaaaaaaaaaaaaaaaaa

SEQ ID NO: 6823 - RNA, 5797 nt, synthetic construct
  source 1..5797: mol_type = other RNA
aggaaataagagagaaaagaagagtaagaagaaatataagagccaccatggcccctaagaagaagcgtaaagtgagccggatggaacgcctcgtctacgaggtgcggcagaagtgcagaaacatcgaggacatctgcatctcctgcggatctctgaacgtgaccctggagcacccactgttcatcggcggcatgtgccagaactgtaaaaactgttttctggagtgtgcctatcaatacgacgatgacggctaccagagctactgcaccatctgttgcggcggaagagaggtgctgatgtgtggaaataacaactgctgccggtgcttctgcgtggaatgcgtggacctgctggtgggccccggcgccgcccaggccgctattaaggaagatccttggaactgctacatgtgcggccacaagggcacatacggcctgctgagacggagagaggactggcctagcagactgcagatgttcttcgccaataaccacgaccaggagttcgacccccctaaggtgtaccctcccgtccccgccgagaagagaaagcccatccgggtcctgagcctgttcgatggcatcgccaccggtctgctggtgctgaaggacctgggcatccaggtggataggtacattgcctccgaggtgtgcgaggactccatcaccgtgggaatggtgcgtcatcagggcaagatcatgtacgtgggcgacgtgcggagcgtgacacagaagcatatccaggagtggggccctttcgacctggtgatcggcggcagcccttgcaatgacctgagcatcgtgaacccagcccggaagggcctgtacgagggaaccggcagactgttcttcgagttttacagactgctgcacgacgcccggcctaaggaaggcgacgaccggcccttcttttggctgttcgagaatgtggtggccatgggagtcagcgacaagcgggatattagccggttcctggagagcaaccccgtgatgatcgatgccaaggaagtgagcgccgcccaccgggccagatacttctggggcaatctgcctggcatgaacagacccctggccagcaccgtgaacgacaagctggagctgcaggagtgcctggagcacggccggatcgccaagttcagcaaggtgagaaccatcaccacccgaagcaacagcatcaaacaaggcaaggaccagcactttcctgtgttcatgaacgagaaggaggacatcctgtggtgtaccgagatggagagagtgttcgggttcccagtccactacacagatgtcagcaacatgtctagactggccagacagagactgctgggaagaagctggtccgtccctgtgatcagacacctgttcgcccctctgaaggagtacttcgcctgcgtgagcagcggcaacagcaacgccaacagccggggccccagcttctctagcggcctggtgccactgtccctgagagggagccacatgggccccatggagatctacaaaaccgtgagcgcctggaagcggcagcctgtgcgcgtgctgagcctgtttcggaatatcgataaagtcctgaaaagcctgggattcctggagagcggctctggctccggcggtggcaccctgaagtacgtggaggatgtgacaaacgtggtcagacgggatgtggagaagtggggccccttcgatctggtgtacggcagcacccaacccctgggcagctcttgtgaccggtgccctggctggtacatgtttcagttccaccggatcctgcagtacgccctgccgagacaggagtcccagcggccattcttttggattttcatggacaacttgctgctgaccgaggatgaccaggaaactaccactcggttcctgcagaccgaagccgtgaccctgcaggacgtgagaggccgggactaccagaacgccatgcgggtgtggtccaacatccctggactgaaaagcaagcacgcacctctgacccctaaagaagaggagtacctgcaggcccaggtgcggagcagaagcaagctggacgcccctaaggtggatctgctggtgaagaattgcctcctgcccctgagagagtacttcaagtatttcagccagaatagtctgcccctgggcggcccaagcagcggcgcccctcctcccagcggcggcagcccagccggctccccaacctctaccgaggagggcacctctgagtccgccacccccgagagcggccctggcacctccaccgagcccagcgagggcagcgcacccggcagccctgccggcagccccacctccacagaggagggaaccagcaccgagcccagcgaaggcagcgccccaggcaccagcaccgagcctagtgagggcggctctggcggcggcagcgcccaggagattaaacggatcaacaagatcagaagaagacttgtgaaagacagcaacaccaagaaggccggcaagacaggccccatgaaaaccctgctggttagagtgatgacacccgatctgagagagcggctggaaaacctgagaaagaagcctgaaaatatcccccagcccatcagcaatacatctagagccaacctgaataagctgctgaccgattacaccgaaatgaagaaggcgatcctgcatgtgtactgggaagagttccagaaggaccctgtgggcctgatgagccgggtggcccagcctgccagcaagaagatcgatcagaacaagctgaaacctgagatggacgagaagggcaacctgaccaccgccggctttgcctgctctcagtgtggccagcccctgttcgtgtacaagctggagcaggtgtctgagaagggcaaggcttacaccaactacttcggacggtgcaatgtggccgagcacgaaaagctgatcctgctggcccagctgaagcccgagaaggatagcgacgaagccgtgacatatagcctgggaaagtttgggcagagggccctggatttctacagcattcatgtgaccaaggagtccacccaccccgtgaagcccctggcccagatcgccggaaacagatacgcctccggacctgtgggaaaggccctgagcgacgcatgtatgggcacaatcgcctccttcctgtctaagtaccaggacatcatcatcgaacaccagaaggtggtgaagggcaaccagaagagactggagagcctgcgggagctggccggcaaggaaaacctggaataccctagcgtgaccctgccacctcagcctcacaccaaggagggcgttgatgcctacaacgaagtgatcgcccgggtgcgaatgtgggtgaacctgaacctgtggcagaagctgaagctaagcagagatgatgccaagcctctgctgagactgaagggattcccttcctttcctctggtcgagagacaggccaacgaagtggactggtgggacatggtgtgtaacgtgaagaagctgatcaacgagaaaaaggaggatggcaaggtgttttggcagaatctggctggctacaagagacaggaagccctgagaccatacctgagcagcgaggaagatcggaagaagggaaagaaattcgctcggtaccagctgggcgacctgctgctgcacctggaaaagaagcacggcgaggactggggaaaggtgtacgacgaggcctgggagcggattgacaagaaagtggaaggcctgagcaagcacatcaagctggaagaggaacggagaagcgaggacgcccagagcaaggccgccctgaccgactggctgcgggctaaggccagcttcgtgatcgagggcctgaaggaggccgacaaggacgagttctgcagatgcgagctgaagctgcagaagtggtacggggacctgcggggaaagcccttcgccatcgaagccgagaacagcatcctggacatcagcggcttcagcaagcagtacaactgtgccttcatctggcagaaggacggcgtgaagaagctgaacctgtacctgatcatcaactacttcaagggcggcaagctgcggttcaagaagatcaaacctgaagccttcgaagccaacagattctacaccgtgatcaacaaaaagagcggcgagatcgtgcccatggaggtgaacttcaacttcgacgaccccaacctgatcatcctgcctctggcctttggcaagagacagggcagagaattcatctggaacgacctgctgtccctggaaaccggcagcctgaagctggccaacggaagagtgatcgagaagacactgtacaacagaagaacccggcaggatgagcctgccctgttcgtggccctgaccttcgagcggcgggaggtcctggactcctccaatatcaaaccaatgaacctgatcggcgtggcaagaggcgaaaacatccccgccgtgatcgccctgaccgaccccgagggctgcccactgagccggtttaaggatagcctgggaaacccaacccacatcctgagaatcggcgagagctataaggagaagcagcggaccatccaggccaagaaggaggtggagcagcggagagccggcggctacagccggaagtacgccagcaaagccaagaatctggcagacgatatggtgagaaacaccgctagagatctgctgtactacgccgtgacccaggatgccatgctgatcttcgccaacctgagccggggcttcggccggcagggcaagcggaccttcatggccgagagacagtacacacggatggaggactggctgaccgccaagctggcctacgagggcctgagcaagacctacctgtccaagacactggcccagtacacctccaagacatgcagcaactgtgggtttaccatcaccagcgccgactacgacagggtgctggagaagctgaagaagacagcaacaggctggatgaccacaattaacggcaaggagctgaaggtggagggccagattacctactacaacagatacaagagacagaacgtagtcaaggacctgtccgtcgagctggatagactgagcgaagaatctgtgaacaacgacatctcctcctggacaaagggcagaagcggagaagctctgagcctcctgaagaaaagattctcccatagacccgtgcaggagaagttcgtgtgcctgaactgcggcttcgagacacacgcagccgagcaagccgccctgaacatcgccagatcctggctgttcctgcggagccaggagtacaagaaataccagacaaacaagacaaccggcaacaccgataagagagccttcgtcgagacctggcagtccttttaccggaagaagcttaaggaggtgtggaaacctgccgtgcggtctggcggatctggcggaggctccacaagcaaggagaagctggtgaccttcgaggacgtggccgtgtacttcacccaggccgagtgggacggcctgagccccgcccagaggaccctgtacagggacgtgatgctggagaactacggcaacgtggccagcctgggcttccccctgctgaagcccgccgtgatcagccagctggagggcggcggcgagctgggcggccccagccccctggccgccggcaccggcctgtggggcctgaggaccggcaccagccccaagaaaaagagaaaagtctaagctgccttctgcggggcttgccttctggccatgcccttcttctctcccttgcacctgtacctcttggtctttgaataaagcctgagtaggaaggctagcaaaaaaaaaaaaaaaaaaaaaaaaaaaaaaaaaaaaaaaaaaaaaaaaaaaaaaaaaaaaaaaaaaaaaaaaaaaaaaaa

SEQ ID NO: 6824 - RNA, 5797 nt, synthetic construct
  source 1..5797: mol_type = other RNA
aggaaataagagagaaaagaagagtaagaagaaatataagagccaccatggcccctaagaagaagcgtaaagtgagccggatggaacgcctcgtctacgaggtgcggcagaagtgcagaaacatcgaggacatctgcatctcctgcggatctctgaacgtgaccctggagcacccactgttcatcggcggcatgtgccagaactgtaaaaactgttttctggagtgtgcctatcaatacgacgatgacggctaccagagctactgcaccatctgttgcggcggaagagaggtgctgatgtgtggaaataacaactgctgccggtgcttctgcgtggaatgcgtggacctgctggtgggccccggcgccgcccaggccgctattaaggaagatccttggaactgctacatgtgcggccacaagggcacatacggcctgctgagacggagagaggactggcctagcagactgcagatgttcttcgccaataaccacgaccaggagttcgacccccctaaggtgtaccctcccgtccccgccgagaagagaaagcccatccgggtcctgagcctgttcgatggcatcgccaccggtctgctggtgctgaaggacctgggcatccaggtggataggtacattgcctccgaggtgtgcgaggactccatcaccgtgggaatggtgcgtcatcagggcaagatcatgtacgtgggcgacgtgcggagcgtgacacagaagcatatccaggagtggggccctttcgacctggtgatcggcggcagcccttgcaatgacctgagcatcgtgaacccagcccggaagggcctgtacgagggaaccggcagactgttcttcgagttttacagactgctgcacgacgcccggcctaaggaaggcgacgaccggcccttcttttggctgttcgagaatgtggtggccatgggagtcagcgacaagcgggatattagccggttcctggagagcaaccccgtgatgatcgatgccaaggaagtgagcgccgcccaccgggccagatacttctggggcaatctgcctggcatgaacagacccctggccagcaccgtgaacgacaagctggagctgcaggagtgcctggagcacggccggatcgccaagttcagcaaggtgagaaccatcaccacccgaagcaacagcatcaaacaaggcaaggaccagcactttcctgtgttcatgaacgagaaggaggacatcctgtggtgtaccgagatggagagagtgttcgggttcccagtccactacacagatgtcagcaacatgtctagactggccagacagagactgctgggaagaagctggtccgtccctgtgatcagacacctgttcgcccctctgaaggagtacttcgcctgcgtgagcagcggcaacagcaacgccaacagccggggccccagcttctctagcggcctggtgccactgtccctgagagggagccacatgggccccatggagatctacaaaaccgtgagcgcctggaagcggcagcctgtgcgcgtgctgagcctgtttcggaatatcgataaagtcctgaaaagcctgggattcctggagagcggctctggctccggcggtggcaccctgaagtacgtggaggatgtgacaaacgtggtcagacgggatgtggagaagtggggccccttcgatctggtgtacggcagcacccaacccctgggcagctcttgtgaccggtgccctggctggtacatgtttcagttccaccggatcctgcagtacgccctgccgagacaggagtcccagcggccattcttttggattttcatggacaacttgctgctgaccgaggatgaccaggaaactaccactcggttcctgcagaccgaagccgtgaccctgcaggacgtgagaggccgggactaccagaacgccatgcgggtgtggtccaacatccctggactgaaaagcaagcacgcacctctgacccctaaagaagaggagtacctgcaggcccaggtgcggagcagaagcaagctggacgcccctaaggtggatctgctggtgaagaattgcctcctgcccctgagagagtacttcaagtatttcagccagaatagtctgcccctgggcggcccaagcagcggcgcccctcctcccagcggcggcagcccagccggctccccaacctctaccgaggagggcacctctgagtccgccacccccgagagcggccctggcacctccaccgagcccagcgagggcagcgcacccggcagccctgccggcagccccacctccacagaggagggaaccagcaccgagcccagcgaaggcagcgccccaggcaccagcaccgagcctagtgagggcggctctggcggcggcagcgcccaggagattaaacggatcaacaagatcagaagaagacttgtgaaagacagcaacaccaagaaggccggcaagacaggccccatgaaaaccctgctggttagagtgatgacacccgatctgagagagcggctggaaaacctgagaaagaagcctgaaaatatcccccagcccatcagcaatacatctagagccaacctgaataagctgctgaccgattacaccgaaatgaagaaggcgatcctgcatgtgtactgggaagagttccagaaggaccctgtgggcctgatgagccgggtggcccagcctgccagcaagaagatcgatcagaacaagctgaaacctgagatggacgagaagggcaacctgaccaccgccggctttgcctgctctcagtgtggccagcccctgttcgtgtacaagctggagcaggtgtctgagaagggcaaggcttacaccaactacttcggacggtgcaatgtggccgagcacgaaaagctgatcctgctggcccagctgaagcccgagaaggatagcgacgaagccgtgacatatagcctgggaaagtttgggcagagggccctggatttctacagcattcatgtgaccaaggagtccacccaccccgtgaagcccctggcccagatcgccggaaacagatacgcctccggacctgtgggaaaggccctgagcgacgcatgtatgggcacaatcgcctccttcctgtctaagtaccaggacatcatcatcgaacaccagaaggtggtgaagggcaaccagaagagactggagagcctgcgggagctggccggcaaggaaaacctggaataccctagcgtgaccctgccacctcagcctcacaccaaggagggcgttgatgcctacaacgaagtgatcgcccgggtgcgaatgtgggtgaacctgaacctgtggcagaagctgaagctaagcagagatgatgccaagcctctgctgagactgaagggattcccttcctttcctctggtcgagagacaggccaacgaagtggactggtgggacatggtgtgtaacgtgaagaagctgatcaacgagaaaaaggaggatggcaaggtgttttggcagaatctggctggctacaagagacaggaagccctgagaccatacctgagcagcgaggaagatcggaagaagggaaagaaattcgctcggtaccagctgggcgacctgctgctgcacctggaaaagaagcacggcgaggactggggaaaggtgtacgacgaggcctgggagcggattgacaagaaagtggaaggcctgagcaagcacatcaagctggaagaggaacggagaagcgaggacgcccagagcaaggccgccctgaccgactggctgcgggctaaggccagcttcgtgatcgagggcctgaaggaggccgacaaggacgagttctgcagatgcgagctgaagctgcagaagtggtacggggacctgcggggaaagcccttcgccatcgaagccgagaacagcatcctggacatcagcggcttcagcaagcagtacaactgtgccttcatctggcagaaggacggcgtgaagaagctgaacctgtacctgatcatcaactacttcaagggcggcaagctgcggttcaagaagatcaaacctgaagccttcgaagccaacagattctacaccgtgatcaacaaaaagagcggcgagatcgtgcccatggaggtgaacttcaacttcgacgaccccaacctgatcatcctgcctctggcctttggcaagagacagggcagagaattcatctggaacgacctgctgtccctggaaaccggcagcctgaagctggccaacggaagagtgatcgagaagacactgtacaacagaagaacccggcaggatgagcctgccctgttcgtggccctgaccttcgagcggcgggaggtcctggactcctccaatatcaaaccaatgaacctgatcggcgtggcaagaggcgaaaacatccccgccgtgatcgccctgaccgaccccgagggctgcccactgagccggtttaaggatagcctgggaaacccaacccacatcctgagaatcggcgagagctataaggagaagcagcggaccatccaggccaagaaggaggtggagcagcggagagccggcggctacagccggaagtacgccagcaaagccaagaatctggcagacgatatggtgagaaacaccgctagagatctgctgtactacgccgtgacccaggatgccatgctgatcttcgccaacctgagccggggcttcggccggcagggcaagcggaccttcatggccgagagacagtacacacggatggaggactggctgaccgccaagctggcctacgagggcctgagcaagacctacctgtccaagacactggcccagtacacctccaagacatgcagcaactgtgggtttaccatcaccagcgccgactacgacagggtgctggagaagctgaagaagacagcaacaggctggatgaccacaattaacggcaaggagctgaaggtggagggccagattacctactacaacagatacaagagacagaacgtagtcaaggacctgtccgtcgagctggatagactgagcgaagaatctgtgaacaacgacatctcctcctggacaaagggcagaagcggagaagctctgagcctcctgaagaaaagattctcccatagacccgtgcaggagaagttcgtgtgcctgaactgcggcttcgagacacacgcagccgagcaagccgccctgaacatcgccagatcctggctgttcctgcggagccaggagtacaagaaataccagacaaacaagacaaccggcaacaccgataagagagccttcgtcgagacctggcagtccttttaccggaagaagcttaaggaggtgtggaaacctgccgtgcggtctggcggatctggcggaggctccacaagcaagcccggcgccctgagcttcgccgacgtggccgtgtacttcagcagcgaggagtggggctgcctgaggcccgcccagagggccctgtacagggacgtgatgagggagacctacggccacctgggcgccctgggctgcgccggccccaagcccgccctgatcagctggctggagaggaacaccgacgactgggagcccgccgccctggacccccaggagtgccccaggggcgtggccgtgcagaccagccccaagaaaaagagaaaagtctaagctgccttctgcggggcttgccttctggccatgcccttcttctctcccttgcacctgtacctcttggtctttgaataaagcctgagtaggaaggctagcaaaaaaaaaaaaaaaaaaaaaaaaaaaaaaaaaaaaaaaaaaaaaaaaaaaaaaaaaaaaaaaaaaaaaaaaaaaaaaaa

SEQ ID NO: 6825 - RNA, 5797 nt, synthetic construct
  source 1..5797: mol_type = other RNA
aggaaataagagagaaaagaagagtaagaagaaatataagagccaccatggcccctaagaagaagcgtaaagtgagccggatggaacgcctcgtctacgaggtgcggcagaagtgcagaaacatcgaggacatctgcatctcctgcggatctctgaacgtgaccctggagcacccactgttcatcggcggcatgtgccagaactgtaaaaactgttttctggagtgtgcctatcaatacgacgatgacggctaccagagctactgcaccatctgttgcggcggaagagaggtgctgatgtgtggaaataacaactgctgccggtgcttctgcgtggaatgcgtggacctgctggtgggccccggcgccgcccaggccgctattaaggaagatccttggaactgctacatgtgcggccacaagggcacatacggcctgctgagacggagagaggactggcctagcagactgcagatgttcttcgccaataaccacgaccaggagttcgacccccctaaggtgtaccctcccgtccccgccgagaagagaaagcccatccgggtcctgagcctgttcgatggcatcgccaccggtctgctggtgctgaaggacctgggcatccaggtggataggtacattgcctccgaggtgtgcgaggactccatcaccgtgggaatggtgcgtcatcagggcaagatcatgtacgtgggcgacgtgcggagcgtgacacagaagcatatccaggagtggggccctttcgacctggtgatcggcggcagcccttgcaatgacctgagcatcgtgaacccagcccggaagggcctgtacgagggaaccggcagactgttcttcgagttttacagactgctgcacgacgcccggcctaaggaaggcgacgaccggcccttcttttggctgttcgagaatgtggtggccatgggagtcagcgacaagcgggatattagccggttcctggagagcaaccccgtgatgatcgatgccaaggaagtgagcgccgcccaccgggccagatacttctggggcaatctgcctggcatgaacagacccctggccagcaccgtgaacgacaagctggagctgcaggagtgcctggagcacggccggatcgccaagttcagcaaggtgagaaccatcaccacccgaagcaacagcatcaaacaaggcaaggaccagcactttcctgtgttcatgaacgagaaggaggacatcctgtggtgtaccgagatggagagagtgttcgggttcccagtccactacacagatgtcagcaacatgtctagactggccagacagagactgctgggaagaagctggtccgtccctgtgatcagacacctgttcgcccctctgaaggagtacttcgcctgcgtgagcagcggcaacagcaacgccaacagccggggccccagcttctctagcggcctggtgccactgtccctgagagggagccacatgggccccatggagatctacaaaaccgtgagcgcctggaagcggcagcctgtgcgcgtgctgagcctgtttcggaatatcgataaagtcctgaaaagcctgggattcctggagagcggctctggctccggcggtggcaccctgaagtacgtggaggatgtgacaaacgtggtcagacgggatgtggagaagtggggccccttcgatctggtgtacggcagcacccaacccctgggcagctcttgtgaccggtgccctggctggtacatgtttcagttccaccggatcctgcagtacgccctgccgagacaggagtcccagcggccattcttttggattttcatggacaacttgctgctgaccgaggatgaccaggaaactaccactcggttcctgcagaccgaagccgtgaccctgcaggacgtgagaggccgggactaccagaacgccatgcgggtgtggtccaacatccctggactgaaaagcaagcacgcacctctgacccctaaagaagaggagtacctgcaggcccaggtgcggagcagaagcaagctggacgcccctaaggtggatctgctggtgaagaattgcctcctgcccctgagagagtacttcaagtatttcagccagaatagtctgcccctgggcggcccaagcagcggcgcccctcctcccagcggcggcagcccagccggctccccaacctctaccgaggagggcacctctgagtccgccacccccgagagcggccctggcacctccaccgagcccagcgagggcagcgcacccggcagccctgccggcagccccacctccacagaggagggaaccagcaccgagcccagcgaaggcagcgccccaggcaccagcaccgagcctagtgagggcggctctggcggcggcagcgcccaggagattaaacggatcaacaagatcagaagaagacttgtgaaagacagcaacaccaagaaggccggcaagacaggccccatgaaaaccctgctggttagagtgatgacacccgatctgagagagcggctggaaaacctgagaaagaagcctgaaaatatcccccagcccatcagcaatacatctagagccaacctgaataagctgctgaccgattacaccgaaatgaagaaggcgatcctgcatgtgtactgggaagagttccagaaggaccctgtgggcctgatgagccgggtggcccagcctgccagcaagaagatcgatcagaacaagctgaaacctgagatggacgagaagggcaacctgaccaccgccggctttgcctgctctcagtgtggccagcccctgttcgtgtacaagctggagcaggtgtctgagaagggcaaggcttacaccaactacttcggacggtgcaatgtggccgagcacgaaaagctgatcctgctggcccagctgaagcccgagaaggatagcgacgaagccgtgacatatagcctgggaaagtttgggcagagggccctggatttctacagcattcatgtgaccaaggagtccacccaccccgtgaagcccctggcccagatcgccggaaacagatacgcctccggacctgtgggaaaggccctgagcgacgcatgtatgggcacaatcgcctccttcctgtctaagtaccaggacatcatcatcgaacaccagaaggtggtgaagggcaaccagaagagactggagagcctgcgggagctggccggcaaggaaaacctggaataccctagcgtgaccctgccacctcagcctcacaccaaggagggcgttgatgcctacaacgaagtgatcgcccgggtgcgaatgtgggtgaacctgaacctgtggcagaagctgaagctaagcagagatgatgccaagcctctgctgagactgaagggattcccttcctttcctctggtcgagagacaggccaacgaagtggactggtgggacatggtgtgtaacgtgaagaagctgatcaacgagaaaaaggaggatggcaaggtgttttggcagaatctggctggctacaagagacaggaagccctgagaccatacctgagcagcgaggaagatcggaagaagggaaagaaattcgctcggtaccagctgggcgacctgctgctgcacctggaaaagaagcacggcgaggactggggaaaggtgtacgacgaggcctgggagcggattgacaagaaagtggaaggcctgagcaagcacatcaagctggaagaggaacggagaagcgaggacgcccagagcaaggccgccctgaccgactggctgcgggctaaggccagcttcgtgatcgagggcctgaaggaggccgacaaggacgagttctgcagatgcgagctgaagctgcagaagtggtacggggacctgcggggaaagcccttcgccatcgaagccgagaacagcatcctggacatcagcggcttcagcaagcagtacaactgtgccttcatctggcagaaggacggcgtgaagaagctgaacctgtacctgatcatcaactacttcaagggcggcaagctgcggttcaagaagatcaaacctgaagccttcgaagccaacagattctacaccgtgatcaacaaaaagagcggcgagatcgtgcccatggaggtgaacttcaacttcgacgaccccaacctgatcatcctgcctctggcctttggcaagagacagggcagagaattcatctggaacgacctgctgtccctggaaaccggcagcctgaagctggccaacggaagagtgatcgagaagacactgtacaacagaagaacccggcaggatgagcctgccctgttcgtggccctgaccttcgagcggcgggaggtcctggactcctccaatatcaaaccaatgaacctgatcggcgtggcaagaggcgaaaacatccccgccgtgatcgccctgaccgaccccgagggctgcccactgagccggtttaaggatagcctgggaaacccaacccacatcctgagaatcggcgagagctataaggagaagcagcggaccatccaggccaagaaggaggtggagcagcggagagccggcggctacagccggaagtacgccagcaaagccaagaatctggcagacgatatggtgagaaacaccgctagagatctgctgtactacgccgtgacccaggatgccatgctgatcttcgccaacctgagccggggcttcggccggcagggcaagcggaccttcatggccgagagacagtacacacggatggaggactggctgaccgccaagctggcctacgagggcctgagcaagacctacctgtccaagacactggcccagtacacctccaagacatgcagcaactgtgggtttaccatcaccagcgccgactacgacagggtgctggagaagctgaagaagacagcaacaggctggatgaccacaattaacggcaaggagctgaaggtggagggccagattacctactacaacagatacaagagacagaacgtagtcaaggacctgtccgtcgagctggatagactgagcgaagaatctgtgaacaacgacatctcctcctggacaaagggcagaagcggagaagctctgagcctcctgaagaaaagattctcccatagacccgtgcaggagaagttcgtgtgcctgaactgcggcttcgagacacacgcagccgagcaagccgccctgaacatcgccagatcctggctgttcctgcggagccaggagtacaagaaataccagacaaacaagacaaccggcaacaccgataagagagccttcgtcgagacctggcagtccttttaccggaagaagcttaaggaggtgtggaaacctgccgtgcggtctggcggatctggcggaggctccacaagcaagcccggcaccgtgagcttcgccgacgtggccgtgtacttcagccccgaggagtggaggtacctgaggcccgcccagagggccctgtacagggaggtgatgagggagacctacggcctgctgacctacctggacgtgggctgcgccaagcccgccctgatcagctgggtggaggaggagagcgaggtgtggggccccggcgcccaggaccccgaggtggccatgtgcaggaccgaggtgcacaccagccccaagaaaaagagaaaagtctaagctgccttctgcggggcttgccttctggccatgcccttcttctctcccttgcacctgtacctcttggtctttgaataaagcctgagtaggaaggctagcaaaaaaaaaaaaaaaaaaaaaaaaaaaaaaaaaaaaaaaaaaaaaaaaaaaaaaaaaaaaaaaaaaaaaaaaaaaaaaaa

SEQ ID NO: 6826 - RNA, 5797 nt, synthetic construct
  source 1..5797: mol_type = other RNA
aggaaataagagagaaaagaagagtaagaagaaatataagagccaccatggcccctaagaagaagcgtaaagtgagccggatggaacgcctcgtctacgaggtgcggcagaagtgcagaaacatcgaggacatctgcatctcctgcggatctctgaacgtgaccctggagcacccactgttcatcggcggcatgtgccagaactgtaaaaactgttttctggagtgtgcctatcaatacgacgatgacggctaccagagctactgcaccatctgttgcggcggaagagaggtgctgatgtgtggaaataacaactgctgccggtgcttctgcgtggaatgcgtggacctgctggtgggccccggcgccgcccaggccgctattaaggaagatccttggaactgctacatgtgcggccacaagggcacatacggcctgctgagacggagagaggactggcctagcagactgcagatgttcttcgccaataaccacgaccaggagttcgacccccctaaggtgtaccctcccgtccccgccgagaagagaaagcccatccgggtcctgagcctgttcgatggcatcgccaccggtctgctggtgctgaaggacctgggcatccaggtggataggtacattgcctccgaggtgtgcgaggactccatcaccgtgggaatggtgcgtcatcagggcaagatcatgtacgtgggcgacgtgcggagcgtgacacagaagcatatccaggagtggggccctttcgacctggtgatcggcggcagcccttgcaatgacctgagcatcgtgaacccagcccggaagggcctgtacgagggaaccggcagactgttcttcgagttttacagactgctgcacgacgcccggcctaaggaaggcgacgaccggcccttcttttggctgttcgagaatgtggtggccatgggagtcagcgacaagcgggatattagccggttcctggagagcaaccccgtgatgatcgatgccaaggaagtgagcgccgcccaccgggccagatacttctggggcaatctgcctggcatgaacagacccctggccagcaccgtgaacgacaagctggagctgcaggagtgcctggagcacggccggatcgccaagttcagcaaggtgagaaccatcaccacccgaagcaacagcatcaaacaaggcaaggaccagcactttcctgtgttcatgaacgagaaggaggacatcctgtggtgtaccgagatggagagagtgttcgggttcccagtccactacacagatgtcagcaacatgtctagactggccagacagagactgctgggaagaagctggtccgtccctgtgatcagacacctgttcgcccctctgaaggagtacttcgcctgcgtgagcagcggcaacagcaacgccaacagccggggccccagcttctctagcggcctggtgccactgtccctgagagggagccacatgggccccatggagatctacaaaaccgtgagcgcctggaagcggcagcctgtgcgcgtgctgagcctgtttcggaatatcgataaagtcctgaaaagcctgggattcctggagagcggctctggctccggcggtggcaccctgaagtacgtggaggatgtgacaaacgtggtcagacgggatgtggagaagtggggccccttcgatctggtgtacggcagcacccaacccctgggcagctcttgtgaccggtgccctggctggtacatgtttcagttccaccggatcctgcagtacgccctgccgagacaggagtcccagcggccattcttttggattttcatggacaacttgctgctgaccgaggatgaccaggaaactaccactcggttcctgcagaccgaagccgtgaccctgcaggacgtgagaggccgggactaccagaacgccatgcgggtgtggtccaacatccctggactgaaaagcaagcacgcacctctgacccctaaagaagaggagtacctgcaggcccaggtgcggagcagaagcaagctggacgcccctaaggtggatctgctggtgaagaattgcctcctgcccctgagagagtacttcaagtatttcagccagaatagtctgcccctgggcggcccaagcagcggcgcccctcctcccagcggcggcagcccagccggctccccaacctctaccgaggagggcacctctgagtccgccacccccgagagcggccctggcacctccaccgagcccagcgagggcagcgcacccggcagccctgccggcagccccacctccacagaggagggaaccagcaccgagcccagcgaaggcagcgccccaggcaccagcaccgagcctagtgagggcggctctggcggcggcagcgcccaggagattaaacggatcaacaagatcagaagaagacttgtgaaagacagcaacaccaagaaggccggcaagacaggccccatgaaaaccctgctggttagagtgatgacacccgatctgagagagcggctggaaaacctgagaaagaagcctgaaaatatcccccagcccatcagcaatacatctagagccaacctgaataagctgctgaccgattacaccgaaatgaagaaggcgatcctgcatgtgtactgggaagagttccagaaggaccctgtgggcctgatgagccgggtggcccagcctgccagcaagaagatcgatcagaacaagctgaaacctgagatggacgagaagggcaacctgaccaccgccggctttgcctgctctcagtgtggccagcccctgttcgtgtacaagctggagcaggtgtctgagaagggcaaggcttacaccaactacttcggacggtgcaatgtggccgagcacgaaaagctgatcctgctggcccagctgaagcccgagaaggatagcgacgaagccgtgacatatagcctgggaaagtttgggcagagggccctggatttctacagcattcatgtgaccaaggagtccacccaccccgtgaagcccctggcccagatcgccggaaacagatacgcctccggacctgtgggaaaggccctgagcgacgcatgtatgggcacaatcgcctccttcctgtctaagtaccaggacatcatcatcgaacaccagaaggtggtgaagggcaaccagaagagactggagagcctgcgggagctggccggcaaggaaaacctggaataccctagcgtgaccctgccacctcagcctcacaccaaggagggcgttgatgcctacaacgaagtgatcgcccgggtgcgaatgtgggtgaacctgaacctgtggcagaagctgaagctaagcagagatgatgccaagcctctgctgagactgaagggattcccttcctttcctctggtcgagagacaggccaacgaagtggactggtgggacatggtgtgtaacgtgaagaagctgatcaacgagaaaaaggaggatggcaaggtgttttggcagaatctggctggctacaagagacaggaagccctgagaccatacctgagcagcgaggaagatcggaagaagggaaagaaattcgctcggtaccagctgggcgacctgctgctgcacctggaaaagaagcacggcgaggactggggaaaggtgtacgacgaggcctgggagcggattgacaagaaagtggaaggcctgagcaagcacatcaagctggaagaggaacggagaagcgaggacgcccagagcaaggccgccctgaccgactggctgcgggctaaggccagcttcgtgatcgagggcctgaaggaggccgacaaggacgagttctgcagatgcgagctgaagctgcagaagtggtacggggacctgcggggaaagcccttcgccatcgaagccgagaacagcatcctggacatcagcggcttcagcaagcagtacaactgtgccttcatctggcagaaggacggcgtgaagaagctgaacctgtacctgatcatcaactacttcaagggcggcaagctgcggttcaagaagatcaaacctgaagccttcgaagccaacagattctacaccgtgatcaacaaaaagagcggcgagatcgtgcccatggaggtgaacttcaacttcgacgaccccaacctgatcatcctgcctctggcctttggcaagagacagggcagagaattcatctggaacgacctgctgtccctggaaaccggcagcctgaagctggccaacggaagagtgatcgagaagacactgtacaacagaagaacccggcaggatgagcctgccctgttcgtggccctgaccttcgagcggcgggaggtcctggactcctccaatatcaaaccaatgaacctgatcggcgtggcaagaggcgaaaacatccccgccgtgatcgccctgaccgaccccgagggctgcccactgagccggtttaaggatagcctgggaaacccaacccacatcctgagaatcggcgagagctataaggagaagcagcggaccatccaggccaagaaggaggtggagcagcggagagccggcggctacagccggaagtacgccagcaaagccaagaatctggcagacgatatggtgagaaacaccgctagagatctgctgtactacgccgtgacccaggatgccatgctgatcttcgccaacctgagccggggcttcggccggcagggcaagcggaccttcatggccgagagacagtacacacggatggaggactggctgaccgccaagctggcctacgagggcctgagcaagacctacctgtccaagacactggcccagtacacctccaagacatgcagcaactgtgggtttaccatcaccagcgccgactacgacagggtgctggagaagctgaagaagacagcaacaggctggatgaccacaattaacggcaaggagctgaaggtggagggccagattacctactacaacagatacaagagacagaacgtagtcaaggacctgtccgtcgagctggatagactgagcgaagaatctgtgaacaacgacatctcctcctggacaaagggcagaagcggagaagctctgagcctcctgaagaaaagattctcccatagacccgtgcaggagaagttcgtgtgcctgaactgcggcttcgagacacacgcagccgagcaagccgccctgaacatcgccagatcctggctgttcctgcggagccaggagtacaagaaataccagacaaacaagacaaccggcaacaccgataagagagccttcgtcgagacctggcagtccttttaccggaagaagcttaaggaggtgtggaaacctgccgtgcggtctggcggatctggcggaggctccacaagcccccagaagctggtgaccttcgaggacgtggccgtgtacttcacccagaccgagtgggacggcctgagcaccgcccagagggccctgtacagggacgtgatgctggagaactacggcaacgtggccagcctgggcttccccctgctgaagcccgccgtgatcagccagctggagggcggcggcgagctggagggccccagcagcctggccagcggcgccggcaccggcccccagggcctgtggaccagccccaagaaaaagagaaaagtctaagctgccttctgcggggcttgccttctggccatgcccttcttctctcccttgcacctgtacctcttggtctttgaataaagcctgagtaggaaggctagcaaaaaaaaaaaaaaaaaaaaaaaaaaaaaaaaaaaaaaaaaaaaaaaaaaaaaaaaaaaaaaaaaaaaaaaaaaaaaaaa

SEQ ID NO: 6827 - RNA, 5797 nt, synthetic construct
  source 1..5797: mol_type = other RNA
aggaaataagagagaaaagaagagtaagaagaaatataagagccaccatggcccctaagaagaagcgtaaagtgagccggatggaacgcctcgtctacgaggtgcggcagaagtgcagaaacatcgaggacatctgcatctcctgcggatctctgaacgtgaccctggagcacccactgttcatcggcggcatgtgccagaactgtaaaaactgttttctggagtgtgcctatcaatacgacgatgacggctaccagagctactgcaccatctgttgcggcggaagagaggtgctgatgtgtggaaataacaactgctgccggtgcttctgcgtggaatgcgtggacctgctggtgggccccggcgccgcccaggccgctattaaggaagatccttggaactgctacatgtgcggccacaagggcacatacggcctgctgagacggagagaggactggcctagcagactgcagatgttcttcgccaataaccacgaccaggagttcgacccccctaaggtgtaccctcccgtccccgccgagaagagaaagcccatccgggtcctgagcctgttcgatggcatcgccaccggtctgctggtgctgaaggacctgggcatccaggtggataggtacattgcctccgaggtgtgcgaggactccatcaccgtgggaatggtgcgtcatcagggcaagatcatgtacgtgggcgacgtgcggagcgtgacacagaagcatatccaggagtggggccctttcgacctggtgatcggcggcagcccttgcaatgacctgagcatcgtgaacccagcccggaagggcctgtacgagggaaccggcagactgttcttcgagttttacagactgctgcacgacgcccggcctaaggaaggcgacgaccggcccttcttttggctgttcgagaatgtggtggccatgggagtcagcgacaagcgggatattagccggttcctggagagcaaccccgtgatgatcgatgccaaggaagtgagcgccgcccaccgggccagatacttctggggcaatctgcctggcatgaacagacccctggccagcaccgtgaacgacaagctggagctgcaggagtgcctggagcacggccggatcgccaagttcagcaaggtgagaaccatcaccacccgaagcaacagcatcaaacaaggcaaggaccagcactttcctgtgttcatgaacgagaaggaggacatcctgtggtgtaccgagatggagagagtgttcgggttcccagtccactacacagatgtcagcaacatgtctagactggccagacagagactgctgggaagaagctggtccgtccctgtgatcagacacctgttcgcccctctgaaggagtacttcgcctgcgtgagcagcggcaacagcaacgccaacagccggggccccagcttctctagcggcctggtgccactgtccctgagagggagccacatgggccccatggagatctacaaaaccgtgagcgcctggaagcggcagcctgtgcgcgtgctgagcctgtttcggaatatcgataaagtcctgaaaagcctgggattcctggagagcggctctggctccggcggtggcaccctgaagtacgtggaggatgtgacaaacgtggtcagacgggatgtggagaagtggggccccttcgatctggtgtacggcagcacccaacccctgggcagctcttgtgaccggtgccctggctggtacatgtttcagttccaccggatcctgcagtacgccctgccgagacaggagtcccagcggccattcttttggattttcatggacaacttgctgctgaccgaggatgaccaggaaactaccactcggttcctgcagaccgaagccgtgaccctgcaggacgtgagaggccgggactaccagaacgccatgcgggtgtggtccaacatccctggactgaaaagcaagcacgcacctctgacccctaaagaagaggagtacctgcaggcccaggtgcggagcagaagcaagctggacgcccctaaggtggatctgctggtgaagaattgcctcctgcccctgagagagtacttcaagtatttcagccagaatagtctgcccctgggcggcccaagcagcggcgcccctcctcccagcggcggcagcccagccggctccccaacctctaccgaggagggcacctctgagtccgccacccccgagagcggccctggcacctccaccgagcccagcgagggcagcgcacccggcagccctgccggcagccccacctccacagaggagggaaccagcaccgagcccagcgaaggcagcgccccaggcaccagcaccgagcctagtgagggcggctctggcggcggcagcgcccaggagattaaacggatcaacaagatcagaagaagacttgtgaaagacagcaacaccaagaaggccggcaagacaggccccatgaaaaccctgctggttagagtgatgacacccgatctgagagagcggctggaaaacctgagaaagaagcctgaaaatatcccccagcccatcagcaatacatctagagccaacctgaataagctgctgaccgattacaccgaaatgaagaaggcgatcctgcatgtgtactgggaagagttccagaaggaccctgtgggcctgatgagccgggtggcccagcctgccagcaagaagatcgatcagaacaagctgaaacctgagatggacgagaagggcaacctgaccaccgccggctttgcctgctctcagtgtggccagcccctgttcgtgtacaagctggagcaggtgtctgagaagggcaaggcttacaccaactacttcggacggtgcaatgtggccgagcacgaaaagctgatcctgctggcccagctgaagcccgagaaggatagcgacgaagccgtgacatatagcctgggaaagtttgggcagagggccctggatttctacagcattcatgtgaccaaggagtccacccaccccgtgaagcccctggcccagatcgccggaaacagatacgcctccggacctgtgggaaaggccctgagcgacgcatgtatgggcacaatcgcctccttcctgtctaagtaccaggacatcatcatcgaacaccagaaggtggtgaagggcaaccagaagagactggagagcctgcgggagctggccggcaaggaaaacctggaataccctagcgtgaccctgccacctcagcctcacaccaaggagggcgttgatgcctacaacgaagtgatcgcccgggtgcgaatgtgggtgaacctgaacctgtggcagaagctgaagctaagcagagatgatgccaagcctctgctgagactgaagggattcccttcctttcctctggtcgagagacaggccaacgaagtggactggtgggacatggtgtgtaacgtgaagaagctgatcaacgagaaaaaggaggatggcaaggtgttttggcagaatctggctggctacaagagacaggaagccctgagaccatacctgagcagcgaggaagatcggaagaagggaaagaaattcgctcggtaccagctgggcgacctgctgctgcacctggaaaagaagcacggcgaggactggggaaaggtgtacgacgaggcctgggagcggattgacaagaaagtggaaggcctgagcaagcacatcaagctggaagaggaacggagaagcgaggacgcccagagcaaggccgccctgaccgactggctgcgggctaaggccagcttcgtgatcgagggcctgaaggaggccgacaaggacgagttctgcagatgcgagctgaagctgcagaagtggtacggggacctgcggggaaagcccttcgccatcgaagccgagaacagcatcctggacatcagcggcttcagcaagcagtacaactgtgccttcatctggcagaaggacggcgtgaagaagctgaacctgtacctgatcatcaactacttcaagggcggcaagctgcggttcaagaagatcaaacctgaagccttcgaagccaacagattctacaccgtgatcaacaaaaagagcggcgagatcgtgcccatggaggtgaacttcaacttcgacgaccccaacctgatcatcctgcctctggcctttggcaagagacagggcagagaattcatctggaacgacctgctgtccctggaaaccggcagcctgaagctggccaacggaagagtgatcgagaagacactgtacaacagaagaacccggcaggatgagcctgccctgttcgtggccctgaccttcgagcggcgggaggtcctggactcctccaatatcaaaccaatgaacctgatcggcgtggcaagaggcgaaaacatccccgccgtgatcgccctgaccgaccccgagggctgcccactgagccggtttaaggatagcctgggaaacccaacccacatcctgagaatcggcgagagctataaggagaagcagcggaccatccaggccaagaaggaggtggagcagcggagagccggcggctacagccggaagtacgccagcaaagccaagaatctggcagacgatatggtgagaaacaccgctagagatctgctgtactacgccgtgacccaggatgccatgctgatcttcgccaacctgagccggggcttcggccggcagggcaagcggaccttcatggccgagagacagtacacacggatggaggactggctgaccgccaagctggcctacgagggcctgagcaagacctacctgtccaagacactggcccagtacacctccaagacatgcagcaactgtgggtttaccatcaccagcgccgactacgacagggtgctggagaagctgaagaagacagcaacaggctggatgaccacaattaacggcaaggagctgaaggtggagggccagattacctactacaacagatacaagagacagaacgtagtcaaggacctgtccgtcgagctggatagactgagcgaagaatctgtgaacaacgacatctcctcctggacaaagggcagaagcggagaagctctgagcctcctgaagaaaagattctcccatagacccgtgcaggagaagttcgtgtgcctgaactgcggcttcgagacacacgcagccgagcaagccgccctgaacatcgccagatcctggctgttcctgcggagccaggagtacaagaaataccagacaaacaagacaaccggcaacaccgataagagagccttcgtcgagacctggcagtccttttaccggaagaagcttaaggaggtgtggaaacctgccgtgcggtctggcggatctggcggaggctccacaagcgcccaggagcccctgaccttccacgacgtggccgtggacttcacctgggaggagtggcagctgctggaccccgagcagaaggacctgtacagggacgtgatgctggagacctacagccacctggtgagcgtgggctacgaggccagcaagcccgacatcctgagcaagctggaccacggcgaggccccctggaccgtggccggcgagatccactgcggcacccacagcgagatctggaagaggaccagccccaagaaaaagagaaaagtctaagctgccttctgcggggcttgccttctggccatgcccttcttctctcccttgcacctgtacctcttggtctttgaataaagcctgagtaggaaggctagcaaaaaaaaaaaaaaaaaaaaaaaaaaaaaaaaaaaaaaaaaaaaaaaaaaaaaaaaaaaaaaaaaaaaaaaaaaaaaaaa

SEQ ID NO: 6828 - RNA, 5797 nt, synthetic construct
  source 1..5797: mol_type = other RNA
aggaaataagagagaaaagaagagtaagaagaaatataagagccaccatggcccctaagaagaagcgtaaagtgagccggatggaacgcctcgtctacgaggtgcggcagaagtgcagaaacatcgaggacatctgcatctcctgcggatctctgaacgtgaccctggagcacccactgttcatcggcggcatgtgccagaactgtaaaaactgttttctggagtgtgcctatcaatacgacgatgacggctaccagagctactgcaccatctgttgcggcggaagagaggtgctgatgtgtggaaataacaactgctgccggtgcttctgcgtggaatgcgtggacctgctggtgggccccggcgccgcccaggccgctattaaggaagatccttggaactgctacatgtgcggccacaagggcacatacggcctgctgagacggagagaggactggcctagcagactgcagatgttcttcgccaataaccacgaccaggagttcgacccccctaaggtgtaccctcccgtccccgccgagaagagaaagcccatccgggtcctgagcctgttcgatggcatcgccaccggtctgctggtgctgaaggacctgggcatccaggtggataggtacattgcctccgaggtgtgcgaggactccatcaccgtgggaatggtgcgtcatcagggcaagatcatgtacgtgggcgacgtgcggagcgtgacacagaagcatatccaggagtggggccctttcgacctggtgatcggcggcagcccttgcaatgacctgagcatcgtgaacccagcccggaagggcctgtacgagggaaccggcagactgttcttcgagttttacagactgctgcacgacgcccggcctaaggaaggcgacgaccggcccttcttttggctgttcgagaatgtggtggccatgggagtcagcgacaagcgggatattagccggttcctggagagcaaccccgtgatgatcgatgccaaggaagtgagcgccgcccaccgggccagatacttctggggcaatctgcctggcatgaacagacccctggccagcaccgtgaacgacaagctggagctgcaggagtgcctggagcacggccggatcgccaagttcagcaaggtgagaaccatcaccacccgaagcaacagcatcaaacaaggcaaggaccagcactttcctgtgttcatgaacgagaaggaggacatcctgtggtgtaccgagatggagagagtgttcgggttcccagtccactacacagatgtcagcaacatgtctagactggccagacagagactgctgggaagaagctggtccgtccctgtgatcagacacctgttcgcccctctgaaggagtacttcgcctgcgtgagcagcggcaacagcaacgccaacagccggggccccagcttctctagcggcctggtgccactgtccctgagagggagccacatgggccccatggagatctacaaaaccgtgagcgcctggaagcggcagcctgtgcgcgtgctgagcctgtttcggaatatcgataaagtcctgaaaagcctgggattcctggagagcggctctggctccggcggtggcaccctgaagtacgtggaggatgtgacaaacgtggtcagacgggatgtggagaagtggggccccttcgatctggtgtacggcagcacccaacccctgggcagctcttgtgaccggtgccctggctggtacatgtttcagttccaccggatcctgcagtacgccctgccgagacaggagtcccagcggccattcttttggattttcatggacaacttgctgctgaccgaggatgaccaggaaactaccactcggttcctgcagaccgaagccgtgaccctgcaggacgtgagaggccgggactaccagaacgccatgcgggtgtggtccaacatccctggactgaaaagcaagcacgcacctctgacccctaaagaagaggagtacctgcaggcccaggtgcggagcagaagcaagctggacgcccctaaggtggatctgctggtgaagaattgcctcctgcccctgagagagtacttcaagtatttcagccagaatagtctgcccctgggcggcccaagcagcggcgcccctcctcccagcggcggcagcccagccggctccccaacctctaccgaggagggcacctctgagtccgccacccccgagagcggccctggcacctccaccgagcccagcgagggcagcgcacccggcagccctgccggcagccccacctccacagaggagggaaccagcaccgagcccagcgaaggcagcgccccaggcaccagcaccgagcctagtgagggcggctctggcggcggcagcgcccaggagattaaacggatcaacaagatcagaagaagacttgtgaaagacagcaacaccaagaaggccggcaagacaggccccatgaaaaccctgctggttagagtgatgacacccgatctgagagagcggctggaaaacctgagaaagaagcctgaaaatatcccccagcccatcagcaatacatctagagccaacctgaataagctgctgaccgattacaccgaaatgaagaaggcgatcctgcatgtgtactgggaagagttccagaaggaccctgtgggcctgatgagccgggtggcccagcctgccagcaagaagatcgatcagaacaagctgaaacctgagatggacgagaagggcaacctgaccaccgccggctttgcctgctctcagtgtggccagcccctgttcgtgtacaagctggagcaggtgtctgagaagggcaaggcttacaccaactacttcggacggtgcaatgtggccgagcacgaaaagctgatcctgctggcccagctgaagcccgagaaggatagcgacgaagccgtgacatatagcctgggaaagtttgggcagagggccctggatttctacagcattcatgtgaccaaggagtccacccaccccgtgaagcccctggcccagatcgccggaaacagatacgcctccggacctgtgggaaaggccctgagcgacgcatgtatgggcacaatcgcctccttcctgtctaagtaccaggacatcatcatcgaacaccagaaggtggtgaagggcaaccagaagagactggagagcctgcgggagctggccggcaaggaaaacctggaataccctagcgtgaccctgccacctcagcctcacaccaaggagggcgttgatgcctacaacgaagtgatcgcccgggtgcgaatgtgggtgaacctgaacctgtggcagaagctgaagctaagcagagatgatgccaagcctctgctgagactgaagggattcccttcctttcctctggtcgagagacaggccaacgaagtggactggtgggacatggtgtgtaacgtgaagaagctgatcaacgagaaaaaggaggatggcaaggtgttttggcagaatctggctggctacaagagacaggaagccctgagaccatacctgagcagcgaggaagatcggaagaagggaaagaaattcgctcggtaccagctgggcgacctgctgctgcacctggaaaagaagcacggcgaggactggggaaaggtgtacgacgaggcctgggagcggattgacaagaaagtggaaggcctgagcaagcacatcaagctggaagaggaacggagaagcgaggacgcccagagcaaggccgccctgaccgactggctgcgggctaaggccagcttcgtgatcgagggcctgaaggaggccgacaaggacgagttctgcagatgcgagctgaagctgcagaagtggtacggggacctgcggggaaagcccttcgccatcgaagccgagaacagcatcctggacatcagcggcttcagcaagcagtacaactgtgccttcatctggcagaaggacggcgtgaagaagctgaacctgtacctgatcatcaactacttcaagggcggcaagctgcggttcaagaagatcaaacctgaagccttcgaagccaacagattctacaccgtgatcaacaaaaagagcggcgagatcgtgcccatggaggtgaacttcaacttcgacgaccccaacctgatcatcctgcctctggcctttggcaagagacagggcagagaattcatctggaacgacctgctgtccctggaaaccggcagcctgaagctggccaacggaagagtgatcgagaagacactgtacaacagaagaacccggcaggatgagcctgccctgttcgtggccctgaccttcgagcggcgggaggtcctggactcctccaatatcaaaccaatgaacctgatcggcgtggcaagaggcgaaaacatccccgccgtgatcgccctgaccgaccccgagggctgcccactgagccggtttaaggatagcctgggaaacccaacccacatcctgagaatcggcgagagctataaggagaagcagcggaccatccaggccaagaaggaggtggagcagcggagagccggcggctacagccggaagtacgccagcaaagccaagaatctggcagacgatatggtgagaaacaccgctagagatctgctgtactacgccgtgacccaggatgccatgctgatcttcgccaacctgagccggggcttcggccggcagggcaagcggaccttcatggccgagagacagtacacacggatggaggactggctgaccgccaagctggcctacgagggcctgagcaagacctacctgtccaagacactggcccagtacacctccaagacatgcagcaactgtgggtttaccatcaccagcgccgactacgacagggtgctggagaagctgaagaagacagcaacaggctggatgaccacaattaacggcaaggagctgaaggtggagggccagattacctactacaacagatacaagagacagaacgtagtcaaggacctgtccgtcgagctggatagactgagcgaagaatctgtgaacaacgacatctcctcctggacaaagggcagaagcggagaagctctgagcctcctgaagaaaagattctcccatagacccgtgcaggagaagttcgtgtgcctgaactgcggcttcgagacacacgcagccgagcaagccgccctgaacatcgccagatcctggctgttcctgcggagccaggagtacaagaaataccagacaaacaagacaaccggcaacaccgataagagagccttcgtcgagacctggcagtccttttaccggaagaagcttaaggaggtgtggaaacctgccgtgcggtctggcggatctggcggaggctccacaagcgccaggggcaagagcaagagcaaggcccccatcaccttcggcgacctggccatctacttcagccaggaggagtgggagtggctgagccccatccagaaggacctgtacgaggacgtgatgctggagaactacaggaacctggtgagcctgggcctgagcttcaggaggcccaacgtgatcaccctgctggagaagggcaaggccccctggatggtggagcccgtgaggaggaggagggcccccaccagccccaagaaaaagagaaaagtctaagctgccttctgcggggcttgccttctggccatgcccttcttctctcccttgcacctgtacctcttggtctttgaataaagcctgagtaggaaggctagcaaaaaaaaaaaaaaaaaaaaaaaaaaaaaaaaaaaaaaaaaaaaaaaaaaaaaaaaaaaaaaaaaaaaaaaaaaaaaaaa

SEQ ID NO: 6829 - RNA, 5797 nt, synthetic construct
  source 1..5797: mol_type = other RNA
aggaaataagagagaaaagaagagtaagaagaaatataagagccaccatggcccctaagaagaagcgtaaagtgagccggatggaacgcctcgtctacgaggtgcggcagaagtgcagaaacatcgaggacatctgcatctcctgcggatctctgaacgtgaccctggagcacccactgttcatcggcggcatgtgccagaactgtaaaaactgttttctggagtgtgcctatcaatacgacgatgacggctaccagagctactgcaccatctgttgcggcggaagagaggtgctgatgtgtggaaataacaactgctgccggtgcttctgcgtggaatgcgtggacctgctggtgggccccggcgccgcccaggccgctattaaggaagatccttggaactgctacatgtgcggccacaagggcacatacggcctgctgagacggagagaggactggcctagcagactgcagatgttcttcgccaataaccacgaccaggagttcgacccccctaaggtgtaccctcccgtccccgccgagaagagaaagcccatccgggtcctgagcctgttcgatggcatcgccaccggtctgctggtgctgaaggacctgggcatccaggtggataggtacattgcctccgaggtgtgcgaggactccatcaccgtgggaatggtgcgtcatcagggcaagatcatgtacgtgggcgacgtgcggagcgtgacacagaagcatatccaggagtggggccctttcgacctggtgatcggcggcagcccttgcaatgacctgagcatcgtgaacccagcccggaagggcctgtacgagggaaccggcagactgttcttcgagttttacagactgctgcacgacgcccggcctaaggaaggcgacgaccggcccttcttttggctgttcgagaatgtggtggccatgggagtcagcgacaagcgggatattagccggttcctggagagcaaccccgtgatgatcgatgccaaggaagtgagcgccgcccaccgggccagatacttctggggcaatctgcctggcatgaacagacccctggccagcaccgtgaacgacaagctggagctgcaggagtgcctggagcacggccggatcgccaagttcagcaaggtgagaaccatcaccacccgaagcaacagcatcaaacaaggcaaggaccagcactttcctgtgttcatgaacgagaaggaggacatcctgtggtgtaccgagatggagagagtgttcgggttcccagtccactacacagatgtcagcaacatgtctagactggccagacagagactgctgggaagaagctggtccgtccctgtgatcagacacctgttcgcccctctgaaggagtacttcgcctgcgtgagcagcggcaacagcaacgccaacagccggggccccagcttctctagcggcctggtgccactgtccctgagagggagccacatgggccccatggagatctacaaaaccgtgagcgcctggaagcggcagcctgtgcgcgtgctgagcctgtttcggaatatcgataaagtcctgaaaagcctgggattcctggagagcggctctggctccggcggtggcaccctgaagtacgtggaggatgtgacaaacgtggtcagacgggatgtggagaagtggggccccttcgatctggtgtacggcagcacccaacccctgggcagctcttgtgaccggtgccctggctggtacatgtttcagttccaccggatcctgcagtacgccctgccgagacaggagtcccagcggccattcttttggattttcatggacaacttgctgctgaccgaggatgaccaggaaactaccactcggttcctgcagaccgaagccgtgaccctgcaggacgtgagaggccgggactaccagaacgccatgcgggtgtggtccaacatccctggactgaaaagcaagcacgcacctctgacccctaaagaagaggagtacctgcaggcccaggtgcggagcagaagcaagctggacgcccctaaggtggatctgctggtgaagaattgcctcctgcccctgagagagtacttcaagtatttcagccagaatagtctgcccctgggcggcccaagcagcggcgcccctcctcccagcggcggcagcccagccggctccccaacctctaccgaggagggcacctctgagtccgccacccccgagagcggccctggcacctccaccgagcccagcgagggcagcgcacccggcagccctgccggcagccccacctccacagaggagggaaccagcaccgagcccagcgaaggcagcgccccaggcaccagcaccgagcctagtgagggcggctctggcggcggcagcgcccaggagattaaacggatcaacaagatcagaagaagacttgtgaaagacagcaacaccaagaaggccggcaagacaggccccatgaaaaccctgctggttagagtgatgacacccgatctgagagagcggctggaaaacctgagaaagaagcctgaaaatatcccccagcccatcagcaatacatctagagccaacctgaataagctgctgaccgattacaccgaaatgaagaaggcgatcctgcatgtgtactgggaagagttccagaaggaccctgtgggcctgatgagccgggtggcccagcctgccagcaagaagatcgatcagaacaagctgaaacctgagatggacgagaagggcaacctgaccaccgccggctttgcctgctctcagtgtggccagcccctgttcgtgtacaagctggagcaggtgtctgagaagggcaaggcttacaccaactacttcggacggtgcaatgtggccgagcacgaaaagctgatcctgctggcccagctgaagcccgagaaggatagcgacgaagccgtgacatatagcctgggaaagtttgggcagagggccctggatttctacagcattcatgtgaccaaggagtccacccaccccgtgaagcccctggcccagatcgccggaaacagatacgcctccggacctgtgggaaaggccctgagcgacgcatgtatgggcacaatcgcctccttcctgtctaagtaccaggacatcatcatcgaacaccagaaggtggtgaagggcaaccagaagagactggagagcctgcgggagctggccggcaaggaaaacctggaataccctagcgtgaccctgccacctcagcctcacaccaaggagggcgttgatgcctacaacgaagtgatcgcccgggtgcgaatgtgggtgaacctgaacctgtggcagaagctgaagctaagcagagatgatgccaagcctctgctgagactgaagggattcccttcctttcctctggtcgagagacaggccaacgaagtggactggtgggacatggtgtgtaacgtgaagaagctgatcaacgagaaaaaggaggatggcaaggtgttttggcagaatctggctggctacaagagacaggaagccctgagaccatacctgagcagcgaggaagatcggaagaagggaaagaaattcgctcggtaccagctgggcgacctgctgctgcacctggaaaagaagcacggcgaggactggggaaaggtgtacgacgaggcctgggagcggattgacaagaaagtggaaggcctgagcaagcacatcaagctggaagaggaacggagaagcgaggacgcccagagcaaggccgccctgaccgactggctgcgggctaaggccagcttcgtgatcgagggcctgaaggaggccgacaaggacgagttctgcagatgcgagctgaagctgcagaagtggtacggggacctgcggggaaagcccttcgccatcgaagccgagaacagcatcctggacatcagcggcttcagcaagcagtacaactgtgccttcatctggcagaaggacggcgtgaagaagctgaacctgtacctgatcatcaactacttcaagggcggcaagctgcggttcaagaagatcaaacctgaagccttcgaagccaacagattctacaccgtgatcaacaaaaagagcggcgagatcgtgcccatggaggtgaacttcaacttcgacgaccccaacctgatcatcctgcctctggcctttggcaagagacagggcagagaattcatctggaacgacctgctgtccctggaaaccggcagcctgaagctggccaacggaagagtgatcgagaagacactgtacaacagaagaacccggcaggatgagcctgccctgttcgtggccctgaccttcgagcggcgggaggtcctggactcctccaatatcaaaccaatgaacctgatcggcgtggcaagaggcgaaaacatccccgccgtgatcgccctgaccgaccccgagggctgcccactgagccggtttaaggatagcctgggaaacccaacccacatcctgagaatcggcgagagctataaggagaagcagcggaccatccaggccaagaaggaggtggagcagcggagagccggcggctacagccggaagtacgccagcaaagccaagaatctggcagacgatatggtgagaaacaccgctagagatctgctgtactacgccgtgacccaggatgccatgctgatcttcgccaacctgagccggggcttcggccggcagggcaagcggaccttcatggccgagagacagtacacacggatggaggactggctgaccgccaagctggcctacgagggcctgagcaagacctacctgtccaagacactggcccagtacacctccaagacatgcagcaactgtgggtttaccatcaccagcgccgactacgacagggtgctggagaagctgaagaagacagcaacaggctggatgaccacaattaacggcaaggagctgaaggtggagggccagattacctactacaacagatacaagagacagaacgtagtcaaggacctgtccgtcgagctggatagactgagcgaagaatctgtgaacaacgacatctcctcctggacaaagggcagaagcggagaagctctgagcctcctgaagaaaagattctcccatagacccgtgcaggagaagttcgtgtgcctgaactgcggcttcgagacacacgcagccgagcaagccgccctgaacatcgccagatcctggctgttcctgcggagccaggagtacaagaaataccagacaaacaagacaaccggcaacaccgataagagagccttcgtcgagacctggcagtccttttaccggaagaagcttaaggaggtgtggaaacctgccgtgcggtctggcggatctggcggaggctccacaagcggcctggtgagcttcgacgaggtgagcgtgcacttcaccaacgaggagtgggccctgctggaccccggccagagggccctgtacgaggaggtgatggaggagatcagggagatgatgaccagcgtgggcgacgtgagcgagttcctgaccgagggcgagcagagcgagcccagcagggagggcgccgaggagcagaaggagcagaggaagcagagggtgcaggtgggcacctacaggaaggagaccagccccaagaaaaagagaaaagtctaagctgccttctgcggggcttgccttctggccatgcccttcttctctcccttgcacctgtacctcttggtctttgaataaagcctgagtaggaaggctagcaaaaaaaaaaaaaaaaaaaaaaaaaaaaaaaaaaaaaaaaaaaaaaaaaaaaaaaaaaaaaaaaaaaaaaaaaaaaaaaa

SEQ ID NO: 6830 - RNA, 5797 nt, synthetic construct
  source 1..5797: mol_type = other RNA
aggaaataagagagaaaagaagagtaagaagaaatataagagccaccatggcccctaagaagaagcgtaaagtgagccggatggaacgcctcgtctacgaggtgcggcagaagtgcagaaacatcgaggacatctgcatctcctgcggatctctgaacgtgaccctggagcacccactgttcatcggcggcatgtgccagaactgtaaaaactgttttctggagtgtgcctatcaatacgacgatgacggctaccagagctactgcaccatctgttgcggcggaagagaggtgctgatgtgtggaaataacaactgctgccggtgcttctgcgtggaatgcgtggacctgctggtgggccccggcgccgcccaggccgctattaaggaagatccttggaactgctacatgtgcggccacaagggcacatacggcctgctgagacggagagaggactggcctagcagactgcagatgttcttcgccaataaccacgaccaggagttcgacccccctaaggtgtaccctcccgtccccgccgagaagagaaagcccatccgggtcctgagcctgttcgatggcatcgccaccggtctgctggtgctgaaggacctgggcatccaggtggataggtacattgcctccgaggtgtgcgaggactccatcaccgtgggaatggtgcgtcatcagggcaagatcatgtacgtgggcgacgtgcggagcgtgacacagaagcatatccaggagtggggccctttcgacctggtgatcggcggcagcccttgcaatgacctgagcatcgtgaacccagcccggaagggcctgtacgagggaaccggcagactgttcttcgagttttacagactgctgcacgacgcccggcctaaggaaggcgacgaccggcccttcttttggctgttcgagaatgtggtggccatgggagtcagcgacaagcgggatattagccggttcctggagagcaaccccgtgatgatcgatgccaaggaagtgagcgccgcccaccgggccagatacttctggggcaatctgcctggcatgaacagacccctggccagcaccgtgaacgacaagctggagctgcaggagtgcctggagcacggccggatcgccaagttcagcaaggtgagaaccatcaccacccgaagcaacagcatcaaacaaggcaaggaccagcactttcctgtgttcatgaacgagaaggaggacatcctgtggtgtaccgagatggagagagtgttcgggttcccagtccactacacagatgtcagcaacatgtctagactggccagacagagactgctgggaagaagctggtccgtccctgtgatcagacacctgttcgcccctctgaaggagtacttcgcctgcgtgagcagcggcaacagcaacgccaacagccggggccccagcttctctagcggcctggtgccactgtccctgagagggagccacatgggccccatggagatctacaaaaccgtgagcgcctggaagcggcagcctgtgcgcgtgctgagcctgtttcggaatatcgataaagtcctgaaaagcctgggattcctggagagcggctctggctccggcggtggcaccctgaagtacgtggaggatgtgacaaacgtggtcagacgggatgtggagaagtggggccccttcgatctggtgtacggcagcacccaacccctgggcagctcttgtgaccggtgccctggctggtacatgtttcagttccaccggatcctgcagtacgccctgccgagacaggagtcccagcggccattcttttggattttcatggacaacttgctgctgaccgaggatgaccaggaaactaccactcggttcctgcagaccgaagccgtgaccctgcaggacgtgagaggccgggactaccagaacgccatgcgggtgtggtccaacatccctggactgaaaagcaagcacgcacctctgacccctaaagaagaggagtacctgcaggcccaggtgcggagcagaagcaagctggacgcccctaaggtggatctgctggtgaagaattgcctcctgcccctgagagagtacttcaagtatttcagccagaatagtctgcccctgggcggcccaagcagcggcgcccctcctcccagcggcggcagcccagccggctccccaacctctaccgaggagggcacctctgagtccgccacccccgagagcggccctggcacctccaccgagcccagcgagggcagcgcacccggcagccctgccggcagccccacctccacagaggagggaaccagcaccgagcccagcgaaggcagcgccccaggcaccagcaccgagcctagtgagggcggctctggcggcggcagcgcccaggagattaaacggatcaacaagatcagaagaagacttgtgaaagacagcaacaccaagaaggccggcaagacaggccccatgaaaaccctgctggttagagtgatgacacccgatctgagagagcggctggaaaacctgagaaagaagcctgaaaatatcccccagcccatcagcaatacatctagagccaacctgaataagctgctgaccgattacaccgaaatgaagaaggcgatcctgcatgtgtactgggaagagttccagaaggaccctgtgggcctgatgagccgggtggcccagcctgccagcaagaagatcgatcagaacaagctgaaacctgagatggacgagaagggcaacctgaccaccgccggctttgcctgctctcagtgtggccagcccctgttcgtgtacaagctggagcaggtgtctgagaagggcaaggcttacaccaactacttcggacggtgcaatgtggccgagcacgaaaagctgatcctgctggcccagctgaagcccgagaaggatagcgacgaagccgtgacatatagcctgggaaagtttgggcagagggccctggatttctacagcattcatgtgaccaaggagtccacccaccccgtgaagcccctggcccagatcgccggaaacagatacgcctccggacctgtgggaaaggccctgagcgacgcatgtatgggcacaatcgcctccttcctgtctaagtaccaggacatcatcatcgaacaccagaaggtggtgaagggcaaccagaagagactggagagcctgcgggagctggccggcaaggaaaacctggaataccctagcgtgaccctgccacctcagcctcacaccaaggagggcgttgatgcctacaacgaagtgatcgcccgggtgcgaatgtgggtgaacctgaacctgtggcagaagctgaagctaagcagagatgatgccaagcctctgctgagactgaagggattcccttcctttcctctggtcgagagacaggccaacgaagtggactggtgggacatggtgtgtaacgtgaagaagctgatcaacgagaaaaaggaggatggcaaggtgttttggcagaatctggctggctacaagagacaggaagccctgagaccatacctgagcagcgaggaagatcggaagaagggaaagaaattcgctcggtaccagctgggcgacctgctgctgcacctggaaaagaagcacggcgaggactggggaaaggtgtacgacgaggcctgggagcggattgacaagaaagtggaaggcctgagcaagcacatcaagctggaagaggaacggagaagcgaggacgcccagagcaaggccgccctgaccgactggctgcgggctaaggccagcttcgtgatcgagggcctgaaggaggccgacaaggacgagttctgcagatgcgagctgaagctgcagaagtggtacggggacctgcggggaaagcccttcgccatcgaagccgagaacagcatcctggacatcagcggcttcagcaagcagtacaactgtgccttcatctggcagaaggacggcgtgaagaagctgaacctgtacctgatcatcaactacttcaagggcggcaagctgcggttcaagaagatcaaacctgaagccttcgaagccaacagattctacaccgtgatcaacaaaaagagcggcgagatcgtgcccatggaggtgaacttcaacttcgacgaccccaacctgatcatcctgcctctggcctttggcaagagacagggcagagaattcatctggaacgacctgctgtccctggaaaccggcagcctgaagctggccaacggaagagtgatcgagaagacactgtacaacagaagaacccggcaggatgagcctgccctgttcgtggccctgaccttcgagcggcgggaggtcctggactcctccaatatcaaaccaatgaacctgatcggcgtggcaagaggcgaaaacatccccgccgtgatcgccctgaccgaccccgagggctgcccactgagccggtttaaggatagcctgggaaacccaacccacatcctgagaatcggcgagagctataaggagaagcagcggaccatccaggccaagaaggaggtggagcagcggagagccggcggctacagccggaagtacgccagcaaagccaagaatctggcagacgatatggtgagaaacaccgctagagatctgctgtactacgccgtgacccaggatgccatgctgatcttcgccaacctgagccggggcttcggccggcagggcaagcggaccttcatggccgagagacagtacacacggatggaggactggctgaccgccaagctggcctacgagggcctgagcaagacctacctgtccaagacactggcccagtacacctccaagacatgcagcaactgtgggtttaccatcaccagcgccgactacgacagggtgctggagaagctgaagaagacagcaacaggctggatgaccacaattaacggcaaggagctgaaggtggagggccagattacctactacaacagatacaagagacagaacgtagtcaaggacctgtccgtcgagctggatagactgagcgaagaatctgtgaacaacgacatctcctcctggacaaagggcagaagcggagaagctctgagcctcctgaagaaaagattctcccatagacccgtgcaggagaagttcgtgtgcctgaactgcggcttcgagacacacgcagccgagcaagccgccctgaacatcgccagatcctggctgttcctgcggagccaggagtacaagaaataccagacaaacaagacaaccggcaacaccgataagagagccttcgtcgagacctggcagtccttttaccggaagaagcttaaggaggtgtggaaacctgccgtgcggtctggcggatctggcggaggctccacaagcgacagcatgagggtgaccttcgaggaggtggccgtgtacttcacccccggccagggcgccctgctgggccccgcccagagggccctgtacagggacgtgatgcaggagaactacgaggccgtgaccagcctgggcttccccgtgcccaagcccgagctgatcgccaggctggagaggggcgaggagccctgggtgcccgacctgcaggccagggaggagagggagatccccaggggcacctgcaccagccccaagaaaaagagaaaagtctaagctgccttctgcggggcttgccttctggccatgcccttcttctctcccttgcacctgtacctcttggtctttgaataaagcctgagtaggaaggctagcaaaaaaaaaaaaaaaaaaaaaaaaaaaaaaaaaaaaaaaaaaaaaaaaaaaaaaaaaaaaaaaaaaaaaaaaaaaaaaaa

SEQ ID NO: 6831 - RNA, 5797 nt, synthetic construct
  source 1..5797: mol_type = other RNA
aggaaataagagagaaaagaagagtaagaagaaatataagagccaccatggcccctaagaagaagcgtaaagtgagccggatggaacgcctcgtctacgaggtgcggcagaagtgcagaaacatcgaggacatctgcatctcctgcggatctctgaacgtgaccctggagcacccactgttcatcggcggcatgtgccagaactgtaaaaactgttttctggagtgtgcctatcaatacgacgatgacggctaccagagctactgcaccatctgttgcggcggaagagaggtgctgatgtgtggaaataacaactgctgccggtgcttctgcgtggaatgcgtggacctgctggtgggccccggcgccgcccaggccgctattaaggaagatccttggaactgctacatgtgcggccacaagggcacatacggcctgctgagacggagagaggactggcctagcagactgcagatgttcttcgccaataaccacgaccaggagttcgacccccctaaggtgtaccctcccgtccccgccgagaagagaaagcccatccgggtcctgagcctgttcgatggcatcgccaccggtctgctggtgctgaaggacctgggcatccaggtggataggtacattgcctccgaggtgtgcgaggactccatcaccgtgggaatggtgcgtcatcagggcaagatcatgtacgtgggcgacgtgcggagcgtgacacagaagcatatccaggagtggggccctttcgacctggtgatcggcggcagcccttgcaatgacctgagcatcgtgaacccagcccggaagggcctgtacgagggaaccggcagactgttcttcgagttttacagactgctgcacgacgcccggcctaaggaaggcgacgaccggcccttcttttggctgttcgagaatgtggtggccatgggagtcagcgacaagcgggatattagccggttcctggagagcaaccccgtgatgatcgatgccaaggaagtgagcgccgcccaccgggccagatacttctggggcaatctgcctggcatgaacagacccctggccagcaccgtgaacgacaagctggagctgcaggagtgcctggagcacggccggatcgccaagttcagcaaggtgagaaccatcaccacccgaagcaacagcatcaaacaaggcaaggaccagcactttcctgtgttcatgaacgagaaggaggacatcctgtggtgtaccgagatggagagagtgttcgggttcccagtccactacacagatgtcagcaacatgtctagactggccagacagagactgctgggaagaagctggtccgtccctgtgatcagacacctgttcgcccctctgaaggagtacttcgcctgcgtgagcagcggcaacagcaacgccaacagccggggccccagcttctctagcggcctggtgccactgtccctgagagggagccacatgggccccatggagatctacaaaaccgtgagcgcctggaagcggcagcctgtgcgcgtgctgagcctgtttcggaatatcgataaagtcctgaaaagcctgggattcctggagagcggctctggctccggcggtggcaccctgaagtacgtggaggatgtgacaaacgtggtcagacgggatgtggagaagtggggccccttcgatctggtgtacggcagcacccaacccctgggcagctcttgtgaccggtgccctggctggtacatgtttcagttccaccggatcctgcagtacgccctgccgagacaggagtcccagcggccattcttttggattttcatggacaacttgctgctgaccgaggatgaccaggaaactaccactcggttcctgcagaccgaagccgtgaccctgcaggacgtgagaggccgggactaccagaacgccatgcgggtgtggtccaacatccctggactgaaaagcaagcacgcacctctgacccctaaagaagaggagtacctgcaggcccaggtgcggagcagaagcaagctggacgcccctaaggtggatctgctggtgaagaattgcctcctgcccctgagagagtacttcaagtatttcagccagaatagtctgcccctgggcggcccaagcagcggcgcccctcctcccagcggcggcagcccagccggctccccaacctctaccgaggagggcacctctgagtccgccacccccgagagcggccctggcacctccaccgagcccagcgagggcagcgcacccggcagccctgccggcagccccacctccacagaggagggaaccagcaccgagcccagcgaaggcagcgccccaggcaccagcaccgagcctagtgagggcggctctggcggcggcagcgcccaggagattaaacggatcaacaagatcagaagaagacttgtgaaagacagcaacaccaagaaggccggcaagacaggccccatgaaaaccctgctggttagagtgatgacacccgatctgagagagcggctggaaaacctgagaaagaagcctgaaaatatcccccagcccatcagcaatacatctagagccaacctgaataagctgctgaccgattacaccgaaatgaagaaggcgatcctgcatgtgtactgggaagagttccagaaggaccctgtgggcctgatgagccgggtggcccagcctgccagcaagaagatcgatcagaacaagctgaaacctgagatggacgagaagggcaacctgaccaccgccggctttgcctgctctcagtgtggccagcccctgttcgtgtacaagctggagcaggtgtctgagaagggcaaggcttacaccaactacttcggacggtgcaatgtggccgagcacgaaaagctgatcctgctggcccagctgaagcccgagaaggatagcgacgaagccgtgacatatagcctgggaaagtttgggcagagggccctggatttctacagcattcatgtgaccaaggagtccacccaccccgtgaagcccctggcccagatcgccggaaacagatacgcctccggacctgtgggaaaggccctgagcgacgcatgtatgggcacaatcgcctccttcctgtctaagtaccaggacatcatcatcgaacaccagaaggtggtgaagggcaaccagaagagactggagagcctgcgggagctggccggcaaggaaaacctggaataccctagcgtgaccctgccacctcagcctcacaccaaggagggcgttgatgcctacaacgaagtgatcgcccgggtgcgaatgtgggtgaacctgaacctgtggcagaagctgaagctaagcagagatgatgccaagcctctgctgagactgaagggattcccttcctttcctctggtcgagagacaggccaacgaagtggactggtgggacatggtgtgtaacgtgaagaagctgatcaacgagaaaaaggaggatggcaaggtgttttggcagaatctggctggctacaagagacaggaagccctgagaccatacctgagcagcgaggaagatcggaagaagggaaagaaattcgctcggtaccagctgggcgacctgctgctgcacctggaaaagaagcacggcgaggactggggaaaggtgtacgacgaggcctgggagcggattgacaagaaagtggaaggcctgagcaagcacatcaagctggaagaggaacggagaagcgaggacgcccagagcaaggccgccctgaccgactggctgcgggctaaggccagcttcgtgatcgagggcctgaaggaggccgacaaggacgagttctgcagatgcgagctgaagctgcagaagtggtacggggacctgcggggaaagcccttcgccatcgaagccgagaacagcatcctggacatcagcggcttcagcaagcagtacaactgtgccttcatctggcagaaggacggcgtgaagaagctgaacctgtacctgatcatcaactacttcaagggcggcaagctgcggttcaagaagatcaaacctgaagccttcgaagccaacagattctacaccgtgatcaacaaaaagagcggcgagatcgtgcccatggaggtgaacttcaacttcgacgaccccaacctgatcatcctgcctctggcctttggcaagagacagggcagagaattcatctggaacgacctgctgtccctggaaaccggcagcctgaagctggccaacggaagagtgatcgagaagacactgtacaacagaagaacccggcaggatgagcctgccctgttcgtggccctgaccttcgagcggcgggaggtcctggactcctccaatatcaaaccaatgaacctgatcggcgtggcaagaggcgaaaacatccccgccgtgatcgccctgaccgaccccgagggctgcccactgagccggtttaaggatagcctgggaaacccaacccacatcctgagaatcggcgagagctataaggagaagcagcggaccatccaggccaagaaggaggtggagcagcggagagccggcggctacagccggaagtacgccagcaaagccaagaatctggcagacgatatggtgagaaacaccgctagagatctgctgtactacgccgtgacccaggatgccatgctgatcttcgccaacctgagccggggcttcggccggcagggcaagcggaccttcatggccgagagacagtacacacggatggaggactggctgaccgccaagctggcctacgagggcctgagcaagacctacctgtccaagacactggcccagtacacctccaagacatgcagcaactgtgggtttaccatcaccagcgccgactacgacagggtgctggagaagctgaagaagacagcaacaggctggatgaccacaattaacggcaaggagctgaaggtggagggccagattacctactacaacagatacaagagacagaacgtagtcaaggacctgtccgtcgagctggatagactgagcgaagaatctgtgaacaacgacatctcctcctggacaaagggcagaagcggagaagctctgagcctcctgaagaaaagattctcccatagacccgtgcaggagaagttcgtgtgcctgaactgcggcttcgagacacacgcagccgagcaagccgccctgaacatcgccagatcctggctgttcctgcggagccaggagtacaagaaataccagacaaacaagacaaccggcaacaccgataagagagccttcgtcgagacctggcagtccttttaccggaagaagcttaaggaggtgtggaaacctgccgtgcggtctggcggatctggcggaggctccacaagctgcttcagcggcgaggagaggatggccgccggccacccccccaggtggccccaggagctggtgaccttcgaggacgtgagcgtggacttcagccaggaggagtgggagctgctggaccccgcccagaaggagctgtacagggaggtgaccctggagaactacaggaacctggtgagcctggaggccctgaagaacccctgcgccgacgccggcatggaggagggccccttcagcaccgcccacaccagccccaagaaaaagagaaaagtctaagctgccttctgcggggcttgccttctggccatgcccttcttctctcccttgcacctgtacctcttggtctttgaataaagcctgagtaggaaggctagcaaaaaaaaaaaaaaaaaaaaaaaaaaaaaaaaaaaaaaaaaaaaaaaaaaaaaaaaaaaaaaaaaaaaaaaaaaaaaaaa

SEQ ID NO: 6832 - RNA, 5797 nt, synthetic construct
  source 1..5797: mol_type = other RNA
aggaaataagagagaaaagaagagtaagaagaaatataagagccaccatggcccctaagaagaagcgtaaagtgagccggatggaacgcctcgtctacgaggtgcggcagaagtgcagaaacatcgaggacatctgcatctcctgcggatctctgaacgtgaccctggagcacccactgttcatcggcggcatgtgccagaactgtaaaaactgttttctggagtgtgcctatcaatacgacgatgacggctaccagagctactgcaccatctgttgcggcggaagagaggtgctgatgtgtggaaataacaactgctgccggtgcttctgcgtggaatgcgtggacctgctggtgggccccggcgccgcccaggccgctattaaggaagatccttggaactgctacatgtgcggccacaagggcacatacggcctgctgagacggagagaggactggcctagcagactgcagatgttcttcgccaataaccacgaccaggagttcgacccccctaaggtgtaccctcccgtccccgccgagaagagaaagcccatccgggtcctgagcctgttcgatggcatcgccaccggtctgctggtgctgaaggacctgggcatccaggtggataggtacattgcctccgaggtgtgcgaggactccatcaccgtgggaatggtgcgtcatcagggcaagatcatgtacgtgggcgacgtgcggagcgtgacacagaagcatatccaggagtggggccctttcgacctggtgatcggcggcagcccttgcaatgacctgagcatcgtgaacccagcccggaagggcctgtacgagggaaccggcagactgttcttcgagttttacagactgctgcacgacgcccggcctaaggaaggcgacgaccggcccttcttttggctgttcgagaatgtggtggccatgggagtcagcgacaagcgggatattagccggttcctggagagcaaccccgtgatgatcgatgccaaggaagtgagcgccgcccaccgggccagatacttctggggcaatctgcctggcatgaacagacccctggccagcaccgtgaacgacaagctggagctgcaggagtgcctggagcacggccggatcgccaagttcagcaaggtgagaaccatcaccacccgaagcaacagcatcaaacaaggcaaggaccagcactttcctgtgttcatgaacgagaaggaggacatcctgtggtgtaccgagatggagagagtgttcgggttcccagtccactacacagatgtcagcaacatgtctagactggccagacagagactgctgggaagaagctggtccgtccctgtgatcagacacctgttcgcccctctgaaggagtacttcgcctgcgtgagcagcggcaacagcaacgccaacagccggggccccagcttctctagcggcctggtgccactgtccctgagagggagccacatgggccccatggagatctacaaaaccgtgagcgcctggaagcggcagcctgtgcgcgtgctgagcctgtttcggaatatcgataaagtcctgaaaagcctgggattcctggagagcggctctggctccggcggtggcaccctgaagtacgtggaggatgtgacaaacgtggtcagacgggatgtggagaagtggggccccttcgatctggtgtacggcagcacccaacccctgggcagctcttgtgaccggtgccctggctggtacatgtttcagttccaccggatcctgcagtacgccctgccgagacaggagtcccagcggccattcttttggattttcatggacaacttgctgctgaccgaggatgaccaggaaactaccactcggttcctgcagaccgaagccgtgaccctgcaggacgtgagaggccgggactaccagaacgccatgcgggtgtggtccaacatccctggactgaaaagcaagcacgcacctctgacccctaaagaagaggagtacctgcaggcccaggtgcggagcagaagcaagctggacgcccctaaggtggatctgctggtgaagaattgcctcctgcccctgagagagtacttcaagtatttcagccagaatagtctgcccctgggcggcccaagcagcggcgcccctcctcccagcggcggcagcccagccggctccccaacctctaccgaggagggcacctctgagtccgccacccccgagagcggccctggcacctccaccgagcccagcgagggcagcgcacccggcagccctgccggcagccccacctccacagaggagggaaccagcaccgagcccagcgaaggcagcgccccaggcaccagcaccgagcctagtgagggcggctctggcggcggcagcgcccaggagattaaacggatcaacaagatcagaagaagacttgtgaaagacagcaacaccaagaaggccggcaagacaggccccatgaaaaccctgctggttagagtgatgacacccgatctgagagagcggctggaaaacctgagaaagaagcctgaaaatatcccccagcccatcagcaatacatctagagccaacctgaataagctgctgaccgattacaccgaaatgaagaaggcgatcctgcatgtgtactgggaagagttccagaaggaccctgtgggcctgatgagccgggtggcccagcctgccagcaagaagatcgatcagaacaagctgaaacctgagatggacgagaagggcaacctgaccaccgccggctttgcctgctctcagtgtggccagcccctgttcgtgtacaagctggagcaggtgtctgagaagggcaaggcttacaccaactacttcggacggtgcaatgtggccgagcacgaaaagctgatcctgctggcccagctgaagcccgagaaggatagcgacgaagccgtgacatatagcctgggaaagtttgggcagagggccctggatttctacagcattcatgtgaccaaggagtccacccaccccgtgaagcccctggcccagatcgccggaaacagatacgcctccggacctgtgggaaaggccctgagcgacgcatgtatgggcacaatcgcctccttcctgtctaagtaccaggacatcatcatcgaacaccagaaggtggtgaagggcaaccagaagagactggagagcctgcgggagctggccggcaaggaaaacctggaataccctagcgtgaccctgccacctcagcctcacaccaaggagggcgttgatgcctacaacgaagtgatcgcccgggtgcgaatgtgggtgaacctgaacctgtggcagaagctgaagctaagcagagatgatgccaagcctctgctgagactgaagggattcccttcctttcctctggtcgagagacaggccaacgaagtggactggtgggacatggtgtgtaacgtgaagaagctgatcaacgagaaaaaggaggatggcaaggtgttttggcagaatctggctggctacaagagacaggaagccctgagaccatacctgagcagcgaggaagatcggaagaagggaaagaaattcgctcggtaccagctgggcgacctgctgctgcacctggaaaagaagcacggcgaggactggggaaaggtgtacgacgaggcctgggagcggattgacaagaaagtggaaggcctgagcaagcacatcaagctggaagaggaacggagaagcgaggacgcccagagcaaggccgccctgaccgactggctgcgggctaaggccagcttcgtgatcgagggcctgaaggaggccgacaaggacgagttctgcagatgcgagctgaagctgcagaagtggtacggggacctgcggggaaagcccttcgccatcgaagccgagaacagcatcctggacatcagcggcttcagcaagcagtacaactgtgccttcatctggcagaaggacggcgtgaagaagctgaacctgtacctgatcatcaactacttcaagggcggcaagctgcggttcaagaagatcaaacctgaagccttcgaagccaacagattctacaccgtgatcaacaaaaagagcggcgagatcgtgcccatggaggtgaacttcaacttcgacgaccccaacctgatcatcctgcctctggcctttggcaagagacagggcagagaattcatctggaacgacctgctgtccctggaaaccggcagcctgaagctggccaacggaagagtgatcgagaagacactgtacaacagaagaacccggcaggatgagcctgccctgttcgtggccctgaccttcgagcggcgggaggtcctggactcctccaatatcaaaccaatgaacctgatcggcgtggcaagaggcgaaaacatccccgccgtgatcgccctgaccgaccccgagggctgcccactgagccggtttaaggatagcctgggaaacccaacccacatcctgagaatcggcgagagctataaggagaagcagcggaccatccaggccaagaaggaggtggagcagcggagagccggcggctacagccggaagtacgccagcaaagccaagaatctggcagacgatatggtgagaaacaccgctagagatctgctgtactacgccgtgacccaggatgccatgctgatcttcgccaacctgagccggggcttcggccggcagggcaagcggaccttcatggccgagagacagtacacacggatggaggactggctgaccgccaagctggcctacgagggcctgagcaagacctacctgtccaagacactggcccagtacacctccaagacatgcagcaactgtgggtttaccatcaccagcgccgactacgacagggtgctggagaagctgaagaagacagcaacaggctggatgaccacaattaacggcaaggagctgaaggtggagggccagattacctactacaacagatacaagagacagaacgtagtcaaggacctgtccgtcgagctggatagactgagcgaagaatctgtgaacaacgacatctcctcctggacaaagggcagaagcggagaagctctgagcctcctgaagaaaagattctcccatagacccgtgcaggagaagttcgtgtgcctgaactgcggcttcgagacacacgcagccgagcaagccgccctgaacatcgccagatcctggctgttcctgcggagccaggagtacaagaaataccagacaaacaagacaaccggcaacaccgataagagagccttcgtcgagacctggcagtccttttaccggaagaagcttaaggaggtgtggaaacctgccgtgcggtctggcggatctggcggaggctccacaagcgagctggtgatgttcagggacgtggccatcgacgtgagccaggaggagtgggagtgcctgaaccccgcccagaggaacctgtacaaggaggtgatgctggagaactacagcaacctggtgagcctgggcctgagcgtgagcaagcccgccgtgatcagcagcctggagcagggcaaggagccctggatgttcgtgagggaggagaccggcaggtggtgcagcgacctggccagcagggacgagaccagccccaagaaaaagagaaaagtctaagctgccttctgcggggcttgccttctggccatgcccttcttctctcccttgcacctgtacctcttggtctttgaataaagcctgagtaggaaggctagcaaaaaaaaaaaaaaaaaaaaaaaaaaaaaaaaaaaaaaaaaaaaaaaaaaaaaaaaaaaaaaaaaaaaaaaaaaaaaaaa

SEQ ID NO: 6833 - RNA, 5797 nt, synthetic construct
  source 1..5797: mol_type = other RNA
aggaaataagagagaaaagaagagtaagaagaaatataagagccaccatggcccctaagaagaagcgtaaagtgagccggatggaacgcctcgtctacgaggtgcggcagaagtgcagaaacatcgaggacatctgcatctcctgcggatctctgaacgtgaccctggagcacccactgttcatcggcggcatgtgccagaactgtaaaaactgttttctggagtgtgcctatcaatacgacgatgacggctaccagagctactgcaccatctgttgcggcggaagagaggtgctgatgtgtggaaataacaactgctgccggtgcttctgcgtggaatgcgtggacctgctggtgggccccggcgccgcccaggccgctattaaggaagatccttggaactgctacatgtgcggccacaagggcacatacggcctgctgagacggagagaggactggcctagcagactgcagatgttcttcgccaataaccacgaccaggagttcgacccccctaaggtgtaccctcccgtccccgccgagaagagaaagcccatccgggtcctgagcctgttcgatggcatcgccaccggtctgctggtgctgaaggacctgggcatccaggtggataggtacattgcctccgaggtgtgcgaggactccatcaccgtgggaatggtgcgtcatcagggcaagatcatgtacgtgggcgacgtgcggagcgtgacacagaagcatatccaggagtggggccctttcgacctggtgatcggcggcagcccttgcaatgacctgagcatcgtgaacccagcccggaagggcctgtacgagggaaccggcagactgttcttcgagttttacagactgctgcacgacgcccggcctaaggaaggcgacgaccggcccttcttttggctgttcgagaatgtggtggccatgggagtcagcgacaagcgggatattagccggttcctggagagcaaccccgtgatgatcgatgccaaggaagtgagcgccgcccaccgggccagatacttctggggcaatctgcctggcatgaacagacccctggccagcaccgtgaacgacaagctggagctgcaggagtgcctggagcacggccggatcgccaagttcagcaaggtgagaaccatcaccacccgaagcaacagcatcaaacaaggcaaggaccagcactttcctgtgttcatgaacgagaaggaggacatcctgtggtgtaccgagatggagagagtgttcgggttcccagtccactacacagatgtcagcaacatgtctagactggccagacagagactgctgggaagaagctggtccgtccctgtgatcagacacctgttcgcccctctgaaggagtacttcgcctgcgtgagcagcggcaacagcaacgccaacagccggggccccagcttctctagcggcctggtgccactgtccctgagagggagccacatgggccccatggagatctacaaaaccgtgagcgcctggaagcggcagcctgtgcgcgtgctgagcctgtttcggaatatcgataaagtcctgaaaagcctgggattcctggagagcggctctggctccggcggtggcaccctgaagtacgtggaggatgtgacaaacgtggtcagacgggatgtggagaagtggggccccttcgatctggtgtacggcagcacccaacccctgggcagctcttgtgaccggtgccctggctggtacatgtttcagttccaccggatcctgcagtacgccctgccgagacaggagtcccagcggccattcttttggattttcatggacaacttgctgctgaccgaggatgaccaggaaactaccactcggttcctgcagaccgaagccgtgaccctgcaggacgtgagaggccgggactaccagaacgccatgcgggtgtggtccaacatccctggactgaaaagcaagcacgcacctctgacccctaaagaagaggagtacctgcaggcccaggtgcggagcagaagcaagctggacgcccctaaggtggatctgctggtgaagaattgcctcctgcccctgagagagtacttcaagtatttcagccagaatagtctgcccctgggcggcccaagcagcggcgcccctcctcccagcggcggcagcccagccggctccccaacctctaccgaggagggcacctctgagtccgccacccccgagagcggccctggcacctccaccgagcccagcgagggcagcgcacccggcagccctgccggcagccccacctccacagaggagggaaccagcaccgagcccagcgaaggcagcgccccaggcaccagcaccgagcctagtgagggcggctctggcggcggcagcgcccaggagattaaacggatcaacaagatcagaagaagacttgtgaaagacagcaacaccaagaaggccggcaagacaggccccatgaaaaccctgctggttagagtgatgacacccgatctgagagagcggctggaaaacctgagaaagaagcctgaaaatatcccccagcccatcagcaatacatctagagccaacctgaataagctgctgaccgattacaccgaaatgaagaaggcgatcctgcatgtgtactgggaagagttccagaaggaccctgtgggcctgatgagccgggtggcccagcctgccagcaagaagatcgatcagaacaagctgaaacctgagatggacgagaagggcaacctgaccaccgccggctttgcctgctctcagtgtggccagcccctgttcgtgtacaagctggagcaggtgtctgagaagggcaaggcttacaccaactacttcggacggtgcaatgtggccgagcacgaaaagctgatcctgctggcccagctgaagcccgagaaggatagcgacgaagccgtgacatatagcctgggaaagtttgggcagagggccctggatttctacagcattcatgtgaccaaggagtccacccaccccgtgaagcccctggcccagatcgccggaaacagatacgcctccggacctgtgggaaaggccctgagcgacgcatgtatgggcacaatcgcctccttcctgtctaagtaccaggacatcatcatcgaacaccagaaggtggtgaagggcaaccagaagagactggagagcctgcgggagctggccggcaaggaaaacctggaataccctagcgtgaccctgccacctcagcctcacaccaaggagggcgttgatgcctacaacgaagtgatcgcccgggtgcgaatgtgggtgaacctgaacctgtggcagaagctgaagctaagcagagatgatgccaagcctctgctgagactgaagggattcccttcctttcctctggtcgagagacaggccaacgaagtggactggtgggacatggtgtgtaacgtgaagaagctgatcaacgagaaaaaggaggatggcaaggtgttttggcagaatctggctggctacaagagacaggaagccctgagaccatacctgagcagcgaggaagatcggaagaagggaaagaaattcgctcggtaccagctgggcgacctgctgctgcacctggaaaagaagcacggcgaggactggggaaaggtgtacgacgaggcctgggagcggattgacaagaaagtggaaggcctgagcaagcacatcaagctggaagaggaacggagaagcgaggacgcccagagcaaggccgccctgaccgactggctgcgggctaaggccagcttcgtgatcgagggcctgaaggaggccgacaaggacgagttctgcagatgcgagctgaagctgcagaagtggtacggggacctgcggggaaagcccttcgccatcgaagccgagaacagcatcctggacatcagcggcttcagcaagcagtacaactgtgccttcatctggcagaaggacggcgtgaagaagctgaacctgtacctgatcatcaactacttcaagggcggcaagctgcggttcaagaagatcaaacctgaagccttcgaagccaacagattctacaccgtgatcaacaaaaagagcggcgagatcgtgcccatggaggtgaacttcaacttcgacgaccccaacctgatcatcctgcctctggcctttggcaagagacagggcagagaattcatctggaacgacctgctgtccctggaaaccggcagcctgaagctggccaacggaagagtgatcgagaagacactgtacaacagaagaacccggcaggatgagcctgccctgttcgtggccctgaccttcgagcggcgggaggtcctggactcctccaatatcaaaccaatgaacctgatcggcgtggcaagaggcgaaaacatccccgccgtgatcgccctgaccgaccccgagggctgcccactgagccggtttaaggatagcctgggaaacccaacccacatcctgagaatcggcgagagctataaggagaagcagcggaccatccaggccaagaaggaggtggagcagcggagagccggcggctacagccggaagtacgccagcaaagccaagaatctggcagacgatatggtgagaaacaccgctagagatctgctgtactacgccgtgacccaggatgccatgctgatcttcgccaacctgagccggggcttcggccggcagggcaagcggaccttcatggccgagagacagtacacacggatggaggactggctgaccgccaagctggcctacgagggcctgagcaagacctacctgtccaagacactggcccagtacacctccaagacatgcagcaactgtgggtttaccatcaccagcgccgactacgacagggtgctggagaagctgaagaagacagcaacaggctggatgaccacaattaacggcaaggagctgaaggtggagggccagattacctactacaacagatacaagagacagaacgtagtcaaggacctgtccgtcgagctggatagactgagcgaagaatctgtgaacaacgacatctcctcctggacaaagggcagaagcggagaagctctgagcctcctgaagaaaagattctcccatagacccgtgcaggagaagttcgtgtgcctgaactgcggcttcgagacacacgcagccgagcaagccgccctgaacatcgccagatcctggctgttcctgcggagccaggagtacaagaaataccagacaaacaagacaaccggcaacaccgataagagagccttcgtcgagacctggcagtccttttaccggaagaagcttaaggaggtgtggaaacctgccgtgcggtctggcggatctggcggaggctccacaagcaccagccagagccccctgaccttcggcgacgtggccgtggagttcagcggcgaggagtgggcctggctggacagcgcccagaggagcctgcacaggagcgtgatgctggagaactacaggaacctggccagcctgggcaaggtgagcaagcccgagatgatcagcagcctggagcagaggaaggagccctgggccgtgaccaggaagaccaccggcggcgagtgcgccgacagccagaccctgaccagccccaagaaaaagagaaaagtctaagctgccttctgcggggcttgccttctggccatgcccttcttctctcccttgcacctgtacctcttggtctttgaataaagcctgagtaggaaggctagcaaaaaaaaaaaaaaaaaaaaaaaaaaaaaaaaaaaaaaaaaaaaaaaaaaaaaaaaaaaaaaaaaaaaaaaaaaaaaaaa

SEQ ID NO: 6834 - RNA, 5797 nt, synthetic construct
  source 1..5797: mol_type = other RNA
aggaaataagagagaaaagaagagtaagaagaaatataagagccaccatggcccctaagaagaagcgtaaagtgagccggatggaacgcctcgtctacgaggtgcggcagaagtgcagaaacatcgaggacatctgcatctcctgcggatctctgaacgtgaccctggagcacccactgttcatcggcggcatgtgccagaactgtaaaaactgttttctggagtgtgcctatcaatacgacgatgacggctaccagagctactgcaccatctgttgcggcggaagagaggtgctgatgtgtggaaataacaactgctgccggtgcttctgcgtggaatgcgtggacctgctggtgggccccggcgccgcccaggccgctattaaggaagatccttggaactgctacatgtgcggccacaagggcacatacggcctgctgagacggagagaggactggcctagcagactgcagatgttcttcgccaataaccacgaccaggagttcgacccccctaaggtgtaccctcccgtccccgccgagaagagaaagcccatccgggtcctgagcctgttcgatggcatcgccaccggtctgctggtgctgaaggacctgggcatccaggtggataggtacattgcctccgaggtgtgcgaggactccatcaccgtgggaatggtgcgtcatcagggcaagatcatgtacgtgggcgacgtgcggagcgtgacacagaagcatatccaggagtggggccctttcgacctggtgatcggcggcagcccttgcaatgacctgagcatcgtgaacccagcccggaagggcctgtacgagggaaccggcagactgttcttcgagttttacagactgctgcacgacgcccggcctaaggaaggcgacgaccggcccttcttttggctgttcgagaatgtggtggccatgggagtcagcgacaagcgggatattagccggttcctggagagcaaccccgtgatgatcgatgccaaggaagtgagcgccgcccaccgggccagatacttctggggcaatctgcctggcatgaacagacccctggccagcaccgtgaacgacaagctggagctgcaggagtgcctggagcacggccggatcgccaagttcagcaaggtgagaaccatcaccacccgaagcaacagcatcaaacaaggcaaggaccagcactttcctgtgttcatgaacgagaaggaggacatcctgtggtgtaccgagatggagagagtgttcgggttcccagtccactacacagatgtcagcaacatgtctagactggccagacagagactgctgggaagaagctggtccgtccctgtgatcagacacctgttcgcccctctgaaggagtacttcgcctgcgtgagcagcggcaacagcaacgccaacagccggggccccagcttctctagcggcctggtgccactgtccctgagagggagccacatgggccccatggagatctacaaaaccgtgagcgcctggaagcggcagcctgtgcgcgtgctgagcctgtttcggaatatcgataaagtcctgaaaagcctgggattcctggagagcggctctggctccggcggtggcaccctgaagtacgtggaggatgtgacaaacgtggtcagacgggatgtggagaagtggggccccttcgatctggtgtacggcagcacccaacccctgggcagctcttgtgaccggtgccctggctggtacatgtttcagttccaccggatcctgcagtacgccctgccgagacaggagtcccagcggccattcttttggattttcatggacaacttgctgctgaccgaggatgaccaggaaactaccactcggttcctgcagaccgaagccgtgaccctgcaggacgtgagaggccgggactaccagaacgccatgcgggtgtggtccaacatccctggactgaaaagcaagcacgcacctctgacccctaaagaagaggagtacctgcaggcccaggtgcggagcagaagcaagctggacgcccctaaggtggatctgctggtgaagaattgcctcctgcccctgagagagtacttcaagtatttcagccagaatagtctgcccctgggcggcccaagcagcggcgcccctcctcccagcggcggcagcccagccggctccccaacctctaccgaggagggcacctctgagtccgccacccccgagagcggccctggcacctccaccgagcccagcgagggcagcgcacccggcagccctgccggcagccccacctccacagaggagggaaccagcaccgagcccagcgaaggcagcgccccaggcaccagcaccgagcctagtgagggcggctctggcggcggcagcgcccaggagattaaacggatcaacaagatcagaagaagacttgtgaaagacagcaacaccaagaaggccggcaagacaggccccatgaaaaccctgctggttagagtgatgacacccgatctgagagagcggctggaaaacctgagaaagaagcctgaaaatatcccccagcccatcagcaatacatctagagccaacctgaataagctgctgaccgattacaccgaaatgaagaaggcgatcctgcatgtgtactgggaagagttccagaaggaccctgtgggcctgatgagccgggtggcccagcctgccagcaagaagatcgatcagaacaagctgaaacctgagatggacgagaagggcaacctgaccaccgccggctttgcctgctctcagtgtggccagcccctgttcgtgtacaagctggagcaggtgtctgagaagggcaaggcttacaccaactacttcggacggtgcaatgtggccgagcacgaaaagctgatcctgctggcccagctgaagcccgagaaggatagcgacgaagccgtgacatatagcctgggaaagtttgggcagagggccctggatttctacagcattcatgtgaccaaggagtccacccaccccgtgaagcccctggcccagatcgccggaaacagatacgcctccggacctgtgggaaaggccctgagcgacgcatgtatgggcacaatcgcctccttcctgtctaagtaccaggacatcatcatcgaacaccagaaggtggtgaagggcaaccagaagagactggagagcctgcgggagctggccggcaaggaaaacctggaataccctagcgtgaccctgccacctcagcctcacaccaaggagggcgttgatgcctacaacgaagtgatcgcccgggtgcgaatgtgggtgaacctgaacctgtggcagaagctgaagctaagcagagatgatgccaagcctctgctgagactgaagggattcccttcctttcctctggtcgagagacaggccaacgaagtggactggtgggacatggtgtgtaacgtgaagaagctgatcaacgagaaaaaggaggatggcaaggtgttttggcagaatctggctggctacaagagacaggaagccctgagaccatacctgagcagcgaggaagatcggaagaagggaaagaaattcgctcggtaccagctgggcgacctgctgctgcacctggaaaagaagcacggcgaggactggggaaaggtgtacgacgaggcctgggagcggattgacaagaaagtggaaggcctgagcaagcacatcaagctggaagaggaacggagaagcgaggacgcccagagcaaggccgccctgaccgactggctgcgggctaaggccagcttcgtgatcgagggcctgaaggaggccgacaaggacgagttctgcagatgcgagctgaagctgcagaagtggtacggggacctgcggggaaagcccttcgccatcgaagccgagaacagcatcctggacatcagcggcttcagcaagcagtacaactgtgccttcatctggcagaaggacggcgtgaagaagctgaacctgtacctgatcatcaactacttcaagggcggcaagctgcggttcaagaagatcaaacctgaagccttcgaagccaacagattctacaccgtgatcaacaaaaagagcggcgagatcgtgcccatggaggtgaacttcaacttcgacgaccccaacctgatcatcctgcctctggcctttggcaagagacagggcagagaattcatctggaacgacctgctgtccctggaaaccggcagcctgaagctggccaacggaagagtgatcgagaagacactgtacaacagaagaacccggcaggatgagcctgccctgttcgtggccctgaccttcgagcggcgggaggtcctggactcctccaatatcaaaccaatgaacctgatcggcgtggcaagaggcgaaaacatccccgccgtgatcgccctgaccgaccccgagggctgcccactgagccggtttaaggatagcctgggaaacccaacccacatcctgagaatcggcgagagctataaggagaagcagcggaccatccaggccaagaaggaggtggagcagcggagagccggcggctacagccggaagtacgccagcaaagccaagaatctggcagacgatatggtgagaaacaccgctagagatctgctgtactacgccgtgacccaggatgccatgctgatcttcgccaacctgagccggggcttcggccggcagggcaagcggaccttcatggccgagagacagtacacacggatggaggactggctgaccgccaagctggcctacgagggcctgagcaagacctacctgtccaagacactggcccagtacacctccaagacatgcagcaactgtgggtttaccatcaccagcgccgactacgacagggtgctggagaagctgaagaagacagcaacaggctggatgaccacaattaacggcaaggagctgaaggtggagggccagattacctactacaacagatacaagagacagaacgtagtcaaggacctgtccgtcgagctggatagactgagcgaagaatctgtgaacaacgacatctcctcctggacaaagggcagaagcggagaagctctgagcctcctgaagaaaagattctcccatagacccgtgcaggagaagttcgtgtgcctgaactgcggcttcgagacacacgcagccgagcaagccgccctgaacatcgccagatcctggctgttcctgcggagccaggagtacaagaaataccagacaaacaagacaaccggcaacaccgataagagagccttcgtcgagacctggcagtccttttaccggaagaagcttaaggaggtgtggaaacctgccgtgcggtctggcggatctggcggaggctccacaagccaggagcccgtgaccttcgccgacgtggccgtgctgttcacccccgaggagtggatgttcctggacagcgcccagaggagcctgtacagggacgtgatgctggagaactacaggaacctggccagcgtgggcgccggcgaccagctgggcaagcccagcatgctgagcctgagcgagcccggcgaggagctgtgggcccccgagaggaggaccttccccggcaccaggcccgagccccagcacaccagccccaagaaaaagagaaaagtctaagctgccttctgcggggcttgccttctggccatgcccttcttctctcccttgcacctgtacctcttggtctttgaataaagcctgagtaggaaggctagcaaaaaaaaaaaaaaaaaaaaaaaaaaaaaaaaaaaaaaaaaaaaaaaaaaaaaaaaaaaaaaaaaaaaaaaaaaaaaaaa

SEQ ID NO: 6835 - RNA, 5797 nt, synthetic construct
  source 1..5797: mol_type = other RNA
aggaaataagagagaaaagaagagtaagaagaaatataagagccaccatggcccctaagaagaagcgtaaagtgagccggatggaacgcctcgtctacgaggtgcggcagaagtgcagaaacatcgaggacatctgcatctcctgcggatctctgaacgtgaccctggagcacccactgttcatcggcggcatgtgccagaactgtaaaaactgttttctggagtgtgcctatcaatacgacgatgacggctaccagagctactgcaccatctgttgcggcggaagagaggtgctgatgtgtggaaataacaactgctgccggtgcttctgcgtggaatgcgtggacctgctggtgggccccggcgccgcccaggccgctattaaggaagatccttggaactgctacatgtgcggccacaagggcacatacggcctgctgagacggagagaggactggcctagcagactgcagatgttcttcgccaataaccacgaccaggagttcgacccccctaaggtgtaccctcccgtccccgccgagaagagaaagcccatccgggtcctgagcctgttcgatggcatcgccaccggtctgctggtgctgaaggacctgggcatccaggtggataggtacattgcctccgaggtgtgcgaggactccatcaccgtgggaatggtgcgtcatcagggcaagatcatgtacgtgggcgacgtgcggagcgtgacacagaagcatatccaggagtggggccctttcgacctggtgatcggcggcagcccttgcaatgacctgagcatcgtgaacccagcccggaagggcctgtacgagggaaccggcagactgttcttcgagttttacagactgctgcacgacgcccggcctaaggaaggcgacgaccggcccttcttttggctgttcgagaatgtggtggccatgggagtcagcgacaagcgggatattagccggttcctggagagcaaccccgtgatgatcgatgccaaggaagtgagcgccgcccaccgggccagatacttctggggcaatctgcctggcatgaacagacccctggccagcaccgtgaacgacaagctggagctgcaggagtgcctggagcacggccggatcgccaagttcagcaaggtgagaaccatcaccacccgaagcaacagcatcaaacaaggcaaggaccagcactttcctgtgttcatgaacgagaaggaggacatcctgtggtgtaccgagatggagagagtgttcgggttcccagtccactacacagatgtcagcaacatgtctagactggccagacagagactgctgggaagaagctggtccgtccctgtgatcagacacctgttcgcccctctgaaggagtacttcgcctgcgtgagcagcggcaacagcaacgccaacagccggggccccagcttctctagcggcctggtgccactgtccctgagagggagccacatgggccccatggagatctacaaaaccgtgagcgcctggaagcggcagcctgtgcgcgtgctgagcctgtttcggaatatcgataaagtcctgaaaagcctgggattcctggagagcggctctggctccggcggtggcaccctgaagtacgtggaggatgtgacaaacgtggtcagacgggatgtggagaagtggggccccttcgatctggtgtacggcagcacccaacccctgggcagctcttgtgaccggtgccctggctggtacatgtttcagttccaccggatcctgcagtacgccctgccgagacaggagtcccagcggccattcttttggattttcatggacaacttgctgctgaccgaggatgaccaggaaactaccactcggttcctgcagaccgaagccgtgaccctgcaggacgtgagaggccgggactaccagaacgccatgcgggtgtggtccaacatccctggactgaaaagcaagcacgcacctctgacccctaaagaagaggagtacctgcaggcccaggtgcggagcagaagcaagctggacgcccctaaggtggatctgctggtgaagaattgcctcctgcccctgagagagtacttcaagtatttcagccagaatagtctgcccctgggcggcccaagcagcggcgcccctcctcccagcggcggcagcccagccggctccccaacctctaccgaggagggcacctctgagtccgccacccccgagagcggccctggcacctccaccgagcccagcgagggcagcgcacccggcagccctgccggcagccccacctccacagaggagggaaccagcaccgagcccagcgaaggcagcgccccaggcaccagcaccgagcctagtgagggcggctctggcggcggcagcgcccaggagattaaacggatcaacaagatcagaagaagacttgtgaaagacagcaacaccaagaaggccggcaagacaggccccatgaaaaccctgctggttagagtgatgacacccgatctgagagagcggctggaaaacctgagaaagaagcctgaaaatatcccccagcccatcagcaatacatctagagccaacctgaataagctgctgaccgattacaccgaaatgaagaaggcgatcctgcatgtgtactgggaagagttccagaaggaccctgtgggcctgatgagccgggtggcccagcctgccagcaagaagatcgatcagaacaagctgaaacctgagatggacgagaagggcaacctgaccaccgccggctttgcctgctctcagtgtggccagcccctgttcgtgtacaagctggagcaggtgtctgagaagggcaaggcttacaccaactacttcggacggtgcaatgtggccgagcacgaaaagctgatcctgctggcccagctgaagcccgagaaggatagcgacgaagccgtgacatatagcctgggaaagtttgggcagagggccctggatttctacagcattcatgtgaccaaggagtccacccaccccgtgaagcccctggcccagatcgccggaaacagatacgcctccggacctgtgggaaaggccctgagcgacgcatgtatgggcacaatcgcctccttcctgtctaagtaccaggacatcatcatcgaacaccagaaggtggtgaagggcaaccagaagagactggagagcctgcgggagctggccggcaaggaaaacctggaataccctagcgtgaccctgccacctcagcctcacaccaaggagggcgttgatgcctacaacgaagtgatcgcccgggtgcgaatgtgggtgaacctgaacctgtggcagaagctgaagctaagcagagatgatgccaagcctctgctgagactgaagggattcccttcctttcctctggtcgagagacaggccaacgaagtggactggtgggacatggtgtgtaacgtgaagaagctgatcaacgagaaaaaggaggatggcaaggtgttttggcagaatctggctggctacaagagacaggaagccctgagaccatacctgagcagcgaggaagatcggaagaagggaaagaaattcgctcggtaccagctgggcgacctgctgctgcacctggaaaagaagcacggcgaggactggggaaaggtgtacgacgaggcctgggagcggattgacaagaaagtggaaggcctgagcaagcacatcaagctggaagaggaacggagaagcgaggacgcccagagcaaggccgccctgaccgactggctgcgggctaaggccagcttcgtgatcgagggcctgaaggaggccgacaaggacgagttctgcagatgcgagctgaagctgcagaagtggtacggggacctgcggggaaagcccttcgccatcgaagccgagaacagcatcctggacatcagcggcttcagcaagcagtacaactgtgccttcatctggcagaaggacggcgtgaagaagctgaacctgtacctgatcatcaactacttcaagggcggcaagctgcggttcaagaagatcaaacctgaagccttcgaagccaacagattctacaccgtgatcaacaaaaagagcggcgagatcgtgcccatggaggtgaacttcaacttcgacgaccccaacctgatcatcctgcctctggcctttggcaagagacagggcagagaattcatctggaacgacctgctgtccctggaaaccggcagcctgaagctggccaacggaagagtgatcgagaagacactgtacaacagaagaacccggcaggatgagcctgccctgttcgtggccctgaccttcgagcggcgggaggtcctggactcctccaatatcaaaccaatgaacctgatcggcgtggcaagaggcgaaaacatccccgccgtgatcgccctgaccgaccccgagggctgcccactgagccggtttaaggatagcctgggaaacccaacccacatcctgagaatcggcgagagctataaggagaagcagcggaccatccaggccaagaaggaggtggagcagcggagagccggcggctacagccggaagtacgccagcaaagccaagaatctggcagacgatatggtgagaaacaccgctagagatctgctgtactacgccgtgacccaggatgccatgctgatcttcgccaacctgagccggggcttcggccggcagggcaagcggaccttcatggccgagagacagtacacacggatggaggactggctgaccgccaagctggcctacgagggcctgagcaagacctacctgtccaagacactggcccagtacacctccaagacatgcagcaactgtgggtttaccatcaccagcgccgactacgacagggtgctggagaagctgaagaagacagcaacaggctggatgaccacaattaacggcaaggagctgaaggtggagggccagattacctactacaacagatacaagagacagaacgtagtcaaggacctgtccgtcgagctggatagactgagcgaagaatctgtgaacaacgacatctcctcctggacaaagggcagaagcggagaagctctgagcctcctgaagaaaagattctcccatagacccgtgcaggagaagttcgtgtgcctgaactgcggcttcgagacacacgcagccgagcaagccgccctgaacatcgccagatcctggctgttcctgcggagccaggagtacaagaaataccagacaaacaagacaaccggcaacaccgataagagagccttcgtcgagacctggcagtccttttaccggaagaagcttaaggaggtgtggaaacctgccgtgcggtctggcggatctggcggaggctccacaagcatggcccagtgcctggtgaccttcgccgacgtggccatcgacttcagccaggaggagtgggcctgcctgaacagcgcccagagggacctgtactgggacgtgatgctggagaactacagcaacctggtgagcctggacctggagagcgcctacgagaacaagagcctgcccaccgagaagaacatccacgagatcagggccagcaagaggaacagcgacaggaggagcaagagcctgggcaggaccagccccaagaaaaagagaaaagtctaagctgccttctgcggggcttgccttctggccatgcccttcttctctcccttgcacctgtacctcttggtctttgaataaagcctgagtaggaaggctagcaaaaaaaaaaaaaaaaaaaaaaaaaaaaaaaaaaaaaaaaaaaaaaaaaaaaaaaaaaaaaaaaaaaaaaaaaaaaaaaa

SEQ ID NO: 6836 - RNA, 5797 nt, synthetic construct
  source 1..5797: mol_type = other RNA
aggaaataagagagaaaagaagagtaagaagaaatataagagccaccatggcccctaagaagaagcgtaaagtgagccggatggaacgcctcgtctacgaggtgcggcagaagtgcagaaacatcgaggacatctgcatctcctgcggatctctgaacgtgaccctggagcacccactgttcatcggcggcatgtgccagaactgtaaaaactgttttctggagtgtgcctatcaatacgacgatgacggctaccagagctactgcaccatctgttgcggcggaagagaggtgctgatgtgtggaaataacaactgctgccggtgcttctgcgtggaatgcgtggacctgctggtgggccccggcgccgcccaggccgctattaaggaagatccttggaactgctacatgtgcggccacaagggcacatacggcctgctgagacggagagaggactggcctagcagactgcagatgttcttcgccaataaccacgaccaggagttcgacccccctaaggtgtaccctcccgtccccgccgagaagagaaagcccatccgggtcctgagcctgttcgatggcatcgccaccggtctgctggtgctgaaggacctgggcatccaggtggataggtacattgcctccgaggtgtgcgaggactccatcaccgtgggaatggtgcgtcatcagggcaagatcatgtacgtgggcgacgtgcggagcgtgacacagaagcatatccaggagtggggccctttcgacctggtgatcggcggcagcccttgcaatgacctgagcatcgtgaacccagcccggaagggcctgtacgagggaaccggcagactgttcttcgagttttacagactgctgcacgacgcccggcctaaggaaggcgacgaccggcccttcttttggctgttcgagaatgtggtggccatgggagtcagcgacaagcgggatattagccggttcctggagagcaaccccgtgatgatcgatgccaaggaagtgagcgccgcccaccgggccagatacttctggggcaatctgcctggcatgaacagacccctggccagcaccgtgaacgacaagctggagctgcaggagtgcctggagcacggccggatcgccaagttcagcaaggtgagaaccatcaccacccgaagcaacagcatcaaacaaggcaaggaccagcactttcctgtgttcatgaacgagaaggaggacatcctgtggtgtaccgagatggagagagtgttcgggttcccagtccactacacagatgtcagcaacatgtctagactggccagacagagactgctgggaagaagctggtccgtccctgtgatcagacacctgttcgcccctctgaaggagtacttcgcctgcgtgagcagcggcaacagcaacgccaacagccggggccccagcttctctagcggcctggtgccactgtccctgagagggagccacatgggccccatggagatctacaaaaccgtgagcgcctggaagcggcagcctgtgcgcgtgctgagcctgtttcggaatatcgataaagtcctgaaaagcctgggattcctggagagcggctctggctccggcggtggcaccctgaagtacgtggaggatgtgacaaacgtggtcagacgggatgtggagaagtggggccccttcgatctggtgtacggcagcacccaacccctgggcagctcttgtgaccggtgccctggctggtacatgtttcagttccaccggatcctgcagtacgccctgccgagacaggagtcccagcggccattcttttggattttcatggacaacttgctgctgaccgaggatgaccaggaaactaccactcggttcctgcagaccgaagccgtgaccctgcaggacgtgagaggccgggactaccagaacgccatgcgggtgtggtccaacatccctggactgaaaagcaagcacgcacctctgacccctaaagaagaggagtacctgcaggcccaggtgcggagcagaagcaagctggacgcccctaaggtggatctgctggtgaagaattgcctcctgcccctgagagagtacttcaagtatttcagccagaatagtctgcccctgggcggcccaagcagcggcgcccctcctcccagcggcggcagcccagccggctccccaacctctaccgaggagggcacctctgagtccgccacccccgagagcggccctggcacctccaccgagcccagcgagggcagcgcacccggcagccctgccggcagccccacctccacagaggagggaaccagcaccgagcccagcgaaggcagcgccccaggcaccagcaccgagcctagtgagggcggctctggcggcggcagcgcccaggagattaaacggatcaacaagatcagaagaagacttgtgaaagacagcaacaccaagaaggccggcaagacaggccccatgaaaaccctgctggttagagtgatgacacccgatctgagagagcggctggaaaacctgagaaagaagcctgaaaatatcccccagcccatcagcaatacatctagagccaacctgaataagctgctgaccgattacaccgaaatgaagaaggcgatcctgcatgtgtactgggaagagttccagaaggaccctgtgggcctgatgagccgggtggcccagcctgccagcaagaagatcgatcagaacaagctgaaacctgagatggacgagaagggcaacctgaccaccgccggctttgcctgctctcagtgtggccagcccctgttcgtgtacaagctggagcaggtgtctgagaagggcaaggcttacaccaactacttcggacggtgcaatgtggccgagcacgaaaagctgatcctgctggcccagctgaagcccgagaaggatagcgacgaagccgtgacatatagcctgggaaagtttgggcagagggccctggatttctacagcattcatgtgaccaaggagtccacccaccccgtgaagcccctggcccagatcgccggaaacagatacgcctccggacctgtgggaaaggccctgagcgacgcatgtatgggcacaatcgcctccttcctgtctaagtaccaggacatcatcatcgaacaccagaaggtggtgaagggcaaccagaagagactggagagcctgcgggagctggccggcaaggaaaacctggaataccctagcgtgaccctgccacctcagcctcacaccaaggagggcgttgatgcctacaacgaagtgatcgcccgggtgcgaatgtgggtgaacctgaacctgtggcagaagctgaagctaagcagagatgatgccaagcctctgctgagactgaagggattcccttcctttcctctggtcgagagacaggccaacgaagtggactggtgggacatggtgtgtaacgtgaagaagctgatcaacgagaaaaaggaggatggcaaggtgttttggcagaatctggctggctacaagagacaggaagccctgagaccatacctgagcagcgaggaagatcggaagaagggaaagaaattcgctcggtaccagctgggcgacctgctgctgcacctggaaaagaagcacggcgaggactggggaaaggtgtacgacgaggcctgggagcggattgacaagaaagtggaaggcctgagcaagcacatcaagctggaagaggaacggagaagcgaggacgcccagagcaaggccgccctgaccgactggctgcgggctaaggccagcttcgtgatcgagggcctgaaggaggccgacaaggacgagttctgcagatgcgagctgaagctgcagaagtggtacggggacctgcggggaaagcccttcgccatcgaagccgagaacagcatcctggacatcagcggcttcagcaagcagtacaactgtgccttcatctggcagaaggacggcgtgaagaagctgaacctgtacctgatcatcaactacttcaagggcggcaagctgcggttcaagaagatcaaacctgaagccttcgaagccaacagattctacaccgtgatcaacaaaaagagcggcgagatcgtgcccatggaggtgaacttcaacttcgacgaccccaacctgatcatcctgcctctggcctttggcaagagacagggcagagaattcatctggaacgacctgctgtccctggaaaccggcagcctgaagctggccaacggaagagtgatcgagaagacactgtacaacagaagaacccggcaggatgagcctgccctgttcgtggccctgaccttcgagcggcgggaggtcctggactcctccaatatcaaaccaatgaacctgatcggcgtggcaagaggcgaaaacatccccgccgtgatcgccctgaccgaccccgagggctgcccactgagccggtttaaggatagcctgggaaacccaacccacatcctgagaatcggcgagagctataaggagaagcagcggaccatccaggccaagaaggaggtggagcagcggagagccggcggctacagccggaagtacgccagcaaagccaagaatctggcagacgatatggtgagaaacaccgctagagatctgctgtactacgccgtgacccaggatgccatgctgatcttcgccaacctgagccggggcttcggccggcagggcaagcggaccttcatggccgagagacagtacacacggatggaggactggctgaccgccaagctggcctacgagggcctgagcaagacctacctgtccaagacactggcccagtacacctccaagacatgcagcaactgtgggtttaccatcaccagcgccgactacgacagggtgctggagaagctgaagaagacagcaacaggctggatgaccacaattaacggcaaggagctgaaggtggagggccagattacctactacaacagatacaagagacagaacgtagtcaaggacctgtccgtcgagctggatagactgagcgaagaatctgtgaacaacgacatctcctcctggacaaagggcagaagcggagaagctctgagcctcctgaagaaaagattctcccatagacccgtgcaggagaagttcgtgtgcctgaactgcggcttcgagacacacgcagccgagcaagccgccctgaacatcgccagatcctggctgttcctgcggagccaggagtacaagaaataccagacaaacaagacaaccggcaacaccgataagagagccttcgtcgagacctggcagtccttttaccggaagaagcttaaggaggtgtggaaacctgccgtgcggtctggcggatctggcggaggctccacaagcgcccaggtgctggtgaccttcaaggacgtggccgtgaccttcaccagggaggagtggggccagctggacctggaccagaaggccctgtaccaggaggtgatgctggagacctacggcctgctggtgagcctgggccaccccgtgcccaagcccgagctgacccacctgctggagtgcggccaggagctgtggaagggcaagaggggcctgagccacagcacctgcagcggcgacgacaccaagaccagccccaagaaaaagagaaaagtctaagctgccttctgcggggcttgccttctggccatgcccttcttctctcccttgcacctgtacctcttggtctttgaataaagcctgagtaggaaggctagcaaaaaaaaaaaaaaaaaaaaaaaaaaaaaaaaaaaaaaaaaaaaaaaaaaaaaaaaaaaaaaaaaaaaaaaaaaaaaaaa

SEQ ID NO: 6837 - RNA, 5797 nt, synthetic construct
  source 1..5797: mol_type = other RNA
aggaaataagagagaaaagaagagtaagaagaaatataagagccaccatggcccctaagaagaagcgtaaagtgagccggatggaacgcctcgtctacgaggtgcggcagaagtgcagaaacatcgaggacatctgcatctcctgcggatctctgaacgtgaccctggagcacccactgttcatcggcggcatgtgccagaactgtaaaaactgttttctggagtgtgcctatcaatacgacgatgacggctaccagagctactgcaccatctgttgcggcggaagagaggtgctgatgtgtggaaataacaactgctgccggtgcttctgcgtggaatgcgtggacctgctggtgggccccggcgccgcccaggccgctattaaggaagatccttggaactgctacatgtgcggccacaagggcacatacggcctgctgagacggagagaggactggcctagcagactgcagatgttcttcgccaataaccacgaccaggagttcgacccccctaaggtgtaccctcccgtccccgccgagaagagaaagcccatccgggtcctgagcctgttcgatggcatcgccaccggtctgctggtgctgaaggacctgggcatccaggtggataggtacattgcctccgaggtgtgcgaggactccatcaccgtgggaatggtgcgtcatcagggcaagatcatgtacgtgggcgacgtgcggagcgtgacacagaagcatatccaggagtggggccctttcgacctggtgatcggcggcagcccttgcaatgacctgagcatcgtgaacccagcccggaagggcctgtacgagggaaccggcagactgttcttcgagttttacagactgctgcacgacgcccggcctaaggaaggcgacgaccggcccttcttttggctgttcgagaatgtggtggccatgggagtcagcgacaagcgggatattagccggttcctggagagcaaccccgtgatgatcgatgccaaggaagtgagcgccgcccaccgggccagatacttctggggcaatctgcctggcatgaacagacccctggccagcaccgtgaacgacaagctggagctgcaggagtgcctggagcacggccggatcgccaagttcagcaaggtgagaaccatcaccacccgaagcaacagcatcaaacaaggcaaggaccagcactttcctgtgttcatgaacgagaaggaggacatcctgtggtgtaccgagatggagagagtgttcgggttcccagtccactacacagatgtcagcaacatgtctagactggccagacagagactgctgggaagaagctggtccgtccctgtgatcagacacctgttcgcccctctgaaggagtacttcgcctgcgtgagcagcggcaacagcaacgccaacagccggggccccagcttctctagcggcctggtgccactgtccctgagagggagccacatgggccccatggagatctacaaaaccgtgagcgcctggaagcggcagcctgtgcgcgtgctgagcctgtttcggaatatcgataaagtcctgaaaagcctgggattcctggagagcggctctggctccggcggtggcaccctgaagtacgtggaggatgtgacaaacgtggtcagacgggatgtggagaagtggggccccttcgatctggtgtacggcagcacccaacccctgggcagctcttgtgaccggtgccctggctggtacatgtttcagttccaccggatcctgcagtacgccctgccgagacaggagtcccagcggccattcttttggattttcatggacaacttgctgctgaccgaggatgaccaggaaactaccactcggttcctgcagaccgaagccgtgaccctgcaggacgtgagaggccgggactaccagaacgccatgcgggtgtggtccaacatccctggactgaaaagcaagcacgcacctctgacccctaaagaagaggagtacctgcaggcccaggtgcggagcagaagcaagctggacgcccctaaggtggatctgctggtgaagaattgcctcctgcccctgagagagtacttcaagtatttcagccagaatagtctgcccctgggcggcccaagcagcggcgcccctcctcccagcggcggcagcccagccggctccccaacctctaccgaggagggcacctctgagtccgccacccccgagagcggccctggcacctccaccgagcccagcgagggcagcgcacccggcagccctgccggcagccccacctccacagaggagggaaccagcaccgagcccagcgaaggcagcgccccaggcaccagcaccgagcctagtgagggcggctctggcggcggcagcgcccaggagattaaacggatcaacaagatcagaagaagacttgtgaaagacagcaacaccaagaaggccggcaagacaggccccatgaaaaccctgctggttagagtgatgacacccgatctgagagagcggctggaaaacctgagaaagaagcctgaaaatatcccccagcccatcagcaatacatctagagccaacctgaataagctgctgaccgattacaccgaaatgaagaaggcgatcctgcatgtgtactgggaagagttccagaaggaccctgtgggcctgatgagccgggtggcccagcctgccagcaagaagatcgatcagaacaagctgaaacctgagatggacgagaagggcaacctgaccaccgccggctttgcctgctctcagtgtggccagcccctgttcgtgtacaagctggagcaggtgtctgagaagggcaaggcttacaccaactacttcggacggtgcaatgtggccgagcacgaaaagctgatcctgctggcccagctgaagcccgagaaggatagcgacgaagccgtgacatatagcctgggaaagtttgggcagagggccctggatttctacagcattcatgtgaccaaggagtccacccaccccgtgaagcccctggcccagatcgccggaaacagatacgcctccggacctgtgggaaaggccctgagcgacgcatgtatgggcacaatcgcctccttcctgtctaagtaccaggacatcatcatcgaacaccagaaggtggtgaagggcaaccagaagagactggagagcctgcgggagctggccggcaaggaaaacctggaataccctagcgtgaccctgccacctcagcctcacaccaaggagggcgttgatgcctacaacgaagtgatcgcccgggtgcgaatgtgggtgaacctgaacctgtggcagaagctgaagctaagcagagatgatgccaagcctctgctgagactgaagggattcccttcctttcctctggtcgagagacaggccaacgaagtggactggtgggacatggtgtgtaacgtgaagaagctgatcaacgagaaaaaggaggatggcaaggtgttttggcagaatctggctggctacaagagacaggaagccctgagaccatacctgagcagcgaggaagatcggaagaagggaaagaaattcgctcggtaccagctgggcgacctgctgctgcacctggaaaagaagcacggcgaggactggggaaaggtgtacgacgaggcctgggagcggattgacaagaaagtggaaggcctgagcaagcacatcaagctggaagaggaacggagaagcgaggacgcccagagcaaggccgccctgaccgactggctgcgggctaaggccagcttcgtgatcgagggcctgaaggaggccgacaaggacgagttctgcagatgcgagctgaagctgcagaagtggtacggggacctgcggggaaagcccttcgccatcgaagccgagaacagcatcctggacatcagcggcttcagcaagcagtacaactgtgccttcatctggcagaaggacggcgtgaagaagctgaacctgtacctgatcatcaactacttcaagggcggcaagctgcggttcaagaagatcaaacctgaagccttcgaagccaacagattctacaccgtgatcaacaaaaagagcggcgagatcgtgcccatggaggtgaacttcaacttcgacgaccccaacctgatcatcctgcctctggcctttggcaagagacagggcagagaattcatctggaacgacctgctgtccctggaaaccggcagcctgaagctggccaacggaagagtgatcgagaagacactgtacaacagaagaacccggcaggatgagcctgccctgttcgtggccctgaccttcgagcggcgggaggtcctggactcctccaatatcaaaccaatgaacctgatcggcgtggcaagaggcgaaaacatccccgccgtgatcgccctgaccgaccccgagggctgcccactgagccggtttaaggatagcctgggaaacccaacccacatcctgagaatcggcgagagctataaggagaagcagcggaccatccaggccaagaaggaggtggagcagcggagagccggcggctacagccggaagtacgccagcaaagccaagaatctggcagacgatatggtgagaaacaccgctagagatctgctgtactacgccgtgacccaggatgccatgctgatcttcgccaacctgagccggggcttcggccggcagggcaagcggaccttcatggccgagagacagtacacacggatggaggactggctgaccgccaagctggcctacgagggcctgagcaagacctacctgtccaagacactggcccagtacacctccaagacatgcagcaactgtgggtttaccatcaccagcgccgactacgacagggtgctggagaagctgaagaagacagcaacaggctggatgaccacaattaacggcaaggagctgaaggtggagggccagattacctactacaacagatacaagagacagaacgtagtcaaggacctgtccgtcgagctggatagactgagcgaagaatctgtgaacaacgacatctcctcctggacaaagggcagaagcggagaagctctgagcctcctgaagaaaagattctcccatagacccgtgcaggagaagttcgtgtgcctgaactgcggcttcgagacacacgcagccgagcaagccgccctgaacatcgccagatcctggctgttcctgcggagccaggagtacaagaaataccagacaaacaagacaaccggcaacaccgataagagagccttcgtcgagacctggcagtccttttaccggaagaagcttaaggaggtgtggaaacctgccgtgcggtctggcggatctggcggaggctccacaagcagcctgggccccgtgagcttcaaggacgtggccgtgggcttcacccaggaggagtggaggcagctggagcccgcccagaggaggacctacagggaggtgatgctggagaactacagccacctggtggccgtgggctgccacttcatcaagcccgacgtgatcaccaagctggagaggggcgaggagccctggatcgagggcggcttcctgccccagggctgcgccggcgacgaggtgtggcagaccagccccaagaaaaagagaaaagtctaagctgccttctgcggggcttgccttctggccatgcccttcttctctcccttgcacctgtacctcttggtctttgaataaagcctgagtaggaaggctagcaaaaaaaaaaaaaaaaaaaaaaaaaaaaaaaaaaaaaaaaaaaaaaaaaaaaaaaaaaaaaaaaaaaaaaaaaaaaaaaa

SEQ ID NO: 6838 - RNA, 5797 nt, synthetic construct
  source 1..5797: mol_type = other RNA
aggaaataagagagaaaagaagagtaagaagaaatataagagccaccatggcccctaagaagaagcgtaaagtgagccggatggaacgcctcgtctacgaggtgcggcagaagtgcagaaacatcgaggacatctgcatctcctgcggatctctgaacgtgaccctggagcacccactgttcatcggcggcatgtgccagaactgtaaaaactgttttctggagtgtgcctatcaatacgacgatgacggctaccagagctactgcaccatctgttgcggcggaagagaggtgctgatgtgtggaaataacaactgctgccggtgcttctgcgtggaatgcgtggacctgctggtgggccccggcgccgcccaggccgctattaaggaagatccttggaactgctacatgtgcggccacaagggcacatacggcctgctgagacggagagaggactggcctagcagactgcagatgttcttcgccaataaccacgaccaggagttcgacccccctaaggtgtaccctcccgtccccgccgagaagagaaagcccatccgggtcctgagcctgttcgatggcatcgccaccggtctgctggtgctgaaggacctgggcatccaggtggataggtacattgcctccgaggtgtgcgaggactccatcaccgtgggaatggtgcgtcatcagggcaagatcatgtacgtgggcgacgtgcggagcgtgacacagaagcatatccaggagtggggccctttcgacctggtgatcggcggcagcccttgcaatgacctgagcatcgtgaacccagcccggaagggcctgtacgagggaaccggcagactgttcttcgagttttacagactgctgcacgacgcccggcctaaggaaggcgacgaccggcccttcttttggctgttcgagaatgtggtggccatgggagtcagcgacaagcgggatattagccggttcctggagagcaaccccgtgatgatcgatgccaaggaagtgagcgccgcccaccgggccagatacttctggggcaatctgcctggcatgaacagacccctggccagcaccgtgaacgacaagctggagctgcaggagtgcctggagcacggccggatcgccaagttcagcaaggtgagaaccatcaccacccgaagcaacagcatcaaacaaggcaaggaccagcactttcctgtgttcatgaacgagaaggaggacatcctgtggtgtaccgagatggagagagtgttcgggttcccagtccactacacagatgtcagcaacatgtctagactggccagacagagactgctgggaagaagctggtccgtccctgtgatcagacacctgttcgcccctctgaaggagtacttcgcctgcgtgagcagcggcaacagcaacgccaacagccggggccccagcttctctagcggcctggtgccactgtccctgagagggagccacatgggccccatggagatctacaaaaccgtgagcgcctggaagcggcagcctgtgcgcgtgctgagcctgtttcggaatatcgataaagtcctgaaaagcctgggattcctggagagcggctctggctccggcggtggcaccctgaagtacgtggaggatgtgacaaacgtggtcagacgggatgtggagaagtggggccccttcgatctggtgtacggcagcacccaacccctgggcagctcttgtgaccggtgccctggctggtacatgtttcagttccaccggatcctgcagtacgccctgccgagacaggagtcccagcggccattcttttggattttcatggacaacttgctgctgaccgaggatgaccaggaaactaccactcggttcctgcagaccgaagccgtgaccctgcaggacgtgagaggccgggactaccagaacgccatgcgggtgtggtccaacatccctggactgaaaagcaagcacgcacctctgacccctaaagaagaggagtacctgcaggcccaggtgcggagcagaagcaagctggacgcccctaaggtggatctgctggtgaagaattgcctcctgcccctgagagagtacttcaagtatttcagccagaatagtctgcccctgggcggcccaagcagcggcgcccctcctcccagcggcggcagcccagccggctccccaacctctaccgaggagggcacctctgagtccgccacccccgagagcggccctggcacctccaccgagcccagcgagggcagcgcacccggcagccctgccggcagccccacctccacagaggagggaaccagcaccgagcccagcgaaggcagcgccccaggcaccagcaccgagcctagtgagggcggctctggcggcggcagcgcccaggagattaaacggatcaacaagatcagaagaagacttgtgaaagacagcaacaccaagaaggccggcaagacaggccccatgaaaaccctgctggttagagtgatgacacccgatctgagagagcggctggaaaacctgagaaagaagcctgaaaatatcccccagcccatcagcaatacatctagagccaacctgaataagctgctgaccgattacaccgaaatgaagaaggcgatcctgcatgtgtactgggaagagttccagaaggaccctgtgggcctgatgagccgggtggcccagcctgccagcaagaagatcgatcagaacaagctgaaacctgagatggacgagaagggcaacctgaccaccgccggctttgcctgctctcagtgtggccagcccctgttcgtgtacaagctggagcaggtgtctgagaagggcaaggcttacaccaactacttcggacggtgcaatgtggccgagcacgaaaagctgatcctgctggcccagctgaagcccgagaaggatagcgacgaagccgtgacatatagcctgggaaagtttgggcagagggccctggatttctacagcattcatgtgaccaaggagtccacccaccccgtgaagcccctggcccagatcgccggaaacagatacgcctccggacctgtgggaaaggccctgagcgacgcatgtatgggcacaatcgcctccttcctgtctaagtaccaggacatcatcatcgaacaccagaaggtggtgaagggcaaccagaagagactggagagcctgcgggagctggccggcaaggaaaacctggaataccctagcgtgaccctgccacctcagcctcacaccaaggagggcgttgatgcctacaacgaagtgatcgcccgggtgcgaatgtgggtgaacctgaacctgtggcagaagctgaagctaagcagagatgatgccaagcctctgctgagactgaagggattcccttcctttcctctggtcgagagacaggccaacgaagtggactggtgggacatggtgtgtaacgtgaagaagctgatcaacgagaaaaaggaggatggcaaggtgttttggcagaatctggctggctacaagagacaggaagccctgagaccatacctgagcagcgaggaagatcggaagaagggaaagaaattcgctcggtaccagctgggcgacctgctgctgcacctggaaaagaagcacggcgaggactggggaaaggtgtacgacgaggcctgggagcggattgacaagaaagtggaaggcctgagcaagcacatcaagctggaagaggaacggagaagcgaggacgcccagagcaaggccgccctgaccgactggctgcgggctaaggccagcttcgtgatcgagggcctgaaggaggccgacaaggacgagttctgcagatgcgagctgaagctgcagaagtggtacggggacctgcggggaaagcccttcgccatcgaagccgagaacagcatcctggacatcagcggcttcagcaagcagtacaactgtgccttcatctggcagaaggacggcgtgaagaagctgaacctgtacctgatcatcaactacttcaagggcggcaagctgcggttcaagaagatcaaacctgaagccttcgaagccaacagattctacaccgtgatcaacaaaaagagcggcgagatcgtgcccatggaggtgaacttcaacttcgacgaccccaacctgatcatcctgcctctggcctttggcaagagacagggcagagaattcatctggaacgacctgctgtccctggaaaccggcagcctgaagctggccaacggaagagtgatcgagaagacactgtacaacagaagaacccggcaggatgagcctgccctgttcgtggccctgaccttcgagcggcgggaggtcctggactcctccaatatcaaaccaatgaacctgatcggcgtggcaagaggcgaaaacatccccgccgtgatcgccctgaccgaccccgagggctgcccactgagccggtttaaggatagcctgggaaacccaacccacatcctgagaatcggcgagagctataaggagaagcagcggaccatccaggccaagaaggaggtggagcagcggagagccggcggctacagccggaagtacgccagcaaagccaagaatctggcagacgatatggtgagaaacaccgctagagatctgctgtactacgccgtgacccaggatgccatgctgatcttcgccaacctgagccggggcttcggccggcagggcaagcggaccttcatggccgagagacagtacacacggatggaggactggctgaccgccaagctggcctacgagggcctgagcaagacctacctgtccaagacactggcccagtacacctccaagacatgcagcaactgtgggtttaccatcaccagcgccgactacgacagggtgctggagaagctgaagaagacagcaacaggctggatgaccacaattaacggcaaggagctgaaggtggagggccagattacctactacaacagatacaagagacagaacgtagtcaaggacctgtccgtcgagctggatagactgagcgaagaatctgtgaacaacgacatctcctcctggacaaagggcagaagcggagaagctctgagcctcctgaagaaaagattctcccatagacccgtgcaggagaagttcgtgtgcctgaactgcggcttcgagacacacgcagccgagcaagccgccctgaacatcgccagatcctggctgttcctgcggagccaggagtacaagaaataccagacaaacaagacaaccggcaacaccgataagagagccttcgtcgagacctggcagtccttttaccggaagaagcttaaggaggtgtggaaacctgccgtgcggtctggcggatctggcggaggctccacaagcgagcagggcctggtgagcttcgaggacgtggccgtggacttcacctggcaggagtggcaggagctggacgccgcccagaggaccctgtacagggacgtgatgctggagaactacagcagcctggtgagcctgggccactgcgtgaccaagcccgagctgatcttcaggctggagcacggcttcggcccctggagcatcggcgagaccagcctgtggaacctgcccggcgtgctggaggtgcccaccagccccaagaaaaagagaaaagtctaagctgccttctgcggggcttgccttctggccatgcccttcttctctcccttgcacctgtacctcttggtctttgaataaagcctgagtaggaaggctagcaaaaaaaaaaaaaaaaaaaaaaaaaaaaaaaaaaaaaaaaaaaaaaaaaaaaaaaaaaaaaaaaaaaaaaaaaaaaaaaa

SEQ ID NO: 6839 - RNA, 5797 nt, synthetic construct
  source 1..5797: mol_type = other RNA
aggaaataagagagaaaagaagagtaagaagaaatataagagccaccatggcccctaagaagaagcgtaaagtgagccggatggaacgcctcgtctacgaggtgcggcagaagtgcagaaacatcgaggacatctgcatctcctgcggatctctgaacgtgaccctggagcacccactgttcatcggcggcatgtgccagaactgtaaaaactgttttctggagtgtgcctatcaatacgacgatgacggctaccagagctactgcaccatctgttgcggcggaagagaggtgctgatgtgtggaaataacaactgctgccggtgcttctgcgtggaatgcgtggacctgctggtgggccccggcgccgcccaggccgctattaaggaagatccttggaactgctacatgtgcggccacaagggcacatacggcctgctgagacggagagaggactggcctagcagactgcagatgttcttcgccaataaccacgaccaggagttcgacccccctaaggtgtaccctcccgtccccgccgagaagagaaagcccatccgggtcctgagcctgttcgatggcatcgccaccggtctgctggtgctgaaggacctgggcatccaggtggataggtacattgcctccgaggtgtgcgaggactccatcaccgtgggaatggtgcgtcatcagggcaagatcatgtacgtgggcgacgtgcggagcgtgacacagaagcatatccaggagtggggccctttcgacctggtgatcggcggcagcccttgcaatgacctgagcatcgtgaacccagcccggaagggcctgtacgagggaaccggcagactgttcttcgagttttacagactgctgcacgacgcccggcctaaggaaggcgacgaccggcccttcttttggctgttcgagaatgtggtggccatgggagtcagcgacaagcgggatattagccggttcctggagagcaaccccgtgatgatcgatgccaaggaagtgagcgccgcccaccgggccagatacttctggggcaatctgcctggcatgaacagacccctggccagcaccgtgaacgacaagctggagctgcaggagtgcctggagcacggccggatcgccaagttcagcaaggtgagaaccatcaccacccgaagcaacagcatcaaacaaggcaaggaccagcactttcctgtgttcatgaacgagaaggaggacatcctgtggtgtaccgagatggagagagtgttcgggttcccagtccactacacagatgtcagcaacatgtctagactggccagacagagactgctgggaagaagctggtccgtccctgtgatcagacacctgttcgcccctctgaaggagtacttcgcctgcgtgagcagcggcaacagcaacgccaacagccggggccccagcttctctagcggcctggtgccactgtccctgagagggagccacatgggccccatggagatctacaaaaccgtgagcgcctggaagcggcagcctgtgcgcgtgctgagcctgtttcggaatatcgataaagtcctgaaaagcctgggattcctggagagcggctctggctccggcggtggcaccctgaagtacgtggaggatgtgacaaacgtggtcagacgggatgtggagaagtggggccccttcgatctggtgtacggcagcacccaacccctgggcagctcttgtgaccggtgccctggctggtacatgtttcagttccaccggatcctgcagtacgccctgccgagacaggagtcccagcggccattcttttggattttcatggacaacttgctgctgaccgaggatgaccaggaaactaccactcggttcctgcagaccgaagccgtgaccctgcaggacgtgagaggccgggactaccagaacgccatgcgggtgtggtccaacatccctggactgaaaagcaagcacgcacctctgacccctaaagaagaggagtacctgcaggcccaggtgcggagcagaagcaagctggacgcccctaaggtggatctgctggtgaagaattgcctcctgcccctgagagagtacttcaagtatttcagccagaatagtctgcccctgggcggcccaagcagcggcgcccctcctcccagcggcggcagcccagccggctccccaacctctaccgaggagggcacctctgagtccgccacccccgagagcggccctggcacctccaccgagcccagcgagggcagcgcacccggcagccctgccggcagccccacctccacagaggagggaaccagcaccgagcccagcgaaggcagcgccccaggcaccagcaccgagcctagtgagggcggctctggcggcggcagcgcccaggagattaaacggatcaacaagatcagaagaagacttgtgaaagacagcaacaccaagaaggccggcaagacaggccccatgaaaaccctgctggttagagtgatgacacccgatctgagagagcggctggaaaacctgagaaagaagcctgaaaatatcccccagcccatcagcaatacatctagagccaacctgaataagctgctgaccgattacaccgaaatgaagaaggcgatcctgcatgtgtactgggaagagttccagaaggaccctgtgggcctgatgagccgggtggcccagcctgccagcaagaagatcgatcagaacaagctgaaacctgagatggacgagaagggcaacctgaccaccgccggctttgcctgctctcagtgtggccagcccctgttcgtgtacaagctggagcaggtgtctgagaagggcaaggcttacaccaactacttcggacggtgcaatgtggccgagcacgaaaagctgatcctgctggcccagctgaagcccgagaaggatagcgacgaagccgtgacatatagcctgggaaagtttgggcagagggccctggatttctacagcattcatgtgaccaaggagtccacccaccccgtgaagcccctggcccagatcgccggaaacagatacgcctccggacctgtgggaaaggccctgagcgacgcatgtatgggcacaatcgcctccttcctgtctaagtaccaggacatcatcatcgaacaccagaaggtggtgaagggcaaccagaagagactggagagcctgcgggagctggccggcaaggaaaacctggaataccctagcgtgaccctgccacctcagcctcacaccaaggagggcgttgatgcctacaacgaagtgatcgcccgggtgcgaatgtgggtgaacctgaacctgtggcagaagctgaagctaagcagagatgatgccaagcctctgctgagactgaagggattcccttcctttcctctggtcgagagacaggccaacgaagtggactggtgggacatggtgtgtaacgtgaagaagctgatcaacgagaaaaaggaggatggcaaggtgttttggcagaatctggctggctacaagagacaggaagccctgagaccatacctgagcagcgaggaagatcggaagaagggaaagaaattcgctcggtaccagctgggcgacctgctgctgcacctggaaaagaagcacggcgaggactggggaaaggtgtacgacgaggcctgggagcggattgacaagaaagtggaaggcctgagcaagcacatcaagctggaagaggaacggagaagcgaggacgcccagagcaaggccgccctgaccgactggctgcgggctaaggccagcttcgtgatcgagggcctgaaggaggccgacaaggacgagttctgcagatgcgagctgaagctgcagaagtggtacggggacctgcggggaaagcccttcgccatcgaagccgagaacagcatcctggacatcagcggcttcagcaagcagtacaactgtgccttcatctggcagaaggacggcgtgaagaagctgaacctgtacctgatcatcaactacttcaagggcggcaagctgcggttcaagaagatcaaacctgaagccttcgaagccaacagattctacaccgtgatcaacaaaaagagcggcgagatcgtgcccatggaggtgaacttcaacttcgacgaccccaacctgatcatcctgcctctggcctttggcaagagacagggcagagaattcatctggaacgacctgctgtccctggaaaccggcagcctgaagctggccaacggaagagtgatcgagaagacactgtacaacagaagaacccggcaggatgagcctgccctgttcgtggccctgaccttcgagcggcgggaggtcctggactcctccaatatcaaaccaatgaacctgatcggcgtggcaagaggcgaaaacatccccgccgtgatcgccctgaccgaccccgagggctgcccactgagccggtttaaggatagcctgggaaacccaacccacatcctgagaatcggcgagagctataaggagaagcagcggaccatccaggccaagaaggaggtggagcagcggagagccggcggctacagccggaagtacgccagcaaagccaagaatctggcagacgatatggtgagaaacaccgctagagatctgctgtactacgccgtgacccaggatgccatgctgatcttcgccaacctgagccggggcttcggccggcagggcaagcggaccttcatggccgagagacagtacacacggatggaggactggctgaccgccaagctggcctacgagggcctgagcaagacctacctgtccaagacactggcccagtacacctccaagacatgcagcaactgtgggtttaccatcaccagcgccgactacgacagggtgctggagaagctgaagaagacagcaacaggctggatgaccacaattaacggcaaggagctgaaggtggagggccagattacctactacaacagatacaagagacagaacgtagtcaaggacctgtccgtcgagctggatagactgagcgaagaatctgtgaacaacgacatctcctcctggacaaagggcagaagcggagaagctctgagcctcctgaagaaaagattctcccatagacccgtgcaggagaagttcgtgtgcctgaactgcggcttcgagacacacgcagccgagcaagccgccctgaacatcgccagatcctggctgttcctgcggagccaggagtacaagaaataccagacaaacaagacaaccggcaacaccgataagagagccttcgtcgagacctggcagtccttttaccggaagaagcttaaggaggtgtggaaacctgccgtgcggtctggcggatctggcggaggctccacaagcgcccacggcagcgtgatgttcagcgacgtgagcatcgtgttcagccaggaggagtgggagtacctggacctgaagcagagggacctgtacagggacgtgatgctggagaactacagcaacctggtgagcctgggctgcttcatcagcaagcccgacgtgatcagcctgctggagcagggcaaggagccctggaaggtgatgaggaagggcaggggcaggtaccccgacctggagaccaggtacaccagccccaagaaaaagagaaaagtctaagctgccttctgcggggcttgccttctggccatgcccttcttctctcccttgcacctgtacctcttggtctttgaataaagcctgagtaggaaggctagcaaaaaaaaaaaaaaaaaaaaaaaaaaaaaaaaaaaaaaaaaaaaaaaaaaaaaaaaaaaaaaaaaaaaaaaaaaaaaaaa

SEQ ID NO: 6840 - RNA, 5797 nt, synthetic construct
  source 1..5797: mol_type = other RNA
aggaaataagagagaaaagaagagtaagaagaaatataagagccaccatggcccctaagaagaagcgtaaagtgagccggatggaacgcctcgtctacgaggtgcggcagaagtgcagaaacatcgaggacatctgcatctcctgcggatctctgaacgtgaccctggagcacccactgttcatcggcggcatgtgccagaactgtaaaaactgttttctggagtgtgcctatcaatacgacgatgacggctaccagagctactgcaccatctgttgcggcggaagagaggtgctgatgtgtggaaataacaactgctgccggtgcttctgcgtggaatgcgtggacctgctggtgggccccggcgccgcccaggccgctattaaggaagatccttggaactgctacatgtgcggccacaagggcacatacggcctgctgagacggagagaggactggcctagcagactgcagatgttcttcgccaataaccacgaccaggagttcgacccccctaaggtgtaccctcccgtccccgccgagaagagaaagcccatccgggtcctgagcctgttcgatggcatcgccaccggtctgctggtgctgaaggacctgggcatccaggtggataggtacattgcctccgaggtgtgcgaggactccatcaccgtgggaatggtgcgtcatcagggcaagatcatgtacgtgggcgacgtgcggagcgtgacacagaagcatatccaggagtggggccctttcgacctggtgatcggcggcagcccttgcaatgacctgagcatcgtgaacccagcccggaagggcctgtacgagggaaccggcagactgttcttcgagttttacagactgctgcacgacgcccggcctaaggaaggcgacgaccggcccttcttttggctgttcgagaatgtggtggccatgggagtcagcgacaagcgggatattagccggttcctggagagcaaccccgtgatgatcgatgccaaggaagtgagcgccgcccaccgggccagatacttctggggcaatctgcctggcatgaacagacccctggccagcaccgtgaacgacaagctggagctgcaggagtgcctggagcacggccggatcgccaagttcagcaaggtgagaaccatcaccacccgaagcaacagcatcaaacaaggcaaggaccagcactttcctgtgttcatgaacgagaaggaggacatcctgtggtgtaccgagatggagagagtgttcgggttcccagtccactacacagatgtcagcaacatgtctagactggccagacagagactgctgggaagaagctggtccgtccctgtgatcagacacctgttcgcccctctgaaggagtacttcgcctgcgtgagcagcggcaacagcaacgccaacagccggggccccagcttctctagcggcctggtgccactgtccctgagagggagccacatgggccccatggagatctacaaaaccgtgagcgcctggaagcggcagcctgtgcgcgtgctgagcctgtttcggaatatcgataaagtcctgaaaagcctgggattcctggagagcggctctggctccggcggtggcaccctgaagtacgtggaggatgtgacaaacgtggtcagacgggatgtggagaagtggggccccttcgatctggtgtacggcagcacccaacccctgggcagctcttgtgaccggtgccctggctggtacatgtttcagttccaccggatcctgcagtacgccctgccgagacaggagtcccagcggccattcttttggattttcatggacaacttgctgctgaccgaggatgaccaggaaactaccactcggttcctgcagaccgaagccgtgaccctgcaggacgtgagaggccgggactaccagaacgccatgcgggtgtggtccaacatccctggactgaaaagcaagcacgcacctctgacccctaaagaagaggagtacctgcaggcccaggtgcggagcagaagcaagctggacgcccctaaggtggatctgctggtgaagaattgcctcctgcccctgagagagtacttcaagtatttcagccagaatagtctgcccctgggcggcccaagcagcggcgcccctcctcccagcggcggcagcccagccggctccccaacctctaccgaggagggcacctctgagtccgccacccccgagagcggccctggcacctccaccgagcccagcgagggcagcgcacccggcagccctgccggcagccccacctccacagaggagggaaccagcaccgagcccagcgaaggcagcgccccaggcaccagcaccgagcctagtgagggcggctctggcggcggcagcgcccaggagattaaacggatcaacaagatcagaagaagacttgtgaaagacagcaacaccaagaaggccggcaagacaggccccatgaaaaccctgctggttagagtgatgacacccgatctgagagagcggctggaaaacctgagaaagaagcctgaaaatatcccccagcccatcagcaatacatctagagccaacctgaataagctgctgaccgattacaccgaaatgaagaaggcgatcctgcatgtgtactgggaagagttccagaaggaccctgtgggcctgatgagccgggtggcccagcctgccagcaagaagatcgatcagaacaagctgaaacctgagatggacgagaagggcaacctgaccaccgccggctttgcctgctctcagtgtggccagcccctgttcgtgtacaagctggagcaggtgtctgagaagggcaaggcttacaccaactacttcggacggtgcaatgtggccgagcacgaaaagctgatcctgctggcccagctgaagcccgagaaggatagcgacgaagccgtgacatatagcctgggaaagtttgggcagagggccctggatttctacagcattcatgtgaccaaggagtccacccaccccgtgaagcccctggcccagatcgccggaaacagatacgcctccggacctgtgggaaaggccctgagcgacgcatgtatgggcacaatcgcctccttcctgtctaagtaccaggacatcatcatcgaacaccagaaggtggtgaagggcaaccagaagagactggagagcctgcgggagctggccggcaaggaaaacctggaataccctagcgtgaccctgccacctcagcctcacaccaaggagggcgttgatgcctacaacgaagtgatcgcccgggtgcgaatgtgggtgaacctgaacctgtggcagaagctgaagctaagcagagatgatgccaagcctctgctgagactgaagggattcccttcctttcctctggtcgagagacaggccaacgaagtggactggtgggacatggtgtgtaacgtgaagaagctgatcaacgagaaaaaggaggatggcaaggtgttttggcagaatctggctggctacaagagacaggaagccctgagaccatacctgagcagcgaggaagatcggaagaagggaaagaaattcgctcggtaccagctgggcgacctgctgctgcacctggaaaagaagcacggcgaggactggggaaaggtgtacgacgaggcctgggagcggattgacaagaaagtggaaggcctgagcaagcacatcaagctggaagaggaacggagaagcgaggacgcccagagcaaggccgccctgaccgactggctgcgggctaaggccagcttcgtgatcgagggcctgaaggaggccgacaaggacgagttctgcagatgcgagctgaagctgcagaagtggtacggggacctgcggggaaagcccttcgccatcgaagccgagaacagcatcctggacatcagcggcttcagcaagcagtacaactgtgccttcatctggcagaaggacggcgtgaagaagctgaacctgtacctgatcatcaactacttcaagggcggcaagctgcggttcaagaagatcaaacctgaagccttcgaagccaacagattctacaccgtgatcaacaaaaagagcggcgagatcgtgcccatggaggtgaacttcaacttcgacgaccccaacctgatcatcctgcctctggcctttggcaagagacagggcagagaattcatctggaacgacctgctgtccctggaaaccggcagcctgaagctggccaacggaagagtgatcgagaagacactgtacaacagaagaacccggcaggatgagcctgccctgttcgtggccctgaccttcgagcggcgggaggtcctggactcctccaatatcaaaccaatgaacctgatcggcgtggcaagaggcgaaaacatccccgccgtgatcgccctgaccgaccccgagggctgcccactgagccggtttaaggatagcctgggaaacccaacccacatcctgagaatcggcgagagctataaggagaagcagcggaccatccaggccaagaaggaggtggagcagcggagagccggcggctacagccggaagtacgccagcaaagccaagaatctggcagacgatatggtgagaaacaccgctagagatctgctgtactacgccgtgacccaggatgccatgctgatcttcgccaacctgagccggggcttcggccggcagggcaagcggaccttcatggccgagagacagtacacacggatggaggactggctgaccgccaagctggcctacgagggcctgagcaagacctacctgtccaagacactggcccagtacacctccaagacatgcagcaactgtgggtttaccatcaccagcgccgactacgacagggtgctggagaagctgaagaagacagcaacaggctggatgaccacaattaacggcaaggagctgaaggtggagggccagattacctactacaacagatacaagagacagaacgtagtcaaggacctgtccgtcgagctggatagactgagcgaagaatctgtgaacaacgacatctcctcctggacaaagggcagaagcggagaagctctgagcctcctgaagaaaagattctcccatagacccgtgcaggagaagttcgtgtgcctgaactgcggcttcgagacacacgcagccgagcaagccgccctgaacatcgccagatcctggctgttcctgcggagccaggagtacaagaaataccagacaaacaagacaaccggcaacaccgataagagagccttcgtcgagacctggcagtccttttaccggaagaagcttaaggaggtgtggaaacctgccgtgcggtctggcggatctggcggaggctccacaagcccccaggagagcgtggccttcgaggacgtggccgtgtacttcaccaccaaggagtgggccatcatgatgcccgccgagagggccctgtacagggacgtgatgctggagaactacgaggccgtggccttcgtggtgccccccaccagcaagcccgccctggtgagccacctggagcagggcaaggagagctgcttcatccagccccagggcgtgctgagcaggagcgactggagggccggcctgaccagccccaagaaaaagagaaaagtctaagctgccttctgcggggcttgccttctggccatgcccttcttctctcccttgcacctgtacctcttggtctttgaataaagcctgagtaggaaggctagcaaaaaaaaaaaaaaaaaaaaaaaaaaaaaaaaaaaaaaaaaaaaaaaaaaaaaaaaaaaaaaaaaaaaaaaaaaaaaaaa

SEQ ID NO: 6841 - RNA, 5797 nt, synthetic construct
  source 1..5797: mol_type = other RNA
aggaaataagagagaaaagaagagtaagaagaaatataagagccaccatggcccctaagaagaagcgtaaagtgagccggatggaacgcctcgtctacgaggtgcggcagaagtgcagaaacatcgaggacatctgcatctcctgcggatctctgaacgtgaccctggagcacccactgttcatcggcggcatgtgccagaactgtaaaaactgttttctggagtgtgcctatcaatacgacgatgacggctaccagagctactgcaccatctgttgcggcggaagagaggtgctgatgtgtggaaataacaactgctgccggtgcttctgcgtggaatgcgtggacctgctggtgggccccggcgccgcccaggccgctattaaggaagatccttggaactgctacatgtgcggccacaagggcacatacggcctgctgagacggagagaggactggcctagcagactgcagatgttcttcgccaataaccacgaccaggagttcgacccccctaaggtgtaccctcccgtccccgccgagaagagaaagcccatccgggtcctgagcctgttcgatggcatcgccaccggtctgctggtgctgaaggacctgggcatccaggtggataggtacattgcctccgaggtgtgcgaggactccatcaccgtgggaatggtgcgtcatcagggcaagatcatgtacgtgggcgacgtgcggagcgtgacacagaagcatatccaggagtggggccctttcgacctggtgatcggcggcagcccttgcaatgacctgagcatcgtgaacccagcccggaagggcctgtacgagggaaccggcagactgttcttcgagttttacagactgctgcacgacgcccggcctaaggaaggcgacgaccggcccttcttttggctgttcgagaatgtggtggccatgggagtcagcgacaagcgggatattagccggttcctggagagcaaccccgtgatgatcgatgccaaggaagtgagcgccgcccaccgggccagatacttctggggcaatctgcctggcatgaacagacccctggccagcaccgtgaacgacaagctggagctgcaggagtgcctggagcacggccggatcgccaagttcagcaaggtgagaaccatcaccacccgaagcaacagcatcaaacaaggcaaggaccagcactttcctgtgttcatgaacgagaaggaggacatcctgtggtgtaccgagatggagagagtgttcgggttcccagtccactacacagatgtcagcaacatgtctagactggccagacagagactgctgggaagaagctggtccgtccctgtgatcagacacctgttcgcccctctgaaggagtacttcgcctgcgtgagcagcggcaacagcaacgccaacagccggggccccagcttctctagcggcctggtgccactgtccctgagagggagccacatgggccccatggagatctacaaaaccgtgagcgcctggaagcggcagcctgtgcgcgtgctgagcctgtttcggaatatcgataaagtcctgaaaagcctgggattcctggagagcggctctggctccggcggtggcaccctgaagtacgtggaggatgtgacaaacgtggtcagacgggatgtggagaagtggggccccttcgatctggtgtacggcagcacccaacccctgggcagctcttgtgaccggtgccctggctggtacatgtttcagttccaccggatcctgcagtacgccctgccgagacaggagtcccagcggccattcttttggattttcatggacaacttgctgctgaccgaggatgaccaggaaactaccactcggttcctgcagaccgaagccgtgaccctgcaggacgtgagaggccgggactaccagaacgccatgcgggtgtggtccaacatccctggactgaaaagcaagcacgcacctctgacccctaaagaagaggagtacctgcaggcccaggtgcggagcagaagcaagctggacgcccctaaggtggatctgctggtgaagaattgcctcctgcccctgagagagtacttcaagtatttcagccagaatagtctgcccctgggcggcccaagcagcggcgcccctcctcccagcggcggcagcccagccggctccccaacctctaccgaggagggcacctctgagtccgccacccccgagagcggccctggcacctccaccgagcccagcgagggcagcgcacccggcagccctgccggcagccccacctccacagaggagggaaccagcaccgagcccagcgaaggcagcgccccaggcaccagcaccgagcctagtgagggcggctctggcggcggcagcgcccaggagattaaacggatcaacaagatcagaagaagacttgtgaaagacagcaacaccaagaaggccggcaagacaggccccatgaaaaccctgctggttagagtgatgacacccgatctgagagagcggctggaaaacctgagaaagaagcctgaaaatatcccccagcccatcagcaatacatctagagccaacctgaataagctgctgaccgattacaccgaaatgaagaaggcgatcctgcatgtgtactgggaagagttccagaaggaccctgtgggcctgatgagccgggtggcccagcctgccagcaagaagatcgatcagaacaagctgaaacctgagatggacgagaagggcaacctgaccaccgccggctttgcctgctctcagtgtggccagcccctgttcgtgtacaagctggagcaggtgtctgagaagggcaaggcttacaccaactacttcggacggtgcaatgtggccgagcacgaaaagctgatcctgctggcccagctgaagcccgagaaggatagcgacgaagccgtgacatatagcctgggaaagtttgggcagagggccctggatttctacagcattcatgtgaccaaggagtccacccaccccgtgaagcccctggcccagatcgccggaaacagatacgcctccggacctgtgggaaaggccctgagcgacgcatgtatgggcacaatcgcctccttcctgtctaagtaccaggacatcatcatcgaacaccagaaggtggtgaagggcaaccagaagagactggagagcctgcgggagctggccggcaaggaaaacctggaataccctagcgtgaccctgccacctcagcctcacaccaaggagggcgttgatgcctacaacgaagtgatcgcccgggtgcgaatgtgggtgaacctgaacctgtggcagaagctgaagctaagcagagatgatgccaagcctctgctgagactgaagggattcccttcctttcctctggtcgagagacaggccaacgaagtggactggtgggacatggtgtgtaacgtgaagaagctgatcaacgagaaaaaggaggatggcaaggtgttttggcagaatctggctggctacaagagacaggaagccctgagaccatacctgagcagcgaggaagatcggaagaagggaaagaaattcgctcggtaccagctgggcgacctgctgctgcacctggaaaagaagcacggcgaggactggggaaaggtgtacgacgaggcctgggagcggattgacaagaaagtggaaggcctgagcaagcacatcaagctggaagaggaacggagaagcgaggacgcccagagcaaggccgccctgaccgactggctgcgggctaaggccagcttcgtgatcgagggcctgaaggaggccgacaaggacgagttctgcagatgcgagctgaagctgcagaagtggtacggggacctgcggggaaagcccttcgccatcgaagccgagaacagcatcctggacatcagcggcttcagcaagcagtacaactgtgccttcatctggcagaaggacggcgtgaagaagctgaacctgtacctgatcatcaactacttcaagggcggcaagctgcggttcaagaagatcaaacctgaagccttcgaagccaacagattctacaccgtgatcaacaaaaagagcggcgagatcgtgcccatggaggtgaacttcaacttcgacgaccccaacctgatcatcctgcctctggcctttggcaagagacagggcagagaattcatctggaacgacctgctgtccctggaaaccggcagcctgaagctggccaacggaagagtgatcgagaagacactgtacaacagaagaacccggcaggatgagcctgccctgttcgtggccctgaccttcgagcggcgggaggtcctggactcctccaatatcaaaccaatgaacctgatcggcgtggcaagaggcgaaaacatccccgccgtgatcgccctgaccgaccccgagggctgcccactgagccggtttaaggatagcctgggaaacccaacccacatcctgagaatcggcgagagctataaggagaagcagcggaccatccaggccaagaaggaggtggagcagcggagagccggcggctacagccggaagtacgccagcaaagccaagaatctggcagacgatatggtgagaaacaccgctagagatctgctgtactacgccgtgacccaggatgccatgctgatcttcgccaacctgagccggggcttcggccggcagggcaagcggaccttcatggccgagagacagtacacacggatggaggactggctgaccgccaagctggcctacgagggcctgagcaagacctacctgtccaagacactggcccagtacacctccaagacatgcagcaactgtgggtttaccatcaccagcgccgactacgacagggtgctggagaagctgaagaagacagcaacaggctggatgaccacaattaacggcaaggagctgaaggtggagggccagattacctactacaacagatacaagagacagaacgtagtcaaggacctgtccgtcgagctggatagactgagcgaagaatctgtgaacaacgacatctcctcctggacaaagggcagaagcggagaagctctgagcctcctgaagaaaagattctcccatagacccgtgcaggagaagttcgtgtgcctgaactgcggcttcgagacacacgcagccgagcaagccgccctgaacatcgccagatcctggctgttcctgcggagccaggagtacaagaaataccagacaaacaagacaaccggcaacaccgataagagagccttcgtcgagacctggcagtccttttaccggaagaagcttaaggaggtgtggaaacctgccgtgcggtctggcggatctggcggaggctccacaagcacccaggacagcgtgaccttcaaggacgtggccgtggacttcaccagggaggagtgggagaggctgaacagcacccagagggacctgtacagggacgtgatgctggagaactacaggaacctggtgagcctgggcctggccgtgagcaagcccgacatcatcttccagctggagcaggagaaggagctgtggatgctgaagaggaaggtgctgaggagcaccaggcccgcccagaagaccgagaccagccccaagaaaaagagaaaagtctaagctgccttctgcggggcttgccttctggccatgcccttcttctctcccttgcacctgtacctcttggtctttgaataaagcctgagtaggaaggctagcaaaaaaaaaaaaaaaaaaaaaaaaaaaaaaaaaaaaaaaaaaaaaaaaaaaaaaaaaaaaaaaaaaaaaaaaaaaaaaaa

SEQ ID NO: 6842 - RNA, 5797 nt, synthetic construct
  source 1..5797: mol_type = other RNA
aggaaataagagagaaaagaagagtaagaagaaatataagagccaccatggcccctaagaagaagcgtaaagtgagccggatggaacgcctcgtctacgaggtgcggcagaagtgcagaaacatcgaggacatctgcatctcctgcggatctctgaacgtgaccctggagcacccactgttcatcggcggcatgtgccagaactgtaaaaactgttttctggagtgtgcctatcaatacgacgatgacggctaccagagctactgcaccatctgttgcggcggaagagaggtgctgatgtgtggaaataacaactgctgccggtgcttctgcgtggaatgcgtggacctgctggtgggccccggcgccgcccaggccgctattaaggaagatccttggaactgctacatgtgcggccacaagggcacatacggcctgctgagacggagagaggactggcctagcagactgcagatgttcttcgccaataaccacgaccaggagttcgacccccctaaggtgtaccctcccgtccccgccgagaagagaaagcccatccgggtcctgagcctgttcgatggcatcgccaccggtctgctggtgctgaaggacctgggcatccaggtggataggtacattgcctccgaggtgtgcgaggactccatcaccgtgggaatggtgcgtcatcagggcaagatcatgtacgtgggcgacgtgcggagcgtgacacagaagcatatccaggagtggggccctttcgacctggtgatcggcggcagcccttgcaatgacctgagcatcgtgaacccagcccggaagggcctgtacgagggaaccggcagactgttcttcgagttttacagactgctgcacgacgcccggcctaaggaaggcgacgaccggcccttcttttggctgttcgagaatgtggtggccatgggagtcagcgacaagcgggatattagccggttcctggagagcaaccccgtgatgatcgatgccaaggaagtgagcgccgcccaccgggccagatacttctggggcaatctgcctggcatgaacagacccctggccagcaccgtgaacgacaagctggagctgcaggagtgcctggagcacggccggatcgccaagttcagcaaggtgagaaccatcaccacccgaagcaacagcatcaaacaaggcaaggaccagcactttcctgtgttcatgaacgagaaggaggacatcctgtggtgtaccgagatggagagagtgttcgggttcccagtccactacacagatgtcagcaacatgtctagactggccagacagagactgctgggaagaagctggtccgtccctgtgatcagacacctgttcgcccctctgaaggagtacttcgcctgcgtgagcagcggcaacagcaacgccaacagccggggccccagcttctctagcggcctggtgccactgtccctgagagggagccacatgggccccatggagatctacaaaaccgtgagcgcctggaagcggcagcctgtgcgcgtgctgagcctgtttcggaatatcgataaagtcctgaaaagcctgggattcctggagagcggctctggctccggcggtggcaccctgaagtacgtggaggatgtgacaaacgtggtcagacgggatgtggagaagtggggccccttcgatctggtgtacggcagcacccaacccctgggcagctcttgtgaccggtgccctggctggtacatgtttcagttccaccggatcctgcagtacgccctgccgagacaggagtcccagcggccattcttttggattttcatggacaacttgctgctgaccgaggatgaccaggaaactaccactcggttcctgcagaccgaagccgtgaccctgcaggacgtgagaggccgggactaccagaacgccatgcgggtgtggtccaacatccctggactgaaaagcaagcacgcacctctgacccctaaagaagaggagtacctgcaggcccaggtgcggagcagaagcaagctggacgcccctaaggtggatctgctggtgaagaattgcctcctgcccctgagagagtacttcaagtatttcagccagaatagtctgcccctgggcggcccaagcagcggcgcccctcctcccagcggcggcagcccagccggctccccaacctctaccgaggagggcacctctgagtccgccacccccgagagcggccctggcacctccaccgagcccagcgagggcagcgcacccggcagccctgccggcagccccacctccacagaggagggaaccagcaccgagcccagcgaaggcagcgccccaggcaccagcaccgagcctagtgagggcggctctggcggcggcagcgcccaggagattaaacggatcaacaagatcagaagaagacttgtgaaagacagcaacaccaagaaggccggcaagacaggccccatgaaaaccctgctggttagagtgatgacacccgatctgagagagcggctggaaaacctgagaaagaagcctgaaaatatcccccagcccatcagcaatacatctagagccaacctgaataagctgctgaccgattacaccgaaatgaagaaggcgatcctgcatgtgtactgggaagagttccagaaggaccctgtgggcctgatgagccgggtggcccagcctgccagcaagaagatcgatcagaacaagctgaaacctgagatggacgagaagggcaacctgaccaccgccggctttgcctgctctcagtgtggccagcccctgttcgtgtacaagctggagcaggtgtctgagaagggcaaggcttacaccaactacttcggacggtgcaatgtggccgagcacgaaaagctgatcctgctggcccagctgaagcccgagaaggatagcgacgaagccgtgacatatagcctgggaaagtttgggcagagggccctggatttctacagcattcatgtgaccaaggagtccacccaccccgtgaagcccctggcccagatcgccggaaacagatacgcctccggacctgtgggaaaggccctgagcgacgcatgtatgggcacaatcgcctccttcctgtctaagtaccaggacatcatcatcgaacaccagaaggtggtgaagggcaaccagaagagactggagagcctgcgggagctggccggcaaggaaaacctggaataccctagcgtgaccctgccacctcagcctcacaccaaggagggcgttgatgcctacaacgaagtgatcgcccgggtgcgaatgtgggtgaacctgaacctgtggcagaagctgaagctaagcagagatgatgccaagcctctgctgagactgaagggattcccttcctttcctctggtcgagagacaggccaacgaagtggactggtgggacatggtgtgtaacgtgaagaagctgatcaacgagaaaaaggaggatggcaaggtgttttggcagaatctggctggctacaagagacaggaagccctgagaccatacctgagcagcgaggaagatcggaagaagggaaagaaattcgctcggtaccagctgggcgacctgctgctgcacctggaaaagaagcacggcgaggactggggaaaggtgtacgacgaggcctgggagcggattgacaagaaagtggaaggcctgagcaagcacatcaagctggaagaggaacggagaagcgaggacgcccagagcaaggccgccctgaccgactggctgcgggctaaggccagcttcgtgatcgagggcctgaaggaggccgacaaggacgagttctgcagatgcgagctgaagctgcagaagtggtacggggacctgcggggaaagcccttcgccatcgaagccgagaacagcatcctggacatcagcggcttcagcaagcagtacaactgtgccttcatctggcagaaggacggcgtgaagaagctgaacctgtacctgatcatcaactacttcaagggcggcaagctgcggttcaagaagatcaaacctgaagccttcgaagccaacagattctacaccgtgatcaacaaaaagagcggcgagatcgtgcccatggaggtgaacttcaacttcgacgaccccaacctgatcatcctgcctctggcctttggcaagagacagggcagagaattcatctggaacgacctgctgtccctggaaaccggcagcctgaagctggccaacggaagagtgatcgagaagacactgtacaacagaagaacccggcaggatgagcctgccctgttcgtggccctgaccttcgagcggcgggaggtcctggactcctccaatatcaaaccaatgaacctgatcggcgtggcaagaggcgaaaacatccccgccgtgatcgccctgaccgaccccgagggctgcccactgagccggtttaaggatagcctgggaaacccaacccacatcctgagaatcggcgagagctataaggagaagcagcggaccatccaggccaagaaggaggtggagcagcggagagccggcggctacagccggaagtacgccagcaaagccaagaatctggcagacgatatggtgagaaacaccgctagagatctgctgtactacgccgtgacccaggatgccatgctgatcttcgccaacctgagccggggcttcggccggcagggcaagcggaccttcatggccgagagacagtacacacggatggaggactggctgaccgccaagctggcctacgagggcctgagcaagacctacctgtccaagacactggcccagtacacctccaagacatgcagcaactgtgggtttaccatcaccagcgccgactacgacagggtgctggagaagctgaagaagacagcaacaggctggatgaccacaattaacggcaaggagctgaaggtggagggccagattacctactacaacagatacaagagacagaacgtagtcaaggacctgtccgtcgagctggatagactgagcgaagaatctgtgaacaacgacatctcctcctggacaaagggcagaagcggagaagctctgagcctcctgaagaaaagattctcccatagacccgtgcaggagaagttcgtgtgcctgaactgcggcttcgagacacacgcagccgagcaagccgccctgaacatcgccagatcctggctgttcctgcggagccaggagtacaagaaataccagacaaacaagacaaccggcaacaccgataagagagccttcgtcgagacctggcagtccttttaccggaagaagcttaaggaggtgtggaaacctgccgtgcggtctggcggatctggcggaggctccacaagcaggcaggagcccgtgaccttcgaggacgtggccgtgtacttcacccagaacgagtgggtgatcctggaccccgcccagagggccctgtacagggaggtgatgctggagaactacgccaacgtggccagcctggccttcagcttcaccaggcccgtgctggtgagccagctggagaggggcgagctgccccccggcctggacccctgggagagggccagccccgaggccctgaggggcatctgcaccagccccaagaaaaagagaaaagtctaagctgccttctgcggggcttgccttctggccatgcccttcttctctcccttgcacctgtacctcttggtctttgaataaagcctgagtaggaaggctagcaaaaaaaaaaaaaaaaaaaaaaaaaaaaaaaaaaaaaaaaaaaaaaaaaaaaaaaaaaaaaaaaaaaaaaaaaaaaaaaa

SEQ ID NO: 6843 - RNA, 5797 nt, synthetic construct
  source 1..5797: mol_type = other RNA
aggaaataagagagaaaagaagagtaagaagaaatataagagccaccatggcccctaagaagaagcgtaaagtgagccggatggaacgcctcgtctacgaggtgcggcagaagtgcagaaacatcgaggacatctgcatctcctgcggatctctgaacgtgaccctggagcacccactgttcatcggcggcatgtgccagaactgtaaaaactgttttctggagtgtgcctatcaatacgacgatgacggctaccagagctactgcaccatctgttgcggcggaagagaggtgctgatgtgtggaaataacaactgctgccggtgcttctgcgtggaatgcgtggacctgctggtgggccccggcgccgcccaggccgctattaaggaagatccttggaactgctacatgtgcggccacaagggcacatacggcctgctgagacggagagaggactggcctagcagactgcagatgttcttcgccaataaccacgaccaggagttcgacccccctaaggtgtaccctcccgtccccgccgagaagagaaagcccatccgggtcctgagcctgttcgatggcatcgccaccggtctgctggtgctgaaggacctgggcatccaggtggataggtacattgcctccgaggtgtgcgaggactccatcaccgtgggaatggtgcgtcatcagggcaagatcatgtacgtgggcgacgtgcggagcgtgacacagaagcatatccaggagtggggccctttcgacctggtgatcggcggcagcccttgcaatgacctgagcatcgtgaacccagcccggaagggcctgtacgagggaaccggcagactgttcttcgagttttacagactgctgcacgacgcccggcctaaggaaggcgacgaccggcccttcttttggctgttcgagaatgtggtggccatgggagtcagcgacaagcgggatattagccggttcctggagagcaaccccgtgatgatcgatgccaaggaagtgagcgccgcccaccgggccagatacttctggggcaatctgcctggcatgaacagacccctggccagcaccgtgaacgacaagctggagctgcaggagtgcctggagcacggccggatcgccaagttcagcaaggtgagaaccatcaccacccgaagcaacagcatcaaacaaggcaaggaccagcactttcctgtgttcatgaacgagaaggaggacatcctgtggtgtaccgagatggagagagtgttcgggttcccagtccactacacagatgtcagcaacatgtctagactggccagacagagactgctgggaagaagctggtccgtccctgtgatcagacacctgttcgcccctctgaaggagtacttcgcctgcgtgagcagcggcaacagcaacgccaacagccggggccccagcttctctagcggcctggtgccactgtccctgagagggagccacatgggccccatggagatctacaaaaccgtgagcgcctggaagcggcagcctgtgcgcgtgctgagcctgtttcggaatatcgataaagtcctgaaaagcctgggattcctggagagcggctctggctccggcggtggcaccctgaagtacgtggaggatgtgacaaacgtggtcagacgggatgtggagaagtggggccccttcgatctggtgtacggcagcacccaacccctgggcagctcttgtgaccggtgccctggctggtacatgtttcagttccaccggatcctgcagtacgccctgccgagacaggagtcccagcggccattcttttggattttcatggacaacttgctgctgaccgaggatgaccaggaaactaccactcggttcctgcagaccgaagccgtgaccctgcaggacgtgagaggccgggactaccagaacgccatgcgggtgtggtccaacatccctggactgaaaagcaagcacgcacctctgacccctaaagaagaggagtacctgcaggcccaggtgcggagcagaagcaagctggacgcccctaaggtggatctgctggtgaagaattgcctcctgcccctgagagagtacttcaagtatttcagccagaatagtctgcccctgggcggcccaagcagcggcgcccctcctcccagcggcggcagcccagccggctccccaacctctaccgaggagggcacctctgagtccgccacccccgagagcggccctggcacctccaccgagcccagcgagggcagcgcacccggcagccctgccggcagccccacctccacagaggagggaaccagcaccgagcccagcgaaggcagcgccccaggcaccagcaccgagcctagtgagggcggctctggcggcggcagcgcccaggagattaaacggatcaacaagatcagaagaagacttgtgaaagacagcaacaccaagaaggccggcaagacaggccccatgaaaaccctgctggttagagtgatgacacccgatctgagagagcggctggaaaacctgagaaagaagcctgaaaatatcccccagcccatcagcaatacatctagagccaacctgaataagctgctgaccgattacaccgaaatgaagaaggcgatcctgcatgtgtactgggaagagttccagaaggaccctgtgggcctgatgagccgggtggcccagcctgccagcaagaagatcgatcagaacaagctgaaacctgagatggacgagaagggcaacctgaccaccgccggctttgcctgctctcagtgtggccagcccctgttcgtgtacaagctggagcaggtgtctgagaagggcaaggcttacaccaactacttcggacggtgcaatgtggccgagcacgaaaagctgatcctgctggcccagctgaagcccgagaaggatagcgacgaagccgtgacatatagcctgggaaagtttgggcagagggccctggatttctacagcattcatgtgaccaaggagtccacccaccccgtgaagcccctggcccagatcgccggaaacagatacgcctccggacctgtgggaaaggccctgagcgacgcatgtatgggcacaatcgcctccttcctgtctaagtaccaggacatcatcatcgaacaccagaaggtggtgaagggcaaccagaagagactggagagcctgcgggagctggccggcaaggaaaacctggaataccctagcgtgaccctgccacctcagcctcacaccaaggagggcgttgatgcctacaacgaagtgatcgcccgggtgcgaatgtgggtgaacctgaacctgtggcagaagctgaagctaagcagagatgatgccaagcctctgctgagactgaagggattcccttcctttcctctggtcgagagacaggccaacgaagtggactggtgggacatggtgtgtaacgtgaagaagctgatcaacgagaaaaaggaggatggcaaggtgttttggcagaatctggctggctacaagagacaggaagccctgagaccatacctgagcagcgaggaagatcggaagaagggaaagaaattcgctcggtaccagctgggcgacctgctgctgcacctggaaaagaagcacggcgaggactggggaaaggtgtacgacgaggcctgggagcggattgacaagaaagtggaaggcctgagcaagcacatcaagctggaagaggaacggagaagcgaggacgcccagagcaaggccgccctgaccgactggctgcgggctaaggccagcttcgtgatcgagggcctgaaggaggccgacaaggacgagttctgcagatgcgagctgaagctgcagaagtggtacggggacctgcggggaaagcccttcgccatcgaagccgagaacagcatcctggacatcagcggcttcagcaagcagtacaactgtgccttcatctggcagaaggacggcgtgaagaagctgaacctgtacctgatcatcaactacttcaagggcggcaagctgcggttcaagaagatcaaacctgaagccttcgaagccaacagattctacaccgtgatcaacaaaaagagcggcgagatcgtgcccatggaggtgaacttcaacttcgacgaccccaacctgatcatcctgcctctggcctttggcaagagacagggcagagaattcatctggaacgacctgctgtccctggaaaccggcagcctgaagctggccaacggaagagtgatcgagaagacactgtacaacagaagaacccggcaggatgagcctgccctgttcgtggccctgaccttcgagcggcgggaggtcctggactcctccaatatcaaaccaatgaacctgatcggcgtggcaagaggcgaaaacatccccgccgtgatcgccctgaccgaccccgagggctgcccactgagccggtttaaggatagcctgggaaacccaacccacatcctgagaatcggcgagagctataaggagaagcagcggaccatccaggccaagaaggaggtggagcagcggagagccggcggctacagccggaagtacgccagcaaagccaagaatctggcagacgatatggtgagaaacaccgctagagatctgctgtactacgccgtgacccaggatgccatgctgatcttcgccaacctgagccggggcttcggccggcagggcaagcggaccttcatggccgagagacagtacacacggatggaggactggctgaccgccaagctggcctacgagggcctgagcaagacctacctgtccaagacactggcccagtacacctccaagacatgcagcaactgtgggtttaccatcaccagcgccgactacgacagggtgctggagaagctgaagaagacagcaacaggctggatgaccacaattaacggcaaggagctgaaggtggagggccagattacctactacaacagatacaagagacagaacgtagtcaaggacctgtccgtcgagctggatagactgagcgaagaatctgtgaacaacgacatctcctcctggacaaagggcagaagcggagaagctctgagcctcctgaagaaaagattctcccatagacccgtgcaggagaagttcgtgtgcctgaactgcggcttcgagacacacgcagccgagcaagccgccctgaacatcgccagatcctggctgttcctgcggagccaggagtacaagaaataccagacaaacaagacaaccggcaacaccgataagagagccttcgtcgagacctggcagtccttttaccggaagaagcttaaggaggtgtggaaacctgccgtgcggtctggcggatctggcggaggctccacaagcaagcccgagctggtgagcttcgccgacgtggccgtgtacttcagcccccaggagtggggctgcctgaggcccgcccagagggccctgtacagggaggtgatgagggagacctacggcctgctgggcgccctgggcttccccggccccaagcccgccctgatcagctggatggagcaggagagcgaggcctggagccccgccgcccaggaccccgaggagggcgagagcctgggcggcgcccccaccagccccaagaaaaagagaaaagtctaagctgccttctgcggggcttgccttctggccatgcccttcttctctcccttgcacctgtacctcttggtctttgaataaagcctgagtaggaaggctagcaaaaaaaaaaaaaaaaaaaaaaaaaaaaaaaaaaaaaaaaaaaaaaaaaaaaaaaaaaaaaaaaaaaaaaaaaaaaaaaa

SEQ ID NO: 6844 - RNA, 5797 nt, synthetic construct
  source 1..5797: mol_type = other RNA
aggaaataagagagaaaagaagagtaagaagaaatataagagccaccatggcccctaagaagaagcgtaaagtgagccggatggaacgcctcgtctacgaggtgcggcagaagtgcagaaacatcgaggacatctgcatctcctgcggatctctgaacgtgaccctggagcacccactgttcatcggcggcatgtgccagaactgtaaaaactgttttctggagtgtgcctatcaatacgacgatgacggctaccagagctactgcaccatctgttgcggcggaagagaggtgctgatgtgtggaaataacaactgctgccggtgcttctgcgtggaatgcgtggacctgctggtgggccccggcgccgcccaggccgctattaaggaagatccttggaactgctacatgtgcggccacaagggcacatacggcctgctgagacggagagaggactggcctagcagactgcagatgttcttcgccaataaccacgaccaggagttcgacccccctaaggtgtaccctcccgtccccgccgagaagagaaagcccatccgggtcctgagcctgttcgatggcatcgccaccggtctgctggtgctgaaggacctgggcatccaggtggataggtacattgcctccgaggtgtgcgaggactccatcaccgtgggaatggtgcgtcatcagggcaagatcatgtacgtgggcgacgtgcggagcgtgacacagaagcatatccaggagtggggccctttcgacctggtgatcggcggcagcccttgcaatgacctgagcatcgtgaacccagcccggaagggcctgtacgagggaaccggcagactgttcttcgagttttacagactgctgcacgacgcccggcctaaggaaggcgacgaccggcccttcttttggctgttcgagaatgtggtggccatgggagtcagcgacaagcgggatattagccggttcctggagagcaaccccgtgatgatcgatgccaaggaagtgagcgccgcccaccgggccagatacttctggggcaatctgcctggcatgaacagacccctggccagcaccgtgaacgacaagctggagctgcaggagtgcctggagcacggccggatcgccaagttcagcaaggtgagaaccatcaccacccgaagcaacagcatcaaacaaggcaaggaccagcactttcctgtgttcatgaacgagaaggaggacatcctgtggtgtaccgagatggagagagtgttcgggttcccagtccactacacagatgtcagcaacatgtctagactggccagacagagactgctgggaagaagctggtccgtccctgtgatcagacacctgttcgcccctctgaaggagtacttcgcctgcgtgagcagcggcaacagcaacgccaacagccggggccccagcttctctagcggcctggtgccactgtccctgagagggagccacatgggccccatggagatctacaaaaccgtgagcgcctggaagcggcagcctgtgcgcgtgctgagcctgtttcggaatatcgataaagtcctgaaaagcctgggattcctggagagcggctctggctccggcggtggcaccctgaagtacgtggaggatgtgacaaacgtggtcagacgggatgtggagaagtggggccccttcgatctggtgtacggcagcacccaacccctgggcagctcttgtgaccggtgccctggctggtacatgtttcagttccaccggatcctgcagtacgccctgccgagacaggagtcccagcggccattcttttggattttcatggacaacttgctgctgaccgaggatgaccaggaaactaccactcggttcctgcagaccgaagccgtgaccctgcaggacgtgagaggccgggactaccagaacgccatgcgggtgtggtccaacatccctggactgaaaagcaagcacgcacctctgacccctaaagaagaggagtacctgcaggcccaggtgcggagcagaagcaagctggacgcccctaaggtggatctgctggtgaagaattgcctcctgcccctgagagagtacttcaagtatttcagccagaatagtctgcccctgggcggcccaagcagcggcgcccctcctcccagcggcggcagcccagccggctccccaacctctaccgaggagggcacctctgagtccgccacccccgagagcggccctggcacctccaccgagcccagcgagggcagcgcacccggcagccctgccggcagccccacctccacagaggagggaaccagcaccgagcccagcgaaggcagcgccccaggcaccagcaccgagcctagtgagggcggctctggcggcggcagcgcccaggagattaaacggatcaacaagatcagaagaagacttgtgaaagacagcaacaccaagaaggccggcaagacaggccccatgaaaaccctgctggttagagtgatgacacccgatctgagagagcggctggaaaacctgagaaagaagcctgaaaatatcccccagcccatcagcaatacatctagagccaacctgaataagctgctgaccgattacaccgaaatgaagaaggcgatcctgcatgtgtactgggaagagttccagaaggaccctgtgggcctgatgagccgggtggcccagcctgccagcaagaagatcgatcagaacaagctgaaacctgagatggacgagaagggcaacctgaccaccgccggctttgcctgctctcagtgtggccagcccctgttcgtgtacaagctggagcaggtgtctgagaagggcaaggcttacaccaactacttcggacggtgcaatgtggccgagcacgaaaagctgatcctgctggcccagctgaagcccgagaaggatagcgacgaagccgtgacatatagcctgggaaagtttgggcagagggccctggatttctacagcattcatgtgaccaaggagtccacccaccccgtgaagcccctggcccagatcgccggaaacagatacgcctccggacctgtgggaaaggccctgagcgacgcatgtatgggcacaatcgcctccttcctgtctaagtaccaggacatcatcatcgaacaccagaaggtggtgaagggcaaccagaagagactggagagcctgcgggagctggccggcaaggaaaacctggaataccctagcgtgaccctgccacctcagcctcacaccaaggagggcgttgatgcctacaacgaagtgatcgcccgggtgcgaatgtgggtgaacctgaacctgtggcagaagctgaagctaagcagagatgatgccaagcctctgctgagactgaagggattcccttcctttcctctggtcgagagacaggccaacgaagtggactggtgggacatggtgtgtaacgtgaagaagctgatcaacgagaaaaaggaggatggcaaggtgttttggcagaatctggctggctacaagagacaggaagccctgagaccatacctgagcagcgaggaagatcggaagaagggaaagaaattcgctcggtaccagctgggcgacctgctgctgcacctggaaaagaagcacggcgaggactggggaaaggtgtacgacgaggcctgggagcggattgacaagaaagtggaaggcctgagcaagcacatcaagctggaagaggaacggagaagcgaggacgcccagagcaaggccgccctgaccgactggctgcgggctaaggccagcttcgtgatcgagggcctgaaggaggccgacaaggacgagttctgcagatgcgagctgaagctgcagaagtggtacggggacctgcggggaaagcccttcgccatcgaagccgagaacagcatcctggacatcagcggcttcagcaagcagtacaactgtgccttcatctggcagaaggacggcgtgaagaagctgaacctgtacctgatcatcaactacttcaagggcggcaagctgcggttcaagaagatcaaacctgaagccttcgaagccaacagattctacaccgtgatcaacaaaaagagcggcgagatcgtgcccatggaggtgaacttcaacttcgacgaccccaacctgatcatcctgcctctggcctttggcaagagacagggcagagaattcatctggaacgacctgctgtccctggaaaccggcagcctgaagctggccaacggaagagtgatcgagaagacactgtacaacagaagaacccggcaggatgagcctgccctgttcgtggccctgaccttcgagcggcgggaggtcctggactcctccaatatcaaaccaatgaacctgatcggcgtggcaagaggcgaaaacatccccgccgtgatcgccctgaccgaccccgagggctgcccactgagccggtttaaggatagcctgggaaacccaacccacatcctgagaatcggcgagagctataaggagaagcagcggaccatccaggccaagaaggaggtggagcagcggagagccggcggctacagccggaagtacgccagcaaagccaagaatctggcagacgatatggtgagaaacaccgctagagatctgctgtactacgccgtgacccaggatgccatgctgatcttcgccaacctgagccggggcttcggccggcagggcaagcggaccttcatggccgagagacagtacacacggatggaggactggctgaccgccaagctggcctacgagggcctgagcaagacctacctgtccaagacactggcccagtacacctccaagacatgcagcaactgtgggtttaccatcaccagcgccgactacgacagggtgctggagaagctgaagaagacagcaacaggctggatgaccacaattaacggcaaggagctgaaggtggagggccagattacctactacaacagatacaagagacagaacgtagtcaaggacctgtccgtcgagctggatagactgagcgaagaatctgtgaacaacgacatctcctcctggacaaagggcagaagcggagaagctctgagcctcctgaagaaaagattctcccatagacccgtgcaggagaagttcgtgtgcctgaactgcggcttcgagacacacgcagccgagcaagccgccctgaacatcgccagatcctggctgttcctgcggagccaggagtacaagaaataccagacaaacaagacaaccggcaacaccgataagagagccttcgtcgagacctggcagtccttttaccggaagaagcttaaggaggtgtggaaacctgccgtgcggtctggcggatctggcggaggctccacaagcatccagggccaggtgaacttcgaggacgtgttcgtgtacttcagccaggaggagtgggtgctgctggacgaggcccagaggctgctgtacagggacgtgatgctggagaacttcgccctgatggccagcctgggccacaccagcttcaccagccacaccgtggccagcctggtgatgggccccgactgggtggacgtgacccccgccgtggccaccggcaccctgagcggcagcggccccggcaccagccccaagaaaaagagaaaagtctaagctgccttctgcggggcttgccttctggccatgcccttcttctctcccttgcacctgtacctcttggtctttgaataaagcctgagtaggaaggctagcaaaaaaaaaaaaaaaaaaaaaaaaaaaaaaaaaaaaaaaaaaaaaaaaaaaaaaaaaaaaaaaaaaaaaaaaaaaaaaaa

SEQ ID NO: 6845 - RNA, 5797 nt, synthetic construct
  source 1..5797: mol_type = other RNA
aggaaataagagagaaaagaagagtaagaagaaatataagagccaccatggcccctaagaagaagcgtaaagtgagccggatggaacgcctcgtctacgaggtgcggcagaagtgcagaaacatcgaggacatctgcatctcctgcggatctctgaacgtgaccctggagcacccactgttcatcggcggcatgtgccagaactgtaaaaactgttttctggagtgtgcctatcaatacgacgatgacggctaccagagctactgcaccatctgttgcggcggaagagaggtgctgatgtgtggaaataacaactgctgccggtgcttctgcgtggaatgcgtggacctgctggtgggccccggcgccgcccaggccgctattaaggaagatccttggaactgctacatgtgcggccacaagggcacatacggcctgctgagacggagagaggactggcctagcagactgcagatgttcttcgccaataaccacgaccaggagttcgacccccctaaggtgtaccctcccgtccccgccgagaagagaaagcccatccgggtcctgagcctgttcgatggcatcgccaccggtctgctggtgctgaaggacctgggcatccaggtggataggtacattgcctccgaggtgtgcgaggactccatcaccgtgggaatggtgcgtcatcagggcaagatcatgtacgtgggcgacgtgcggagcgtgacacagaagcatatccaggagtggggccctttcgacctggtgatcggcggcagcccttgcaatgacctgagcatcgtgaacccagcccggaagggcctgtacgagggaaccggcagactgttcttcgagttttacagactgctgcacgacgcccggcctaaggaaggcgacgaccggcccttcttttggctgttcgagaatgtggtggccatgggagtcagcgacaagcgggatattagccggttcctggagagcaaccccgtgatgatcgatgccaaggaagtgagcgccgcccaccgggccagatacttctggggcaatctgcctggcatgaacagacccctggccagcaccgtgaacgacaagctggagctgcaggagtgcctggagcacggccggatcgccaagttcagcaaggtgagaaccatcaccacccgaagcaacagcatcaaacaaggcaaggaccagcactttcctgtgttcatgaacgagaaggaggacatcctgtggtgtaccgagatggagagagtgttcgggttcccagtccactacacagatgtcagcaacatgtctagactggccagacagagactgctgggaagaagctggtccgtccctgtgatcagacacctgttcgcccctctgaaggagtacttcgcctgcgtgagcagcggcaacagcaacgccaacagccggggccccagcttctctagcggcctggtgccactgtccctgagagggagccacatgggccccatggagatctacaaaaccgtgagcgcctggaagcggcagcctgtgcgcgtgctgagcctgtttcggaatatcgataaagtcctgaaaagcctgggattcctggagagcggctctggctccggcggtggcaccctgaagtacgtggaggatgtgacaaacgtggtcagacgggatgtggagaagtggggccccttcgatctggtgtacggcagcacccaacccctgggcagctcttgtgaccggtgccctggctggtacatgtttcagttccaccggatcctgcagtacgccctgccgagacaggagtcccagcggccattcttttggattttcatggacaacttgctgctgaccgaggatgaccaggaaactaccactcggttcctgcagaccgaagccgtgaccctgcaggacgtgagaggccgggactaccagaacgccatgcgggtgtggtccaacatccctggactgaaaagcaagcacgcacctctgacccctaaagaagaggagtacctgcaggcccaggtgcggagcagaagcaagctggacgcccctaaggtggatctgctggtgaagaattgcctcctgcccctgagagagtacttcaagtatttcagccagaatagtctgcccctgggcggcccaagcagcggcgcccctcctcccagcggcggcagcccagccggctccccaacctctaccgaggagggcacctctgagtccgccacccccgagagcggccctggcacctccaccgagcccagcgagggcagcgcacccggcagccctgccggcagccccacctccacagaggagggaaccagcaccgagcccagcgaaggcagcgccccaggcaccagcaccgagcctagtgagggcggctctggcggcggcagcgcccaggagattaaacggatcaacaagatcagaagaagacttgtgaaagacagcaacaccaagaaggccggcaagacaggccccatgaaaaccctgctggttagagtgatgacacccgatctgagagagcggctggaaaacctgagaaagaagcctgaaaatatcccccagcccatcagcaatacatctagagccaacctgaataagctgctgaccgattacaccgaaatgaagaaggcgatcctgcatgtgtactgggaagagttccagaaggaccctgtgggcctgatgagccgggtggcccagcctgccagcaagaagatcgatcagaacaagctgaaacctgagatggacgagaagggcaacctgaccaccgccggctttgcctgctctcagtgtggccagcccctgttcgtgtacaagctggagcaggtgtctgagaagggcaaggcttacaccaactacttcggacggtgcaatgtggccgagcacgaaaagctgatcctgctggcccagctgaagcccgagaaggatagcgacgaagccgtgacatatagcctgggaaagtttgggcagagggccctggatttctacagcattcatgtgaccaaggagtccacccaccccgtgaagcccctggcccagatcgccggaaacagatacgcctccggacctgtgggaaaggccctgagcgacgcatgtatgggcacaatcgcctccttcctgtctaagtaccaggacatcatcatcgaacaccagaaggtggtgaagggcaaccagaagagactggagagcctgcgggagctggccggcaaggaaaacctggaataccctagcgtgaccctgccacctcagcctcacaccaaggagggcgttgatgcctacaacgaagtgatcgcccgggtgcgaatgtgggtgaacctgaacctgtggcagaagctgaagctaagcagagatgatgccaagcctctgctgagactgaagggattcccttcctttcctctggtcgagagacaggccaacgaagtggactggtgggacatggtgtgtaacgtgaagaagctgatcaacgagaaaaaggaggatggcaaggtgttttggcagaatctggctggctacaagagacaggaagccctgagaccatacctgagcagcgaggaagatcggaagaagggaaagaaattcgctcggtaccagctgggcgacctgctgctgcacctggaaaagaagcacggcgaggactggggaaaggtgtacgacgaggcctgggagcggattgacaagaaagtggaaggcctgagcaagcacatcaagctggaagaggaacggagaagcgaggacgcccagagcaaggccgccctgaccgactggctgcgggctaaggccagcttcgtgatcgagggcctgaaggaggccgacaaggacgagttctgcagatgcgagctgaagctgcagaagtggtacggggacctgcggggaaagcccttcgccatcgaagccgagaacagcatcctggacatcagcggcttcagcaagcagtacaactgtgccttcatctggcagaaggacggcgtgaagaagctgaacctgtacctgatcatcaactacttcaagggcggcaagctgcggttcaagaagatcaaacctgaagccttcgaagccaacagattctacaccgtgatcaacaaaaagagcggcgagatcgtgcccatggaggtgaacttcaacttcgacgaccccaacctgatcatcctgcctctggcctttggcaagagacagggcagagaattcatctggaacgacctgctgtccctggaaaccggcagcctgaagctggccaacggaagagtgatcgagaagacactgtacaacagaagaacccggcaggatgagcctgccctgttcgtggccctgaccttcgagcggcgggaggtcctggactcctccaatatcaaaccaatgaacctgatcggcgtggcaagaggcgaaaacatccccgccgtgatcgccctgaccgaccccgagggctgcccactgagccggtttaaggatagcctgggaaacccaacccacatcctgagaatcggcgagagctataaggagaagcagcggaccatccaggccaagaaggaggtggagcagcggagagccggcggctacagccggaagtacgccagcaaagccaagaatctggcagacgatatggtgagaaacaccgctagagatctgctgtactacgccgtgacccaggatgccatgctgatcttcgccaacctgagccggggcttcggccggcagggcaagcggaccttcatggccgagagacagtacacacggatggaggactggctgaccgccaagctggcctacgagggcctgagcaagacctacctgtccaagacactggcccagtacacctccaagacatgcagcaactgtgggtttaccatcaccagcgccgactacgacagggtgctggagaagctgaagaagacagcaacaggctggatgaccacaattaacggcaaggagctgaaggtggagggccagattacctactacaacagatacaagagacagaacgtagtcaaggacctgtccgtcgagctggatagactgagcgaagaatctgtgaacaacgacatctcctcctggacaaagggcagaagcggagaagctctgagcctcctgaagaaaagattctcccatagacccgtgcaggagaagttcgtgtgcctgaactgcggcttcgagacacacgcagccgagcaagccgccctgaacatcgccagatcctggctgttcctgcggagccaggagtacaagaaataccagacaaacaagacaaccggcaacaccgataagagagccttcgtcgagacctggcagtccttttaccggaagaagcttaaggaggtgtggaaacctgccgtgcggtctggcggatctggcggaggctccacaagcgaggccctgcccgtggtgttcgaggacgtggccgtgtacttcaccagggaggagtggggcatgctggacaagaggcagaaggagctgtacagggacgtgatgaggatgaactacgagctgctggccagcctgggccccgccgccgccaagcccgacctgatcagcaagctggagaggaggaccgccccctggatcaaggaccccaacggccccaagctgggcaagggctgcccccccggcaagaccagccccaagaaaaagagaaaagtctaagctgccttctgcggggcttgccttctggccatgcccttcttctctcccttgcacctgtacctcttggtctttgaataaagcctgagtaggaaggctagcaaaaaaaaaaaaaaaaaaaaaaaaaaaaaaaaaaaaaaaaaaaaaaaaaaaaaaaaaaaaaaaaaaaaaaaaaaaaaaaa

SEQ ID NO: 6846 - RNA, 5797 nt, synthetic construct
  source 1..5797: mol_type = other RNA
aggaaataagagagaaaagaagagtaagaagaaatataagagccaccatggcccctaagaagaagcgtaaagtgagccggatggaacgcctcgtctacgaggtgcggcagaagtgcagaaacatcgaggacatctgcatctcctgcggatctctgaacgtgaccctggagcacccactgttcatcggcggcatgtgccagaactgtaaaaactgttttctggagtgtgcctatcaatacgacgatgacggctaccagagctactgcaccatctgttgcggcggaagagaggtgctgatgtgtggaaataacaactgctgccggtgcttctgcgtggaatgcgtggacctgctggtgggccccggcgccgcccaggccgctattaaggaagatccttggaactgctacatgtgcggccacaagggcacatacggcctgctgagacggagagaggactggcctagcagactgcagatgttcttcgccaataaccacgaccaggagttcgacccccctaaggtgtaccctcccgtccccgccgagaagagaaagcccatccgggtcctgagcctgttcgatggcatcgccaccggtctgctggtgctgaaggacctgggcatccaggtggataggtacattgcctccgaggtgtgcgaggactccatcaccgtgggaatggtgcgtcatcagggcaagatcatgtacgtgggcgacgtgcggagcgtgacacagaagcatatccaggagtggggccctttcgacctggtgatcggcggcagcccttgcaatgacctgagcatcgtgaacccagcccggaagggcctgtacgagggaaccggcagactgttcttcgagttttacagactgctgcacgacgcccggcctaaggaaggcgacgaccggcccttcttttggctgttcgagaatgtggtggccatgggagtcagcgacaagcgggatattagccggttcctggagagcaaccccgtgatgatcgatgccaaggaagtgagcgccgcccaccgggccagatacttctggggcaatctgcctggcatgaacagacccctggccagcaccgtgaacgacaagctggagctgcaggagtgcctggagcacggccggatcgccaagttcagcaaggtgagaaccatcaccacccgaagcaacagcatcaaacaaggcaaggaccagcactttcctgtgttcatgaacgagaaggaggacatcctgtggtgtaccgagatggagagagtgttcgggttcccagtccactacacagatgtcagcaacatgtctagactggccagacagagactgctgggaagaagctggtccgtccctgtgatcagacacctgttcgcccctctgaaggagtacttcgcctgcgtgagcagcggcaacagcaacgccaacagccggggccccagcttctctagcggcctggtgccactgtccctgagagggagccacatgggccccatggagatctacaaaaccgtgagcgcctggaagcggcagcctgtgcgcgtgctgagcctgtttcggaatatcgataaagtcctgaaaagcctgggattcctggagagcggctctggctccggcggtggcaccctgaagtacgtggaggatgtgacaaacgtggtcagacgggatgtggagaagtggggccccttcgatctggtgtacggcagcacccaacccctgggcagctcttgtgaccggtgccctggctggtacatgtttcagttccaccggatcctgcagtacgccctgccgagacaggagtcccagcggccattcttttggattttcatggacaacttgctgctgaccgaggatgaccaggaaactaccactcggttcctgcagaccgaagccgtgaccctgcaggacgtgagaggccgggactaccagaacgccatgcgggtgtggtccaacatccctggactgaaaagcaagcacgcacctctgacccctaaagaagaggagtacctgcaggcccaggtgcggagcagaagcaagctggacgcccctaaggtggatctgctggtgaagaattgcctcctgcccctgagagagtacttcaagtatttcagccagaatagtctgcccctgggcggcccaagcagcggcgcccctcctcccagcggcggcagcccagccggctccccaacctctaccgaggagggcacctctgagtccgccacccccgagagcggccctggcacctccaccgagcccagcgagggcagcgcacccggcagccctgccggcagccccacctccacagaggagggaaccagcaccgagcccagcgaaggcagcgccccaggcaccagcaccgagcctagtgagggcggctctggcggcggcagcgcccaggagattaaacggatcaacaagatcagaagaagacttgtgaaagacagcaacaccaagaaggccggcaagacaggccccatgaaaaccctgctggttagagtgatgacacccgatctgagagagcggctggaaaacctgagaaagaagcctgaaaatatcccccagcccatcagcaatacatctagagccaacctgaataagctgctgaccgattacaccgaaatgaagaaggcgatcctgcatgtgtactgggaagagttccagaaggaccctgtgggcctgatgagccgggtggcccagcctgccagcaagaagatcgatcagaacaagctgaaacctgagatggacgagaagggcaacctgaccaccgccggctttgcctgctctcagtgtggccagcccctgttcgtgtacaagctggagcaggtgtctgagaagggcaaggcttacaccaactacttcggacggtgcaatgtggccgagcacgaaaagctgatcctgctggcccagctgaagcccgagaaggatagcgacgaagccgtgacatatagcctgggaaagtttgggcagagggccctggatttctacagcattcatgtgaccaaggagtccacccaccccgtgaagcccctggcccagatcgccggaaacagatacgcctccggacctgtgggaaaggccctgagcgacgcatgtatgggcacaatcgcctccttcctgtctaagtaccaggacatcatcatcgaacaccagaaggtggtgaagggcaaccagaagagactggagagcctgcgggagctggccggcaaggaaaacctggaataccctagcgtgaccctgccacctcagcctcacaccaaggagggcgttgatgcctacaacgaagtgatcgcccgggtgcgaatgtgggtgaacctgaacctgtggcagaagctgaagctaagcagagatgatgccaagcctctgctgagactgaagggattcccttcctttcctctggtcgagagacaggccaacgaagtggactggtgggacatggtgtgtaacgtgaagaagctgatcaacgagaaaaaggaggatggcaaggtgttttggcagaatctggctggctacaagagacaggaagccctgagaccatacctgagcagcgaggaagatcggaagaagggaaagaaattcgctcggtaccagctgggcgacctgctgctgcacctggaaaagaagcacggcgaggactggggaaaggtgtacgacgaggcctgggagcggattgacaagaaagtggaaggcctgagcaagcacatcaagctggaagaggaacggagaagcgaggacgcccagagcaaggccgccctgaccgactggctgcgggctaaggccagcttcgtgatcgagggcctgaaggaggccgacaaggacgagttctgcagatgcgagctgaagctgcagaagtggtacggggacctgcggggaaagcccttcgccatcgaagccgagaacagcatcctggacatcagcggcttcagcaagcagtacaactgtgccttcatctggcagaaggacggcgtgaagaagctgaacctgtacctgatcatcaactacttcaagggcggcaagctgcggttcaagaagatcaaacctgaagccttcgaagccaacagattctacaccgtgatcaacaaaaagagcggcgagatcgtgcccatggaggtgaacttcaacttcgacgaccccaacctgatcatcctgcctctggcctttggcaagagacagggcagagaattcatctggaacgacctgctgtccctggaaaccggcagcctgaagctggccaacggaagagtgatcgagaagacactgtacaacagaagaacccggcaggatgagcctgccctgttcgtggccctgaccttcgagcggcgggaggtcctggactcctccaatatcaaaccaatgaacctgatcggcgtggcaagaggcgaaaacatccccgccgtgatcgccctgaccgaccccgagggctgcccactgagccggtttaaggatagcctgggaaacccaacccacatcctgagaatcggcgagagctataaggagaagcagcggaccatccaggccaagaaggaggtggagcagcggagagccggcggctacagccggaagtacgccagcaaagccaagaatctggcagacgatatggtgagaaacaccgctagagatctgctgtactacgccgtgacccaggatgccatgctgatcttcgccaacctgagccggggcttcggccggcagggcaagcggaccttcatggccgagagacagtacacacggatggaggactggctgaccgccaagctggcctacgagggcctgagcaagacctacctgtccaagacactggcccagtacacctccaagacatgcagcaactgtgggtttaccatcaccagcgccgactacgacagggtgctggagaagctgaagaagacagcaacaggctggatgaccacaattaacggcaaggagctgaaggtggagggccagattacctactacaacagatacaagagacagaacgtagtcaaggacctgtccgtcgagctggatagactgagcgaagaatctgtgaacaacgacatctcctcctggacaaagggcagaagcggagaagctctgagcctcctgaagaaaagattctcccatagacccgtgcaggagaagttcgtgtgcctgaactgcggcttcgagacacacgcagccgagcaagccgccctgaacatcgccagatcctggctgttcctgcggagccaggagtacaagaaataccagacaaacaagacaaccggcaacaccgataagagagccttcgtcgagacctggcagtccttttaccggaagaagcttaaggaggtgtggaaacctgccgtgcggtctggcggatctggcggaggctccacaagcaagcaggtgagcatcagcttcgaggacgtgaccgtggacttcagcagggaggagtggcagcacctggaccccgcccagaggtgcctgtacagggacgtgaccctggagaactacagccacctgctgagcgtgggctaccaggtgcccaagcccgagatcatcttccagctggagcagggcgagggcccctggatgctggagagggagaccccccaccagagctgcagcgacgaggacatcggcaccagccccaagaaaaagagaaaagtctaagctgccttctgcggggcttgccttctggccatgcccttcttctctcccttgcacctgtacctcttggtctttgaataaagcctgagtaggaaggctagcaaaaaaaaaaaaaaaaaaaaaaaaaaaaaaaaaaaaaaaaaaaaaaaaaaaaaaaaaaaaaaaaaaaaaaaaaaaaaaaa

SEQ ID NO: 6847 - RNA, 5797 nt, synthetic construct
  source 1..5797: mol_type = other RNA
aggaaataagagagaaaagaagagtaagaagaaatataagagccaccatggcccctaagaagaagcgtaaagtgagccggatggaacgcctcgtctacgaggtgcggcagaagtgcagaaacatcgaggacatctgcatctcctgcggatctctgaacgtgaccctggagcacccactgttcatcggcggcatgtgccagaactgtaaaaactgttttctggagtgtgcctatcaatacgacgatgacggctaccagagctactgcaccatctgttgcggcggaagagaggtgctgatgtgtggaaataacaactgctgccggtgcttctgcgtggaatgcgtggacctgctggtgggccccggcgccgcccaggccgctattaaggaagatccttggaactgctacatgtgcggccacaagggcacatacggcctgctgagacggagagaggactggcctagcagactgcagatgttcttcgccaataaccacgaccaggagttcgacccccctaaggtgtaccctcccgtccccgccgagaagagaaagcccatccgggtcctgagcctgttcgatggcatcgccaccggtctgctggtgctgaaggacctgggcatccaggtggataggtacattgcctccgaggtgtgcgaggactccatcaccgtgggaatggtgcgtcatcagggcaagatcatgtacgtgggcgacgtgcggagcgtgacacagaagcatatccaggagtggggccctttcgacctggtgatcggcggcagcccttgcaatgacctgagcatcgtgaacccagcccggaagggcctgtacgagggaaccggcagactgttcttcgagttttacagactgctgcacgacgcccggcctaaggaaggcgacgaccggcccttcttttggctgttcgagaatgtggtggccatgggagtcagcgacaagcgggatattagccggttcctggagagcaaccccgtgatgatcgatgccaaggaagtgagcgccgcccaccgggccagatacttctggggcaatctgcctggcatgaacagacccctggccagcaccgtgaacgacaagctggagctgcaggagtgcctggagcacggccggatcgccaagttcagcaaggtgagaaccatcaccacccgaagcaacagcatcaaacaaggcaaggaccagcactttcctgtgttcatgaacgagaaggaggacatcctgtggtgtaccgagatggagagagtgttcgggttcccagtccactacacagatgtcagcaacatgtctagactggccagacagagactgctgggaagaagctggtccgtccctgtgatcagacacctgttcgcccctctgaaggagtacttcgcctgcgtgagcagcggcaacagcaacgccaacagccggggccccagcttctctagcggcctggtgccactgtccctgagagggagccacatgggccccatggagatctacaaaaccgtgagcgcctggaagcggcagcctgtgcgcgtgctgagcctgtttcggaatatcgataaagtcctgaaaagcctgggattcctggagagcggctctggctccggcggtggcaccctgaagtacgtggaggatgtgacaaacgtggtcagacgggatgtggagaagtggggccccttcgatctggtgtacggcagcacccaacccctgggcagctcttgtgaccggtgccctggctggtacatgtttcagttccaccggatcctgcagtacgccctgccgagacaggagtcccagcggccattcttttggattttcatggacaacttgctgctgaccgaggatgaccaggaaactaccactcggttcctgcagaccgaagccgtgaccctgcaggacgtgagaggccgggactaccagaacgccatgcgggtgtggtccaacatccctggactgaaaagcaagcacgcacctctgacccctaaagaagaggagtacctgcaggcccaggtgcggagcagaagcaagctggacgcccctaaggtggatctgctggtgaagaattgcctcctgcccctgagagagtacttcaagtatttcagccagaatagtctgcccctgggcggcccaagcagcggcgcccctcctcccagcggcggcagcccagccggctccccaacctctaccgaggagggcacctctgagtccgccacccccgagagcggccctggcacctccaccgagcccagcgagggcagcgcacccggcagccctgccggcagccccacctccacagaggagggaaccagcaccgagcccagcgaaggcagcgccccaggcaccagcaccgagcctagtgagggcggctctggcggcggcagcgcccaggagattaaacggatcaacaagatcagaagaagacttgtgaaagacagcaacaccaagaaggccggcaagacaggccccatgaaaaccctgctggttagagtgatgacacccgatctgagagagcggctggaaaacctgagaaagaagcctgaaaatatcccccagcccatcagcaatacatctagagccaacctgaataagctgctgaccgattacaccgaaatgaagaaggcgatcctgcatgtgtactgggaagagttccagaaggaccctgtgggcctgatgagccgggtggcccagcctgccagcaagaagatcgatcagaacaagctgaaacctgagatggacgagaagggcaacctgaccaccgccggctttgcctgctctcagtgtggccagcccctgttcgtgtacaagctggagcaggtgtctgagaagggcaaggcttacaccaactacttcggacggtgcaatgtggccgagcacgaaaagctgatcctgctggcccagctgaagcccgagaaggatagcgacgaagccgtgacatatagcctgggaaagtttgggcagagggccctggatttctacagcattcatgtgaccaaggagtccacccaccccgtgaagcccctggcccagatcgccggaaacagatacgcctccggacctgtgggaaaggccctgagcgacgcatgtatgggcacaatcgcctccttcctgtctaagtaccaggacatcatcatcgaacaccagaaggtggtgaagggcaaccagaagagactggagagcctgcgggagctggccggcaaggaaaacctggaataccctagcgtgaccctgccacctcagcctcacaccaaggagggcgttgatgcctacaacgaagtgatcgcccgggtgcgaatgtgggtgaacctgaacctgtggcagaagctgaagctaagcagagatgatgccaagcctctgctgagactgaagggattcccttcctttcctctggtcgagagacaggccaacgaagtggactggtgggacatggtgtgtaacgtgaagaagctgatcaacgagaaaaaggaggatggcaaggtgttttggcagaatctggctggctacaagagacaggaagccctgagaccatacctgagcagcgaggaagatcggaagaagggaaagaaattcgctcggtaccagctgggcgacctgctgctgcacctggaaaagaagcacggcgaggactggggaaaggtgtacgacgaggcctgggagcggattgacaagaaagtggaaggcctgagcaagcacatcaagctggaagaggaacggagaagcgaggacgcccagagcaaggccgccctgaccgactggctgcgggctaaggccagcttcgtgatcgagggcctgaaggaggccgacaaggacgagttctgcagatgcgagctgaagctgcagaagtggtacggggacctgcggggaaagcccttcgccatcgaagccgagaacagcatcctggacatcagcggcttcagcaagcagtacaactgtgccttcatctggcagaaggacggcgtgaagaagctgaacctgtacctgatcatcaactacttcaagggcggcaagctgcggttcaagaagatcaaacctgaagccttcgaagccaacagattctacaccgtgatcaacaaaaagagcggcgagatcgtgcccatggaggtgaacttcaacttcgacgaccccaacctgatcatcctgcctctggcctttggcaagagacagggcagagaattcatctggaacgacctgctgtccctggaaaccggcagcctgaagctggccaacggaagagtgatcgagaagacactgtacaacagaagaacccggcaggatgagcctgccctgttcgtggccctgaccttcgagcggcgggaggtcctggactcctccaatatcaaaccaatgaacctgatcggcgtggcaagaggcgaaaacatccccgccgtgatcgccctgaccgaccccgagggctgcccactgagccggtttaaggatagcctgggaaacccaacccacatcctgagaatcggcgagagctataaggagaagcagcggaccatccaggccaagaaggaggtggagcagcggagagccggcggctacagccggaagtacgccagcaaagccaagaatctggcagacgatatggtgagaaacaccgctagagatctgctgtactacgccgtgacccaggatgccatgctgatcttcgccaacctgagccggggcttcggccggcagggcaagcggaccttcatggccgagagacagtacacacggatggaggactggctgaccgccaagctggcctacgagggcctgagcaagacctacctgtccaagacactggcccagtacacctccaagacatgcagcaactgtgggtttaccatcaccagcgccgactacgacagggtgctggagaagctgaagaagacagcaacaggctggatgaccacaattaacggcaaggagctgaaggtggagggccagattacctactacaacagatacaagagacagaacgtagtcaaggacctgtccgtcgagctggatagactgagcgaagaatctgtgaacaacgacatctcctcctggacaaagggcagaagcggagaagctctgagcctcctgaagaaaagattctcccatagacccgtgcaggagaagttcgtgtgcctgaactgcggcttcgagacacacgcagccgagcaagccgccctgaacatcgccagatcctggctgttcctgcggagccaggagtacaagaaataccagacaaacaagacaaccggcaacaccgataagagagccttcgtcgagacctggcagtccttttaccggaagaagcttaaggaggtgtggaaacctgccgtgcggtctggcggatctggcggaggctccacaagcagccagtgcctgctgaccttcggcgacgtgagcgtggacttcagccaggaggagtgggagtgcctggacagcgcccagagggccctgtacatcgacgtgatgctggagaactacagcaacctggtgagcgtggagaactacagcacctgcgacaccgtgcaccagcacgtgaacaccggcaaggagagctgccagaggaacaacctgggcgagatgctgaggaaccccagccacgacgccctgaccagccccaagaaaaagagaaaagtctaagctgccttctgcggggcttgccttctggccatgcccttcttctctcccttgcacctgtacctcttggtctttgaataaagcctgagtaggaaggctagcaaaaaaaaaaaaaaaaaaaaaaaaaaaaaaaaaaaaaaaaaaaaaaaaaaaaaaaaaaaaaaaaaaaaaaaaaaaaaaaa

SEQ ID NO: 6848 - RNA, 5797 nt, synthetic construct
  source 1..5797: mol_type = other RNA
aggaaataagagagaaaagaagagtaagaagaaatataagagccaccatggcccctaagaagaagcgtaaagtgagccggatggaacgcctcgtctacgaggtgcggcagaagtgcagaaacatcgaggacatctgcatctcctgcggatctctgaacgtgaccctggagcacccactgttcatcggcggcatgtgccagaactgtaaaaactgttttctggagtgtgcctatcaatacgacgatgacggctaccagagctactgcaccatctgttgcggcggaagagaggtgctgatgtgtggaaataacaactgctgccggtgcttctgcgtggaatgcgtggacctgctggtgggccccggcgccgcccaggccgctattaaggaagatccttggaactgctacatgtgcggccacaagggcacatacggcctgctgagacggagagaggactggcctagcagactgcagatgttcttcgccaataaccacgaccaggagttcgacccccctaaggtgtaccctcccgtccccgccgagaagagaaagcccatccgggtcctgagcctgttcgatggcatcgccaccggtctgctggtgctgaaggacctgggcatccaggtggataggtacattgcctccgaggtgtgcgaggactccatcaccgtgggaatggtgcgtcatcagggcaagatcatgtacgtgggcgacgtgcggagcgtgacacagaagcatatccaggagtggggccctttcgacctggtgatcggcggcagcccttgcaatgacctgagcatcgtgaacccagcccggaagggcctgtacgagggaaccggcagactgttcttcgagttttacagactgctgcacgacgcccggcctaaggaaggcgacgaccggcccttcttttggctgttcgagaatgtggtggccatgggagtcagcgacaagcgggatattagccggttcctggagagcaaccccgtgatgatcgatgccaaggaagtgagcgccgcccaccgggccagatacttctggggcaatctgcctggcatgaacagacccctggccagcaccgtgaacgacaagctggagctgcaggagtgcctggagcacggccggatcgccaagttcagcaaggtgagaaccatcaccacccgaagcaacagcatcaaacaaggcaaggaccagcactttcctgtgttcatgaacgagaaggaggacatcctgtggtgtaccgagatggagagagtgttcgggttcccagtccactacacagatgtcagcaacatgtctagactggccagacagagactgctgggaagaagctggtccgtccctgtgatcagacacctgttcgcccctctgaaggagtacttcgcctgcgtgagcagcggcaacagcaacgccaacagccggggccccagcttctctagcggcctggtgccactgtccctgagagggagccacatgggccccatggagatctacaaaaccgtgagcgcctggaagcggcagcctgtgcgcgtgctgagcctgtttcggaatatcgataaagtcctgaaaagcctgggattcctggagagcggctctggctccggcggtggcaccctgaagtacgtggaggatgtgacaaacgtggtcagacgggatgtggagaagtggggccccttcgatctggtgtacggcagcacccaacccctgggcagctcttgtgaccggtgccctggctggtacatgtttcagttccaccggatcctgcagtacgccctgccgagacaggagtcccagcggccattcttttggattttcatggacaacttgctgctgaccgaggatgaccaggaaactaccactcggttcctgcagaccgaagccgtgaccctgcaggacgtgagaggccgggactaccagaacgccatgcgggtgtggtccaacatccctggactgaaaagcaagcacgcacctctgacccctaaagaagaggagtacctgcaggcccaggtgcggagcagaagcaagctggacgcccctaaggtggatctgctggtgaagaattgcctcctgcccctgagagagtacttcaagtatttcagccagaatagtctgcccctgggcggcccaagcagcggcgcccctcctcccagcggcggcagcccagccggctccccaacctctaccgaggagggcacctctgagtccgccacccccgagagcggccctggcacctccaccgagcccagcgagggcagcgcacccggcagccctgccggcagccccacctccacagaggagggaaccagcaccgagcccagcgaaggcagcgccccaggcaccagcaccgagcctagtgagggcggctctggcggcggcagcgcccaggagattaaacggatcaacaagatcagaagaagacttgtgaaagacagcaacaccaagaaggccggcaagacaggccccatgaaaaccctgctggttagagtgatgacacccgatctgagagagcggctggaaaacctgagaaagaagcctgaaaatatcccccagcccatcagcaatacatctagagccaacctgaataagctgctgaccgattacaccgaaatgaagaaggcgatcctgcatgtgtactgggaagagttccagaaggaccctgtgggcctgatgagccgggtggcccagcctgccagcaagaagatcgatcagaacaagctgaaacctgagatggacgagaagggcaacctgaccaccgccggctttgcctgctctcagtgtggccagcccctgttcgtgtacaagctggagcaggtgtctgagaagggcaaggcttacaccaactacttcggacggtgcaatgtggccgagcacgaaaagctgatcctgctggcccagctgaagcccgagaaggatagcgacgaagccgtgacatatagcctgggaaagtttgggcagagggccctggatttctacagcattcatgtgaccaaggagtccacccaccccgtgaagcccctggcccagatcgccggaaacagatacgcctccggacctgtgggaaaggccctgagcgacgcatgtatgggcacaatcgcctccttcctgtctaagtaccaggacatcatcatcgaacaccagaaggtggtgaagggcaaccagaagagactggagagcctgcgggagctggccggcaaggaaaacctggaataccctagcgtgaccctgccacctcagcctcacaccaaggagggcgttgatgcctacaacgaagtgatcgcccgggtgcgaatgtgggtgaacctgaacctgtggcagaagctgaagctaagcagagatgatgccaagcctctgctgagactgaagggattcccttcctttcctctggtcgagagacaggccaacgaagtggactggtgggacatggtgtgtaacgtgaagaagctgatcaacgagaaaaaggaggatggcaaggtgttttggcagaatctggctggctacaagagacaggaagccctgagaccatacctgagcagcgaggaagatcggaagaagggaaagaaattcgctcggtaccagctgggcgacctgctgctgcacctggaaaagaagcacggcgaggactggggaaaggtgtacgacgaggcctgggagcggattgacaagaaagtggaaggcctgagcaagcacatcaagctggaagaggaacggagaagcgaggacgcccagagcaaggccgccctgaccgactggctgcgggctaaggccagcttcgtgatcgagggcctgaaggaggccgacaaggacgagttctgcagatgcgagctgaagctgcagaagtggtacggggacctgcggggaaagcccttcgccatcgaagccgagaacagcatcctggacatcagcggcttcagcaagcagtacaactgtgccttcatctggcagaaggacggcgtgaagaagctgaacctgtacctgatcatcaactacttcaagggcggcaagctgcggttcaagaagatcaaacctgaagccttcgaagccaacagattctacaccgtgatcaacaaaaagagcggcgagatcgtgcccatggaggtgaacttcaacttcgacgaccccaacctgatcatcctgcctctggcctttggcaagagacagggcagagaattcatctggaacgacctgctgtccctggaaaccggcagcctgaagctggccaacggaagagtgatcgagaagacactgtacaacagaagaacccggcaggatgagcctgccctgttcgtggccctgaccttcgagcggcgggaggtcctggactcctccaatatcaaaccaatgaacctgatcggcgtggcaagaggcgaaaacatccccgccgtgatcgccctgaccgaccccgagggctgcccactgagccggtttaaggatagcctgggaaacccaacccacatcctgagaatcggcgagagctataaggagaagcagcggaccatccaggccaagaaggaggtggagcagcggagagccggcggctacagccggaagtacgccagcaaagccaagaatctggcagacgatatggtgagaaacaccgctagagatctgctgtactacgccgtgacccaggatgccatgctgatcttcgccaacctgagccggggcttcggccggcagggcaagcggaccttcatggccgagagacagtacacacggatggaggactggctgaccgccaagctggcctacgagggcctgagcaagacctacctgtccaagacactggcccagtacacctccaagacatgcagcaactgtgggtttaccatcaccagcgccgactacgacagggtgctggagaagctgaagaagacagcaacaggctggatgaccacaattaacggcaaggagctgaaggtggagggccagattacctactacaacagatacaagagacagaacgtagtcaaggacctgtccgtcgagctggatagactgagcgaagaatctgtgaacaacgacatctcctcctggacaaagggcagaagcggagaagctctgagcctcctgaagaaaagattctcccatagacccgtgcaggagaagttcgtgtgcctgaactgcggcttcgagacacacgcagccgagcaagccgccctgaacatcgccagatcctggctgttcctgcggagccaggagtacaagaaataccagacaaacaagacaaccggcaacaccgataagagagccttcgtcgagacctggcagtccttttaccggaagaagcttaaggaggtgtggaaacctgccgtgcggtctggcggatctggcggaggctccacaagccagcagggcagcgtgaccttccaggacgtggccgtggacttcagctgggaggagtggggccacctgggccccacccagaaggagctgtacagggaggtgatgctggagaactacggcaacctggtgtgcctgggcctggccgtgagcagccccgacgtggtgtgccagctggagaggggcgagggcccctggatgcccgagggcgacgcccccggcagcagcagggccggcagcagcaagcacaccagccccaagaaaaagagaaaagtctaagctgccttctgcggggcttgccttctggccatgcccttcttctctcccttgcacctgtacctcttggtctttgaataaagcctgagtaggaaggctagcaaaaaaaaaaaaaaaaaaaaaaaaaaaaaaaaaaaaaaaaaaaaaaaaaaaaaaaaaaaaaaaaaaaaaaaaaaaaaaaa

SEQ ID NO: 6849 - RNA, 5797 nt, synthetic construct
  source 1..5797: mol_type = other RNA
aggaaataagagagaaaagaagagtaagaagaaatataagagccaccatggcccctaagaagaagcgtaaagtgagccggatggaacgcctcgtctacgaggtgcggcagaagtgcagaaacatcgaggacatctgcatctcctgcggatctctgaacgtgaccctggagcacccactgttcatcggcggcatgtgccagaactgtaaaaactgttttctggagtgtgcctatcaatacgacgatgacggctaccagagctactgcaccatctgttgcggcggaagagaggtgctgatgtgtggaaataacaactgctgccggtgcttctgcgtggaatgcgtggacctgctggtgggccccggcgccgcccaggccgctattaaggaagatccttggaactgctacatgtgcggccacaagggcacatacggcctgctgagacggagagaggactggcctagcagactgcagatgttcttcgccaataaccacgaccaggagttcgacccccctaaggtgtaccctcccgtccccgccgagaagagaaagcccatccgggtcctgagcctgttcgatggcatcgccaccggtctgctggtgctgaaggacctgggcatccaggtggataggtacattgcctccgaggtgtgcgaggactccatcaccgtgggaatggtgcgtcatcagggcaagatcatgtacgtgggcgacgtgcggagcgtgacacagaagcatatccaggagtggggccctttcgacctggtgatcggcggcagcccttgcaatgacctgagcatcgtgaacccagcccggaagggcctgtacgagggaaccggcagactgttcttcgagttttacagactgctgcacgacgcccggcctaaggaaggcgacgaccggcccttcttttggctgttcgagaatgtggtggccatgggagtcagcgacaagcgggatattagccggttcctggagagcaaccccgtgatgatcgatgccaaggaagtgagcgccgcccaccgggccagatacttctggggcaatctgcctggcatgaacagacccctggccagcaccgtgaacgacaagctggagctgcaggagtgcctggagcacggccggatcgccaagttcagcaaggtgagaaccatcaccacccgaagcaacagcatcaaacaaggcaaggaccagcactttcctgtgttcatgaacgagaaggaggacatcctgtggtgtaccgagatggagagagtgttcgggttcccagtccactacacagatgtcagcaacatgtctagactggccagacagagactgctgggaagaagctggtccgtccctgtgatcagacacctgttcgcccctctgaaggagtacttcgcctgcgtgagcagcggcaacagcaacgccaacagccggggccccagcttctctagcggcctggtgccactgtccctgagagggagccacatgggccccatggagatctacaaaaccgtgagcgcctggaagcggcagcctgtgcgcgtgctgagcctgtttcggaatatcgataaagtcctgaaaagcctgggattcctggagagcggctctggctccggcggtggcaccctgaagtacgtggaggatgtgacaaacgtggtcagacgggatgtggagaagtggggccccttcgatctggtgtacggcagcacccaacccctgggcagctcttgtgaccggtgccctggctggtacatgtttcagttccaccggatcctgcagtacgccctgccgagacaggagtcccagcggccattcttttggattttcatggacaacttgctgctgaccgaggatgaccaggaaactaccactcggttcctgcagaccgaagccgtgaccctgcaggacgtgagaggccgggactaccagaacgccatgcgggtgtggtccaacatccctggactgaaaagcaagcacgcacctctgacccctaaagaagaggagtacctgcaggcccaggtgcggagcagaagcaagctggacgcccctaaggtggatctgctggtgaagaattgcctcctgcccctgagagagtacttcaagtatttcagccagaatagtctgcccctgggcggcccaagcagcggcgcccctcctcccagcggcggcagcccagccggctccccaacctctaccgaggagggcacctctgagtccgccacccccgagagcggccctggcacctccaccgagcccagcgagggcagcgcacccggcagccctgccggcagccccacctccacagaggagggaaccagcaccgagcccagcgaaggcagcgccccaggcaccagcaccgagcctagtgagggcggctctggcggcggcagcgcccaggagattaaacggatcaacaagatcagaagaagacttgtgaaagacagcaacaccaagaaggccggcaagacaggccccatgaaaaccctgctggttagagtgatgacacccgatctgagagagcggctggaaaacctgagaaagaagcctgaaaatatcccccagcccatcagcaatacatctagagccaacctgaataagctgctgaccgattacaccgaaatgaagaaggcgatcctgcatgtgtactgggaagagttccagaaggaccctgtgggcctgatgagccgggtggcccagcctgccagcaagaagatcgatcagaacaagctgaaacctgagatggacgagaagggcaacctgaccaccgccggctttgcctgctctcagtgtggccagcccctgttcgtgtacaagctggagcaggtgtctgagaagggcaaggcttacaccaactacttcggacggtgcaatgtggccgagcacgaaaagctgatcctgctggcccagctgaagcccgagaaggatagcgacgaagccgtgacatatagcctgggaaagtttgggcagagggccctggatttctacagcattcatgtgaccaaggagtccacccaccccgtgaagcccctggcccagatcgccggaaacagatacgcctccggacctgtgggaaaggccctgagcgacgcatgtatgggcacaatcgcctccttcctgtctaagtaccaggacatcatcatcgaacaccagaaggtggtgaagggcaaccagaagagactggagagcctgcgggagctggccggcaaggaaaacctggaataccctagcgtgaccctgccacctcagcctcacaccaaggagggcgttgatgcctacaacgaagtgatcgcccgggtgcgaatgtgggtgaacctgaacctgtggcagaagctgaagctaagcagagatgatgccaagcctctgctgagactgaagggattcccttcctttcctctggtcgagagacaggccaacgaagtggactggtgggacatggtgtgtaacgtgaagaagctgatcaacgagaaaaaggaggatggcaaggtgttttggcagaatctggctggctacaagagacaggaagccctgagaccatacctgagcagcgaggaagatcggaagaagggaaagaaattcgctcggtaccagctgggcgacctgctgctgcacctggaaaagaagcacggcgaggactggggaaaggtgtacgacgaggcctgggagcggattgacaagaaagtggaaggcctgagcaagcacatcaagctggaagaggaacggagaagcgaggacgcccagagcaaggccgccctgaccgactggctgcgggctaaggccagcttcgtgatcgagggcctgaaggaggccgacaaggacgagttctgcagatgcgagctgaagctgcagaagtggtacggggacctgcggggaaagcccttcgccatcgaagccgagaacagcatcctggacatcagcggcttcagcaagcagtacaactgtgccttcatctggcagaaggacggcgtgaagaagctgaacctgtacctgatcatcaactacttcaagggcggcaagctgcggttcaagaagatcaaacctgaagccttcgaagccaacagattctacaccgtgatcaacaaaaagagcggcgagatcgtgcccatggaggtgaacttcaacttcgacgaccccaacctgatcatcctgcctctggcctttggcaagagacagggcagagaattcatctggaacgacctgctgtccctggaaaccggcagcctgaagctggccaacggaagagtgatcgagaagacactgtacaacagaagaacccggcaggatgagcctgccctgttcgtggccctgaccttcgagcggcgggaggtcctggactcctccaatatcaaaccaatgaacctgatcggcgtggcaagaggcgaaaacatccccgccgtgatcgccctgaccgaccccgagggctgcccactgagccggtttaaggatagcctgggaaacccaacccacatcctgagaatcggcgagagctataaggagaagcagcggaccatccaggccaagaaggaggtggagcagcggagagccggcggctacagccggaagtacgccagcaaagccaagaatctggcagacgatatggtgagaaacaccgctagagatctgctgtactacgccgtgacccaggatgccatgctgatcttcgccaacctgagccggggcttcggccggcagggcaagcggaccttcatggccgagagacagtacacacggatggaggactggctgaccgccaagctggcctacgagggcctgagcaagacctacctgtccaagacactggcccagtacacctccaagacatgcagcaactgtgggtttaccatcaccagcgccgactacgacagggtgctggagaagctgaagaagacagcaacaggctggatgaccacaattaacggcaaggagctgaaggtggagggccagattacctactacaacagatacaagagacagaacgtagtcaaggacctgtccgtcgagctggatagactgagcgaagaatctgtgaacaacgacatctcctcctggacaaagggcagaagcggagaagctctgagcctcctgaagaaaagattctcccatagacccgtgcaggagaagttcgtgtgcctgaactgcggcttcgagacacacgcagccgagcaagccgccctgaacatcgccagatcctggctgttcctgcggagccaggagtacaagaaataccagacaaacaagacaaccggcaacaccgataagagagccttcgtcgagacctggcagtccttttaccggaagaagcttaaggaggtgtggaaacctgccgtgcggtctggcggatctggcggaggctccacaagcgccctggagagcgtgaccttcagggacgtggccgtgttcttcagcagggacgagtggctgcacctgaaccccgcccagagggccctgtacagggaggtgatgctggacaactacagcgccctgctgagcctgggcatcctgttcagcaagcccaaggtgatcctgcagctggagcagggcgaggacccctggatggtggagaacggcgtgagccagagcgcctgcctgggctgggagagcctgaccagccccaagaaaaagagaaaagtctaagctgccttctgcggggcttgccttctggccatgcccttcttctctcccttgcacctgtacctcttggtctttgaataaagcctgagtaggaaggctagcaaaaaaaaaaaaaaaaaaaaaaaaaaaaaaaaaaaaaaaaaaaaaaaaaaaaaaaaaaaaaaaaaaaaaaaaaaaaaaaa

SEQ ID NO: 6850 - RNA, 5797 nt, synthetic construct
  source 1..5797: mol_type = other RNA
aggaaataagagagaaaagaagagtaagaagaaatataagagccaccatggcccctaagaagaagcgtaaagtgagccggatggaacgcctcgtctacgaggtgcggcagaagtgcagaaacatcgaggacatctgcatctcctgcggatctctgaacgtgaccctggagcacccactgttcatcggcggcatgtgccagaactgtaaaaactgttttctggagtgtgcctatcaatacgacgatgacggctaccagagctactgcaccatctgttgcggcggaagagaggtgctgatgtgtggaaataacaactgctgccggtgcttctgcgtggaatgcgtggacctgctggtgggccccggcgccgcccaggccgctattaaggaagatccttggaactgctacatgtgcggccacaagggcacatacggcctgctgagacggagagaggactggcctagcagactgcagatgttcttcgccaataaccacgaccaggagttcgacccccctaaggtgtaccctcccgtccccgccgagaagagaaagcccatccgggtcctgagcctgttcgatggcatcgccaccggtctgctggtgctgaaggacctgggcatccaggtggataggtacattgcctccgaggtgtgcgaggactccatcaccgtgggaatggtgcgtcatcagggcaagatcatgtacgtgggcgacgtgcggagcgtgacacagaagcatatccaggagtggggccctttcgacctggtgatcggcggcagcccttgcaatgacctgagcatcgtgaacccagcccggaagggcctgtacgagggaaccggcagactgttcttcgagttttacagactgctgcacgacgcccggcctaaggaaggcgacgaccggcccttcttttggctgttcgagaatgtggtggccatgggagtcagcgacaagcgggatattagccggttcctggagagcaaccccgtgatgatcgatgccaaggaagtgagcgccgcccaccgggccagatacttctggggcaatctgcctggcatgaacagacccctggccagcaccgtgaacgacaagctggagctgcaggagtgcctggagcacggccggatcgccaagttcagcaaggtgagaaccatcaccacccgaagcaacagcatcaaacaaggcaaggaccagcactttcctgtgttcatgaacgagaaggaggacatcctgtggtgtaccgagatggagagagtgttcgggttcccagtccactacacagatgtcagcaacatgtctagactggccagacagagactgctgggaagaagctggtccgtccctgtgatcagacacctgttcgcccctctgaaggagtacttcgcctgcgtgagcagcggcaacagcaacgccaacagccggggccccagcttctctagcggcctggtgccactgtccctgagagggagccacatgggccccatggagatctacaaaaccgtgagcgcctggaagcggcagcctgtgcgcgtgctgagcctgtttcggaatatcgataaagtcctgaaaagcctgggattcctggagagcggctctggctccggcggtggcaccctgaagtacgtggaggatgtgacaaacgtggtcagacgggatgtggagaagtggggccccttcgatctggtgtacggcagcacccaacccctgggcagctcttgtgaccggtgccctggctggtacatgtttcagttccaccggatcctgcagtacgccctgccgagacaggagtcccagcggccattcttttggattttcatggacaacttgctgctgaccgaggatgaccaggaaactaccactcggttcctgcagaccgaagccgtgaccctgcaggacgtgagaggccgggactaccagaacgccatgcgggtgtggtccaacatccctggactgaaaagcaagcacgcacctctgacccctaaagaagaggagtacctgcaggcccaggtgcggagcagaagcaagctggacgcccctaaggtggatctgctggtgaagaattgcctcctgcccctgagagagtacttcaagtatttcagccagaatagtctgcccctgggcggcccaagcagcggcgcccctcctcccagcggcggcagcccagccggctccccaacctctaccgaggagggcacctctgagtccgccacccccgagagcggccctggcacctccaccgagcccagcgagggcagcgcacccggcagccctgccggcagccccacctccacagaggagggaaccagcaccgagcccagcgaaggcagcgccccaggcaccagcaccgagcctagtgagggcggctctggcggcggcagcgcccaggagattaaacggatcaacaagatcagaagaagacttgtgaaagacagcaacaccaagaaggccggcaagacaggccccatgaaaaccctgctggttagagtgatgacacccgatctgagagagcggctggaaaacctgagaaagaagcctgaaaatatcccccagcccatcagcaatacatctagagccaacctgaataagctgctgaccgattacaccgaaatgaagaaggcgatcctgcatgtgtactgggaagagttccagaaggaccctgtgggcctgatgagccgggtggcccagcctgccagcaagaagatcgatcagaacaagctgaaacctgagatggacgagaagggcaacctgaccaccgccggctttgcctgctctcagtgtggccagcccctgttcgtgtacaagctggagcaggtgtctgagaagggcaaggcttacaccaactacttcggacggtgcaatgtggccgagcacgaaaagctgatcctgctggcccagctgaagcccgagaaggatagcgacgaagccgtgacatatagcctgggaaagtttgggcagagggccctggatttctacagcattcatgtgaccaaggagtccacccaccccgtgaagcccctggcccagatcgccggaaacagatacgcctccggacctgtgggaaaggccctgagcgacgcatgtatgggcacaatcgcctccttcctgtctaagtaccaggacatcatcatcgaacaccagaaggtggtgaagggcaaccagaagagactggagagcctgcgggagctggccggcaaggaaaacctggaataccctagcgtgaccctgccacctcagcctcacaccaaggagggcgttgatgcctacaacgaagtgatcgcccgggtgcgaatgtgggtgaacctgaacctgtggcagaagctgaagctaagcagagatgatgccaagcctctgctgagactgaagggattcccttcctttcctctggtcgagagacaggccaacgaagtggactggtgggacatggtgtgtaacgtgaagaagctgatcaacgagaaaaaggaggatggcaaggtgttttggcagaatctggctggctacaagagacaggaagccctgagaccatacctgagcagcgaggaagatcggaagaagggaaagaaattcgctcggtaccagctgggcgacctgctgctgcacctggaaaagaagcacggcgaggactggggaaaggtgtacgacgaggcctgggagcggattgacaagaaagtggaaggcctgagcaagcacatcaagctggaagaggaacggagaagcgaggacgcccagagcaaggccgccctgaccgactggctgcgggctaaggccagcttcgtgatcgagggcctgaaggaggccgacaaggacgagttctgcagatgcgagctgaagctgcagaagtggtacggggacctgcggggaaagcccttcgccatcgaagccgagaacagcatcctggacatcagcggcttcagcaagcagtacaactgtgccttcatctggcagaaggacggcgtgaagaagctgaacctgtacctgatcatcaactacttcaagggcggcaagctgcggttcaagaagatcaaacctgaagccttcgaagccaacagattctacaccgtgatcaacaaaaagagcggcgagatcgtgcccatggaggtgaacttcaacttcgacgaccccaacctgatcatcctgcctctggcctttggcaagagacagggcagagaattcatctggaacgacctgctgtccctggaaaccggcagcctgaagctggccaacggaagagtgatcgagaagacactgtacaacagaagaacccggcaggatgagcctgccctgttcgtggccctgaccttcgagcggcgggaggtcctggactcctccaatatcaaaccaatgaacctgatcggcgtggcaagaggcgaaaacatccccgccgtgatcgccctgaccgaccccgagggctgcccactgagccggtttaaggatagcctgggaaacccaacccacatcctgagaatcggcgagagctataaggagaagcagcggaccatccaggccaagaaggaggtggagcagcggagagccggcggctacagccggaagtacgccagcaaagccaagaatctggcagacgatatggtgagaaacaccgctagagatctgctgtactacgccgtgacccaggatgccatgctgatcttcgccaacctgagccggggcttcggccggcagggcaagcggaccttcatggccgagagacagtacacacggatggaggactggctgaccgccaagctggcctacgagggcctgagcaagacctacctgtccaagacactggcccagtacacctccaagacatgcagcaactgtgggtttaccatcaccagcgccgactacgacagggtgctggagaagctgaagaagacagcaacaggctggatgaccacaattaacggcaaggagctgaaggtggagggccagattacctactacaacagatacaagagacagaacgtagtcaaggacctgtccgtcgagctggatagactgagcgaagaatctgtgaacaacgacatctcctcctggacaaagggcagaagcggagaagctctgagcctcctgaagaaaagattctcccatagacccgtgcaggagaagttcgtgtgcctgaactgcggcttcgagacacacgcagccgagcaagccgccctgaacatcgccagatcctggctgttcctgcggagccaggagtacaagaaataccagacaaacaagacaaccggcaacaccgataagagagccttcgtcgagacctggcagtccttttaccggaagaagcttaaggaggtgtggaaacctgccgtgcggtctggcggatctggcggaggctccacaagcagccaggacctggtgaccttcaaggacgtggccatcgacttcagccaggaggagtgggagtggctgaaccccgcccagaggaacctgtacaagaacatgatgctggagaactaccagaacctggtgagcctgggcctgtgcatcagcaagccctacgtgatcagcctgctggagcagggcaagggcccctgggagatgaagaccgagatgaccaggagccccttccccgacagcggcagcgtgaccagccccaagaaaaagagaaaagtctaagctgccttctgcggggcttgccttctggccatgcccttcttctctcccttgcacctgtacctcttggtctttgaataaagcctgagtaggaaggctagcaaaaaaaaaaaaaaaaaaaaaaaaaaaaaaaaaaaaaaaaaaaaaaaaaaaaaaaaaaaaaaaaaaaaaaaaaaaaaaaa

SEQ ID NO: 6851 - RNA, 5797 nt, synthetic construct
  source 1..5797: mol_type = other RNA
aggaaataagagagaaaagaagagtaagaagaaatataagagccaccatggcccctaagaagaagcgtaaagtgagccggatggaacgcctcgtctacgaggtgcggcagaagtgcagaaacatcgaggacatctgcatctcctgcggatctctgaacgtgaccctggagcacccactgttcatcggcggcatgtgccagaactgtaaaaactgttttctggagtgtgcctatcaatacgacgatgacggctaccagagctactgcaccatctgttgcggcggaagagaggtgctgatgtgtggaaataacaactgctgccggtgcttctgcgtggaatgcgtggacctgctggtgggccccggcgccgcccaggccgctattaaggaagatccttggaactgctacatgtgcggccacaagggcacatacggcctgctgagacggagagaggactggcctagcagactgcagatgttcttcgccaataaccacgaccaggagttcgacccccctaaggtgtaccctcccgtccccgccgagaagagaaagcccatccgggtcctgagcctgttcgatggcatcgccaccggtctgctggtgctgaaggacctgggcatccaggtggataggtacattgcctccgaggtgtgcgaggactccatcaccgtgggaatggtgcgtcatcagggcaagatcatgtacgtgggcgacgtgcggagcgtgacacagaagcatatccaggagtggggccctttcgacctggtgatcggcggcagcccttgcaatgacctgagcatcgtgaacccagcccggaagggcctgtacgagggaaccggcagactgttcttcgagttttacagactgctgcacgacgcccggcctaaggaaggcgacgaccggcccttcttttggctgttcgagaatgtggtggccatgggagtcagcgacaagcgggatattagccggttcctggagagcaaccccgtgatgatcgatgccaaggaagtgagcgccgcccaccgggccagatacttctggggcaatctgcctggcatgaacagacccctggccagcaccgtgaacgacaagctggagctgcaggagtgcctggagcacggccggatcgccaagttcagcaaggtgagaaccatcaccacccgaagcaacagcatcaaacaaggcaaggaccagcactttcctgtgttcatgaacgagaaggaggacatcctgtggtgtaccgagatggagagagtgttcgggttcccagtccactacacagatgtcagcaacatgtctagactggccagacagagactgctgggaagaagctggtccgtccctgtgatcagacacctgttcgcccctctgaaggagtacttcgcctgcgtgagcagcggcaacagcaacgccaacagccggggccccagcttctctagcggcctggtgccactgtccctgagagggagccacatgggccccatggagatctacaaaaccgtgagcgcctggaagcggcagcctgtgcgcgtgctgagcctgtttcggaatatcgataaagtcctgaaaagcctgggattcctggagagcggctctggctccggcggtggcaccctgaagtacgtggaggatgtgacaaacgtggtcagacgggatgtggagaagtggggccccttcgatctggtgtacggcagcacccaacccctgggcagctcttgtgaccggtgccctggctggtacatgtttcagttccaccggatcctgcagtacgccctgccgagacaggagtcccagcggccattcttttggattttcatggacaacttgctgctgaccgaggatgaccaggaaactaccactcggttcctgcagaccgaagccgtgaccctgcaggacgtgagaggccgggactaccagaacgccatgcgggtgtggtccaacatccctggactgaaaagcaagcacgcacctctgacccctaaagaagaggagtacctgcaggcccaggtgcggagcagaagcaagctggacgcccctaaggtggatctgctggtgaagaattgcctcctgcccctgagagagtacttcaagtatttcagccagaatagtctgcccctgggcggcccaagcagcggcgcccctcctcccagcggcggcagcccagccggctccccaacctctaccgaggagggcacctctgagtccgccacccccgagagcggccctggcacctccaccgagcccagcgagggcagcgcacccggcagccctgccggcagccccacctccacagaggagggaaccagcaccgagcccagcgaaggcagcgccccaggcaccagcaccgagcctagtgagggcggctctggcggcggcagcgcccaggagattaaacggatcaacaagatcagaagaagacttgtgaaagacagcaacaccaagaaggccggcaagacaggccccatgaaaaccctgctggttagagtgatgacacccgatctgagagagcggctggaaaacctgagaaagaagcctgaaaatatcccccagcccatcagcaatacatctagagccaacctgaataagctgctgaccgattacaccgaaatgaagaaggcgatcctgcatgtgtactgggaagagttccagaaggaccctgtgggcctgatgagccgggtggcccagcctgccagcaagaagatcgatcagaacaagctgaaacctgagatggacgagaagggcaacctgaccaccgccggctttgcctgctctcagtgtggccagcccctgttcgtgtacaagctggagcaggtgtctgagaagggcaaggcttacaccaactacttcggacggtgcaatgtggccgagcacgaaaagctgatcctgctggcccagctgaagcccgagaaggatagcgacgaagccgtgacatatagcctgggaaagtttgggcagagggccctggatttctacagcattcatgtgaccaaggagtccacccaccccgtgaagcccctggcccagatcgccggaaacagatacgcctccggacctgtgggaaaggccctgagcgacgcatgtatgggcacaatcgcctccttcctgtctaagtaccaggacatcatcatcgaacaccagaaggtggtgaagggcaaccagaagagactggagagcctgcgggagctggccggcaaggaaaacctggaataccctagcgtgaccctgccacctcagcctcacaccaaggagggcgttgatgcctacaacgaagtgatcgcccgggtgcgaatgtgggtgaacctgaacctgtggcagaagctgaagctaagcagagatgatgccaagcctctgctgagactgaagggattcccttcctttcctctggtcgagagacaggccaacgaagtggactggtgggacatggtgtgtaacgtgaagaagctgatcaacgagaaaaaggaggatggcaaggtgttttggcagaatctggctggctacaagagacaggaagccctgagaccatacctgagcagcgaggaagatcggaagaagggaaagaaattcgctcggtaccagctgggcgacctgctgctgcacctggaaaagaagcacggcgaggactggggaaaggtgtacgacgaggcctgggagcggattgacaagaaagtggaaggcctgagcaagcacatcaagctggaagaggaacggagaagcgaggacgcccagagcaaggccgccctgaccgactggctgcgggctaaggccagcttcgtgatcgagggcctgaaggaggccgacaaggacgagttctgcagatgcgagctgaagctgcagaagtggtacggggacctgcggggaaagcccttcgccatcgaagccgagaacagcatcctggacatcagcggcttcagcaagcagtacaactgtgccttcatctggcagaaggacggcgtgaagaagctgaacctgtacctgatcatcaactacttcaagggcggcaagctgcggttcaagaagatcaaacctgaagccttcgaagccaacagattctacaccgtgatcaacaaaaagagcggcgagatcgtgcccatggaggtgaacttcaacttcgacgaccccaacctgatcatcctgcctctggcctttggcaagagacagggcagagaattcatctggaacgacctgctgtccctggaaaccggcagcctgaagctggccaacggaagagtgatcgagaagacactgtacaacagaagaacccggcaggatgagcctgccctgttcgtggccctgaccttcgagcggcgggaggtcctggactcctccaatatcaaaccaatgaacctgatcggcgtggcaagaggcgaaaacatccccgccgtgatcgccctgaccgaccccgagggctgcccactgagccggtttaaggatagcctgggaaacccaacccacatcctgagaatcggcgagagctataaggagaagcagcggaccatccaggccaagaaggaggtggagcagcggagagccggcggctacagccggaagtacgccagcaaagccaagaatctggcagacgatatggtgagaaacaccgctagagatctgctgtactacgccgtgacccaggatgccatgctgatcttcgccaacctgagccggggcttcggccggcagggcaagcggaccttcatggccgagagacagtacacacggatggaggactggctgaccgccaagctggcctacgagggcctgagcaagacctacctgtccaagacactggcccagtacacctccaagacatgcagcaactgtgggtttaccatcaccagcgccgactacgacagggtgctggagaagctgaagaagacagcaacaggctggatgaccacaattaacggcaaggagctgaaggtggagggccagattacctactacaacagatacaagagacagaacgtagtcaaggacctgtccgtcgagctggatagactgagcgaagaatctgtgaacaacgacatctcctcctggacaaagggcagaagcggagaagctctgagcctcctgaagaaaagattctcccatagacccgtgcaggagaagttcgtgtgcctgaactgcggcttcgagacacacgcagccgagcaagccgccctgaacatcgccagatcctggctgttcctgcggagccaggagtacaagaaataccagacaaacaagacaaccggcaacaccgataagagagccttcgtcgagacctggcagtccttttaccggaagaagcttaaggaggtgtggaaacctgccgtgcggtctggcggatctggcggaggctccacaagccagcaggtgcccgtgaccttcgaggacgtggccgtgagcttcagccaggaggagtggaagtacctggacgaggcccagaagaacctgtactgggaggtgatgaaggagaactacgagaccctgatcagcctggacagcgaggtgcaccaggaggaggagagggagaagaaccaggaggagtaccccatgctgtggggcctgatcagcaggcagagcaggaagaaccacgagaaggtgtactggaccagccccaagaaaaagagaaaagtctaagctgccttctgcggggcttgccttctggccatgcccttcttctctcccttgcacctgtacctcttggtctttgaataaagcctgagtaggaaggctagcaaaaaaaaaaaaaaaaaaaaaaaaaaaaaaaaaaaaaaaaaaaaaaaaaaaaaaaaaaaaaaaaaaaaaaaaaaaaaaaa

SEQ ID NO: 6852 - RNA, 5797 nt, synthetic construct
  source 1..5797: mol_type = other RNA
aggaaataagagagaaaagaagagtaagaagaaatataagagccaccatggcccctaagaagaagcgtaaagtgagccggatggaacgcctcgtctacgaggtgcggcagaagtgcagaaacatcgaggacatctgcatctcctgcggatctctgaacgtgaccctggagcacccactgttcatcggcggcatgtgccagaactgtaaaaactgttttctggagtgtgcctatcaatacgacgatgacggctaccagagctactgcaccatctgttgcggcggaagagaggtgctgatgtgtggaaataacaactgctgccggtgcttctgcgtggaatgcgtggacctgctggtgggccccggcgccgcccaggccgctattaaggaagatccttggaactgctacatgtgcggccacaagggcacatacggcctgctgagacggagagaggactggcctagcagactgcagatgttcttcgccaataaccacgaccaggagttcgacccccctaaggtgtaccctcccgtccccgccgagaagagaaagcccatccgggtcctgagcctgttcgatggcatcgccaccggtctgctggtgctgaaggacctgggcatccaggtggataggtacattgcctccgaggtgtgcgaggactccatcaccgtgggaatggtgcgtcatcagggcaagatcatgtacgtgggcgacgtgcggagcgtgacacagaagcatatccaggagtggggccctttcgacctggtgatcggcggcagcccttgcaatgacctgagcatcgtgaacccagcccggaagggcctgtacgagggaaccggcagactgttcttcgagttttacagactgctgcacgacgcccggcctaaggaaggcgacgaccggcccttcttttggctgttcgagaatgtggtggccatgggagtcagcgacaagcgggatattagccggttcctggagagcaaccccgtgatgatcgatgccaaggaagtgagcgccgcccaccgggccagatacttctggggcaatctgcctggcatgaacagacccctggccagcaccgtgaacgacaagctggagctgcaggagtgcctggagcacggccggatcgccaagttcagcaaggtgagaaccatcaccacccgaagcaacagcatcaaacaaggcaaggaccagcactttcctgtgttcatgaacgagaaggaggacatcctgtggtgtaccgagatggagagagtgttcgggttcccagtccactacacagatgtcagcaacatgtctagactggccagacagagactgctgggaagaagctggtccgtccctgtgatcagacacctgttcgcccctctgaaggagtacttcgcctgcgtgagcagcggcaacagcaacgccaacagccggggccccagcttctctagcggcctggtgccactgtccctgagagggagccacatgggccccatggagatctacaaaaccgtgagcgcctggaagcggcagcctgtgcgcgtgctgagcctgtttcggaatatcgataaagtcctgaaaagcctgggattcctggagagcggctctggctccggcggtggcaccctgaagtacgtggaggatgtgacaaacgtggtcagacgggatgtggagaagtggggccccttcgatctggtgtacggcagcacccaacccctgggcagctcttgtgaccggtgccctggctggtacatgtttcagttccaccggatcctgcagtacgccctgccgagacaggagtcccagcggccattcttttggattttcatggacaacttgctgctgaccgaggatgaccaggaaactaccactcggttcctgcagaccgaagccgtgaccctgcaggacgtgagaggccgggactaccagaacgccatgcgggtgtggtccaacatccctggactgaaaagcaagcacgcacctctgacccctaaagaagaggagtacctgcaggcccaggtgcggagcagaagcaagctggacgcccctaaggtggatctgctggtgaagaattgcctcctgcccctgagagagtacttcaagtatttcagccagaatagtctgcccctgggcggcccaagcagcggcgcccctcctcccagcggcggcagcccagccggctccccaacctctaccgaggagggcacctctgagtccgccacccccgagagcggccctggcacctccaccgagcccagcgagggcagcgcacccggcagccctgccggcagccccacctccacagaggagggaaccagcaccgagcccagcgaaggcagcgccccaggcaccagcaccgagcctagtgagggcggctctggcggcggcagcgcccaggagattaaacggatcaacaagatcagaagaagacttgtgaaagacagcaacaccaagaaggccggcaagacaggccccatgaaaaccctgctggttagagtgatgacacccgatctgagagagcggctggaaaacctgagaaagaagcctgaaaatatcccccagcccatcagcaatacatctagagccaacctgaataagctgctgaccgattacaccgaaatgaagaaggcgatcctgcatgtgtactgggaagagttccagaaggaccctgtgggcctgatgagccgggtggcccagcctgccagcaagaagatcgatcagaacaagctgaaacctgagatggacgagaagggcaacctgaccaccgccggctttgcctgctctcagtgtggccagcccctgttcgtgtacaagctggagcaggtgtctgagaagggcaaggcttacaccaactacttcggacggtgcaatgtggccgagcacgaaaagctgatcctgctggcccagctgaagcccgagaaggatagcgacgaagccgtgacatatagcctgggaaagtttgggcagagggccctggatttctacagcattcatgtgaccaaggagtccacccaccccgtgaagcccctggcccagatcgccggaaacagatacgcctccggacctgtgggaaaggccctgagcgacgcatgtatgggcacaatcgcctccttcctgtctaagtaccaggacatcatcatcgaacaccagaaggtggtgaagggcaaccagaagagactggagagcctgcgggagctggccggcaaggaaaacctggaataccctagcgtgaccctgccacctcagcctcacaccaaggagggcgttgatgcctacaacgaagtgatcgcccgggtgcgaatgtgggtgaacctgaacctgtggcagaagctgaagctaagcagagatgatgccaagcctctgctgagactgaagggattcccttcctttcctctggtcgagagacaggccaacgaagtggactggtgggacatggtgtgtaacgtgaagaagctgatcaacgagaaaaaggaggatggcaaggtgttttggcagaatctggctggctacaagagacaggaagccctgagaccatacctgagcagcgaggaagatcggaagaagggaaagaaattcgctcggtaccagctgggcgacctgctgctgcacctggaaaagaagcacggcgaggactggggaaaggtgtacgacgaggcctgggagcggattgacaagaaagtggaaggcctgagcaagcacatcaagctggaagaggaacggagaagcgaggacgcccagagcaaggccgccctgaccgactggctgcgggctaaggccagcttcgtgatcgagggcctgaaggaggccgacaaggacgagttctgcagatgcgagctgaagctgcagaagtggtacggggacctgcggggaaagcccttcgccatcgaagccgagaacagcatcctggacatcagcggcttcagcaagcagtacaactgtgccttcatctggcagaaggacggcgtgaagaagctgaacctgtacctgatcatcaactacttcaagggcggcaagctgcggttcaagaagatcaaacctgaagccttcgaagccaacagattctacaccgtgatcaacaaaaagagcggcgagatcgtgcccatggaggtgaacttcaacttcgacgaccccaacctgatcatcctgcctctggcctttggcaagagacagggcagagaattcatctggaacgacctgctgtccctggaaaccggcagcctgaagctggccaacggaagagtgatcgagaagacactgtacaacagaagaacccggcaggatgagcctgccctgttcgtggccctgaccttcgagcggcgggaggtcctggactcctccaatatcaaaccaatgaacctgatcggcgtggcaagaggcgaaaacatccccgccgtgatcgccctgaccgaccccgagggctgcccactgagccggtttaaggatagcctgggaaacccaacccacatcctgagaatcggcgagagctataaggagaagcagcggaccatccaggccaagaaggaggtggagcagcggagagccggcggctacagccggaagtacgccagcaaagccaagaatctggcagacgatatggtgagaaacaccgctagagatctgctgtactacgccgtgacccaggatgccatgctgatcttcgccaacctgagccggggcttcggccggcagggcaagcggaccttcatggccgagagacagtacacacggatggaggactggctgaccgccaagctggcctacgagggcctgagcaagacctacctgtccaagacactggcccagtacacctccaagacatgcagcaactgtgggtttaccatcaccagcgccgactacgacagggtgctggagaagctgaagaagacagcaacaggctggatgaccacaattaacggcaaggagctgaaggtggagggccagattacctactacaacagatacaagagacagaacgtagtcaaggacctgtccgtcgagctggatagactgagcgaagaatctgtgaacaacgacatctcctcctggacaaagggcagaagcggagaagctctgagcctcctgaagaaaagattctcccatagacccgtgcaggagaagttcgtgtgcctgaactgcggcttcgagacacacgcagccgagcaagccgccctgaacatcgccagatcctggctgttcctgcggagccaggagtacaagaaataccagacaaacaagacaaccggcaacaccgataagagagccttcgtcgagacctggcagtccttttaccggaagaagcttaaggaggtgtggaaacctgccgtgcggtctggcggatctggcggaggctccacaagccccagggagagcgtgaccttcgaggacgtggccgtgaacttcagccacgaggagtggcagtgcctgacccacagccagaggcacctgtacaaggacgtgatgctggagaactacggcaacatggtgagcctgggcttcagcttcagcaagccccccctgatcagctgcctggagcagggcgccgagagctacgtgcaggaccagcaggactgggagttcctgagctgcagctaccccgtgagcaccagccccaagaaaaagagaaaagtctaagctgccttctgcggggcttgccttctggccatgcccttcttctctcccttgcacctgtacctcttggtctttgaataaagcctgagtaggaaggctagcaaaaaaaaaaaaaaaaaaaaaaaaaaaaaaaaaaaaaaaaaaaaaaaaaaaaaaaaaaaaaaaaaaaaaaaaaaaaaaaa

SEQ ID NO: 6853 - RNA, 5797 nt, synthetic construct
  source 1..5797: mol_type = other RNA
aggaaataagagagaaaagaagagtaagaagaaatataagagccaccatggcccctaagaagaagcgtaaagtgagccggatggaacgcctcgtctacgaggtgcggcagaagtgcagaaacatcgaggacatctgcatctcctgcggatctctgaacgtgaccctggagcacccactgttcatcggcggcatgtgccagaactgtaaaaactgttttctggagtgtgcctatcaatacgacgatgacggctaccagagctactgcaccatctgttgcggcggaagagaggtgctgatgtgtggaaataacaactgctgccggtgcttctgcgtggaatgcgtggacctgctggtgggccccggcgccgcccaggccgctattaaggaagatccttggaactgctacatgtgcggccacaagggcacatacggcctgctgagacggagagaggactggcctagcagactgcagatgttcttcgccaataaccacgaccaggagttcgacccccctaaggtgtaccctcccgtccccgccgagaagagaaagcccatccgggtcctgagcctgttcgatggcatcgccaccggtctgctggtgctgaaggacctgggcatccaggtggataggtacattgcctccgaggtgtgcgaggactccatcaccgtgggaatggtgcgtcatcagggcaagatcatgtacgtgggcgacgtgcggagcgtgacacagaagcatatccaggagtggggccctttcgacctggtgatcggcggcagcccttgcaatgacctgagcatcgtgaacccagcccggaagggcctgtacgagggaaccggcagactgttcttcgagttttacagactgctgcacgacgcccggcctaaggaaggcgacgaccggcccttcttttggctgttcgagaatgtggtggccatgggagtcagcgacaagcgggatattagccggttcctggagagcaaccccgtgatgatcgatgccaaggaagtgagcgccgcccaccgggccagatacttctggggcaatctgcctggcatgaacagacccctggccagcaccgtgaacgacaagctggagctgcaggagtgcctggagcacggccggatcgccaagttcagcaaggtgagaaccatcaccacccgaagcaacagcatcaaacaaggcaaggaccagcactttcctgtgttcatgaacgagaaggaggacatcctgtggtgtaccgagatggagagagtgttcgggttcccagtccactacacagatgtcagcaacatgtctagactggccagacagagactgctgggaagaagctggtccgtccctgtgatcagacacctgttcgcccctctgaaggagtacttcgcctgcgtgagcagcggcaacagcaacgccaacagccggggccccagcttctctagcggcctggtgccactgtccctgagagggagccacatgggccccatggagatctacaaaaccgtgagcgcctggaagcggcagcctgtgcgcgtgctgagcctgtttcggaatatcgataaagtcctgaaaagcctgggattcctggagagcggctctggctccggcggtggcaccctgaagtacgtggaggatgtgacaaacgtggtcagacgggatgtggagaagtggggccccttcgatctggtgtacggcagcacccaacccctgggcagctcttgtgaccggtgccctggctggtacatgtttcagttccaccggatcctgcagtacgccctgccgagacaggagtcccagcggccattcttttggattttcatggacaacttgctgctgaccgaggatgaccaggaaactaccactcggttcctgcagaccgaagccgtgaccctgcaggacgtgagaggccgggactaccagaacgccatgcgggtgtggtccaacatccctggactgaaaagcaagcacgcacctctgacccctaaagaagaggagtacctgcaggcccaggtgcggagcagaagcaagctggacgcccctaaggtggatctgctggtgaagaattgcctcctgcccctgagagagtacttcaagtatttcagccagaatagtctgcccctgggcggcccaagcagcggcgcccctcctcccagcggcggcagcccagccggctccccaacctctaccgaggagggcacctctgagtccgccacccccgagagcggccctggcacctccaccgagcccagcgagggcagcgcacccggcagccctgccggcagccccacctccacagaggagggaaccagcaccgagcccagcgaaggcagcgccccaggcaccagcaccgagcctagtgagggcggctctggcggcggcagcgcccaggagattaaacggatcaacaagatcagaagaagacttgtgaaagacagcaacaccaagaaggccggcaagacaggccccatgaaaaccctgctggttagagtgatgacacccgatctgagagagcggctggaaaacctgagaaagaagcctgaaaatatcccccagcccatcagcaatacatctagagccaacctgaataagctgctgaccgattacaccgaaatgaagaaggcgatcctgcatgtgtactgggaagagttccagaaggaccctgtgggcctgatgagccgggtggcccagcctgccagcaagaagatcgatcagaacaagctgaaacctgagatggacgagaagggcaacctgaccaccgccggctttgcctgctctcagtgtggccagcccctgttcgtgtacaagctggagcaggtgtctgagaagggcaaggcttacaccaactacttcggacggtgcaatgtggccgagcacgaaaagctgatcctgctggcccagctgaagcccgagaaggatagcgacgaagccgtgacatatagcctgggaaagtttgggcagagggccctggatttctacagcattcatgtgaccaaggagtccacccaccccgtgaagcccctggcccagatcgccggaaacagatacgcctccggacctgtgggaaaggccctgagcgacgcatgtatgggcacaatcgcctccttcctgtctaagtaccaggacatcatcatcgaacaccagaaggtggtgaagggcaaccagaagagactggagagcctgcgggagctggccggcaaggaaaacctggaataccctagcgtgaccctgccacctcagcctcacaccaaggagggcgttgatgcctacaacgaagtgatcgcccgggtgcgaatgtgggtgaacctgaacctgtggcagaagctgaagctaagcagagatgatgccaagcctctgctgagactgaagggattcccttcctttcctctggtcgagagacaggccaacgaagtggactggtgggacatggtgtgtaacgtgaagaagctgatcaacgagaaaaaggaggatggcaaggtgttttggcagaatctggctggctacaagagacaggaagccctgagaccatacctgagcagcgaggaagatcggaagaagggaaagaaattcgctcggtaccagctgggcgacctgctgctgcacctggaaaagaagcacggcgaggactggggaaaggtgtacgacgaggcctgggagcggattgacaagaaagtggaaggcctgagcaagcacatcaagctggaagaggaacggagaagcgaggacgcccagagcaaggccgccctgaccgactggctgcgggctaaggccagcttcgtgatcgagggcctgaaggaggccgacaaggacgagttctgcagatgcgagctgaagctgcagaagtggtacggggacctgcggggaaagcccttcgccatcgaagccgagaacagcatcctggacatcagcggcttcagcaagcagtacaactgtgccttcatctggcagaaggacggcgtgaagaagctgaacctgtacctgatcatcaactacttcaagggcggcaagctgcggttcaagaagatcaaacctgaagccttcgaagccaacagattctacaccgtgatcaacaaaaagagcggcgagatcgtgcccatggaggtgaacttcaacttcgacgaccccaacctgatcatcctgcctctggcctttggcaagagacagggcagagaattcatctggaacgacctgctgtccctggaaaccggcagcctgaagctggccaacggaagagtgatcgagaagacactgtacaacagaagaacccggcaggatgagcctgccctgttcgtggccctgaccttcgagcggcgggaggtcctggactcctccaatatcaaaccaatgaacctgatcggcgtggcaagaggcgaaaacatccccgccgtgatcgccctgaccgaccccgagggctgcccactgagccggtttaaggatagcctgggaaacccaacccacatcctgagaatcggcgagagctataaggagaagcagcggaccatccaggccaagaaggaggtggagcagcggagagccggcggctacagccggaagtacgccagcaaagccaagaatctggcagacgatatggtgagaaacaccgctagagatctgctgtactacgccgtgacccaggatgccatgctgatcttcgccaacctgagccggggcttcggccggcagggcaagcggaccttcatggccgagagacagtacacacggatggaggactggctgaccgccaagctggcctacgagggcctgagcaagacctacctgtccaagacactggcccagtacacctccaagacatgcagcaactgtgggtttaccatcaccagcgccgactacgacagggtgctggagaagctgaagaagacagcaacaggctggatgaccacaattaacggcaaggagctgaaggtggagggccagattacctactacaacagatacaagagacagaacgtagtcaaggacctgtccgtcgagctggatagactgagcgaagaatctgtgaacaacgacatctcctcctggacaaagggcagaagcggagaagctctgagcctcctgaagaaaagattctcccatagacccgtgcaggagaagttcgtgtgcctgaactgcggcttcgagacacacgcagccgagcaagccgccctgaacatcgccagatcctggctgttcctgcggagccaggagtacaagaaataccagacaaacaagacaaccggcaacaccgataagagagccttcgtcgagacctggcagtccttttaccggaagaagcttaaggaggtgtggaaacctgccgtgcggtctggcggatctggcggaggctccacaagcagcagccagggcctgctgaccttcagggacgtggccatcgagttcagccaggaggagtggggctgcctgaaccacacccagagggagctgtacagggacgtgatgctggagaactacggccacctgctgttcctgggcctgatcgtgagcaagcccgacctggtgagcttcctggagcagaagaaggacccctgggacgtgaagaggaagaagaccgtggccttccaccccggcaggtgggagaccagccccaagaaaaagagaaaagtctaagctgccttctgcggggcttgccttctggccatgcccttcttctctcccttgcacctgtacctcttggtctttgaataaagcctgagtaggaaggctagcaaaaaaaaaaaaaaaaaaaaaaaaaaaaaaaaaaaaaaaaaaaaaaaaaaaaaaaaaaaaaaaaaaaaaaaaaaaaaaaa

SEQ ID NO: 6854 - RNA, 5797 nt, synthetic construct
  source 1..5797: mol_type = other RNA
aggaaataagagagaaaagaagagtaagaagaaatataagagccaccatggcccctaagaagaagcgtaaagtgagccggatggaacgcctcgtctacgaggtgcggcagaagtgcagaaacatcgaggacatctgcatctcctgcggatctctgaacgtgaccctggagcacccactgttcatcggcggcatgtgccagaactgtaaaaactgttttctggagtgtgcctatcaatacgacgatgacggctaccagagctactgcaccatctgttgcggcggaagagaggtgctgatgtgtggaaataacaactgctgccggtgcttctgcgtggaatgcgtggacctgctggtgggccccggcgccgcccaggccgctattaaggaagatccttggaactgctacatgtgcggccacaagggcacatacggcctgctgagacggagagaggactggcctagcagactgcagatgttcttcgccaataaccacgaccaggagttcgacccccctaaggtgtaccctcccgtccccgccgagaagagaaagcccatccgggtcctgagcctgttcgatggcatcgccaccggtctgctggtgctgaaggacctgggcatccaggtggataggtacattgcctccgaggtgtgcgaggactccatcaccgtgggaatggtgcgtcatcagggcaagatcatgtacgtgggcgacgtgcggagcgtgacacagaagcatatccaggagtggggccctttcgacctggtgatcggcggcagcccttgcaatgacctgagcatcgtgaacccagcccggaagggcctgtacgagggaaccggcagactgttcttcgagttttacagactgctgcacgacgcccggcctaaggaaggcgacgaccggcccttcttttggctgttcgagaatgtggtggccatgggagtcagcgacaagcgggatattagccggttcctggagagcaaccccgtgatgatcgatgccaaggaagtgagcgccgcccaccgggccagatacttctggggcaatctgcctggcatgaacagacccctggccagcaccgtgaacgacaagctggagctgcaggagtgcctggagcacggccggatcgccaagttcagcaaggtgagaaccatcaccacccgaagcaacagcatcaaacaaggcaaggaccagcactttcctgtgttcatgaacgagaaggaggacatcctgtggtgtaccgagatggagagagtgttcgggttcccagtccactacacagatgtcagcaacatgtctagactggccagacagagactgctgggaagaagctggtccgtccctgtgatcagacacctgttcgcccctctgaaggagtacttcgcctgcgtgagcagcggcaacagcaacgccaacagccggggccccagcttctctagcggcctggtgccactgtccctgagagggagccacatgggccccatggagatctacaaaaccgtgagcgcctggaagcggcagcctgtgcgcgtgctgagcctgtttcggaatatcgataaagtcctgaaaagcctgggattcctggagagcggctctggctccggcggtggcaccctgaagtacgtggaggatgtgacaaacgtggtcagacgggatgtggagaagtggggccccttcgatctggtgtacggcagcacccaacccctgggcagctcttgtgaccggtgccctggctggtacatgtttcagttccaccggatcctgcagtacgccctgccgagacaggagtcccagcggccattcttttggattttcatggacaacttgctgctgaccgaggatgaccaggaaactaccactcggttcctgcagaccgaagccgtgaccctgcaggacgtgagaggccgggactaccagaacgccatgcgggtgtggtccaacatccctggactgaaaagcaagcacgcacctctgacccctaaagaagaggagtacctgcaggcccaggtgcggagcagaagcaagctggacgcccctaaggtggatctgctggtgaagaattgcctcctgcccctgagagagtacttcaagtatttcagccagaatagtctgcccctgggcggcccaagcagcggcgcccctcctcccagcggcggcagcccagccggctccccaacctctaccgaggagggcacctctgagtccgccacccccgagagcggccctggcacctccaccgagcccagcgagggcagcgcacccggcagccctgccggcagccccacctccacagaggagggaaccagcaccgagcccagcgaaggcagcgccccaggcaccagcaccgagcctagtgagggcggctctggcggcggcagcgcccaggagattaaacggatcaacaagatcagaagaagacttgtgaaagacagcaacaccaagaaggccggcaagacaggccccatgaaaaccctgctggttagagtgatgacacccgatctgagagagcggctggaaaacctgagaaagaagcctgaaaatatcccccagcccatcagcaatacatctagagccaacctgaataagctgctgaccgattacaccgaaatgaagaaggcgatcctgcatgtgtactgggaagagttccagaaggaccctgtgggcctgatgagccgggtggcccagcctgccagcaagaagatcgatcagaacaagctgaaacctgagatggacgagaagggcaacctgaccaccgccggctttgcctgctctcagtgtggccagcccctgttcgtgtacaagctggagcaggtgtctgagaagggcaaggcttacaccaactacttcggacggtgcaatgtggccgagcacgaaaagctgatcctgctggcccagctgaagcccgagaaggatagcgacgaagccgtgacatatagcctgggaaagtttgggcagagggccctggatttctacagcattcatgtgaccaaggagtccacccaccccgtgaagcccctggcccagatcgccggaaacagatacgcctccggacctgtgggaaaggccctgagcgacgcatgtatgggcacaatcgcctccttcctgtctaagtaccaggacatcatcatcgaacaccagaaggtggtgaagggcaaccagaagagactggagagcctgcgggagctggccggcaaggaaaacctggaataccctagcgtgaccctgccacctcagcctcacaccaaggagggcgttgatgcctacaacgaagtgatcgcccgggtgcgaatgtgggtgaacctgaacctgtggcagaagctgaagctaagcagagatgatgccaagcctctgctgagactgaagggattcccttcctttcctctggtcgagagacaggccaacgaagtggactggtgggacatggtgtgtaacgtgaagaagctgatcaacgagaaaaaggaggatggcaaggtgttttggcagaatctggctggctacaagagacaggaagccctgagaccatacctgagcagcgaggaagatcggaagaagggaaagaaattcgctcggtaccagctgggcgacctgctgctgcacctggaaaagaagcacggcgaggactggggaaaggtgtacgacgaggcctgggagcggattgacaagaaagtggaaggcctgagcaagcacatcaagctggaagaggaacggagaagcgaggacgcccagagcaaggccgccctgaccgactggctgcgggctaaggccagcttcgtgatcgagggcctgaaggaggccgacaaggacgagttctgcagatgcgagctgaagctgcagaagtggtacggggacctgcggggaaagcccttcgccatcgaagccgagaacagcatcctggacatcagcggcttcagcaagcagtacaactgtgccttcatctggcagaaggacggcgtgaagaagctgaacctgtacctgatcatcaactacttcaagggcggcaagctgcggttcaagaagatcaaacctgaagccttcgaagccaacagattctacaccgtgatcaacaaaaagagcggcgagatcgtgcccatggaggtgaacttcaacttcgacgaccccaacctgatcatcctgcctctggcctttggcaagagacagggcagagaattcatctggaacgacctgctgtccctggaaaccggcagcctgaagctggccaacggaagagtgatcgagaagacactgtacaacagaagaacccggcaggatgagcctgccctgttcgtggccctgaccttcgagcggcgggaggtcctggactcctccaatatcaaaccaatgaacctgatcggcgtggcaagaggcgaaaacatccccgccgtgatcgccctgaccgaccccgagggctgcccactgagccggtttaaggatagcctgggaaacccaacccacatcctgagaatcggcgagagctataaggagaagcagcggaccatccaggccaagaaggaggtggagcagcggagagccggcggctacagccggaagtacgccagcaaagccaagaatctggcagacgatatggtgagaaacaccgctagagatctgctgtactacgccgtgacccaggatgccatgctgatcttcgccaacctgagccggggcttcggccggcagggcaagcggaccttcatggccgagagacagtacacacggatggaggactggctgaccgccaagctggcctacgagggcctgagcaagacctacctgtccaagacactggcccagtacacctccaagacatgcagcaactgtgggtttaccatcaccagcgccgactacgacagggtgctggagaagctgaagaagacagcaacaggctggatgaccacaattaacggcaaggagctgaaggtggagggccagattacctactacaacagatacaagagacagaacgtagtcaaggacctgtccgtcgagctggatagactgagcgaagaatctgtgaacaacgacatctcctcctggacaaagggcagaagcggagaagctctgagcctcctgaagaaaagattctcccatagacccgtgcaggagaagttcgtgtgcctgaactgcggcttcgagacacacgcagccgagcaagccgccctgaacatcgccagatcctggctgttcctgcggagccaggagtacaagaaataccagacaaacaagacaaccggcaacaccgataagagagccttcgtcgagacctggcagtccttttaccggaagaagcttaaggaggtgtggaaacctgccgtgcggtctggcggatctggcggaggctccacaagcatgctggcccccgtgaccttcgaggacgtgaccgtggtgttcaccgaggccgagtgggtgaccctgagcaccgagcagaagaacctgtacaaggaggtgaccctggagacctacaggaacctgctgagcctggccgagcccacccccgagacctaccccggccccagctgcctgctgcccttcagctgccagcagttcctgagccagcacgtgctgcagatcttccccggcgtgtgcgccgagaccagccccaagaaaaagagaaaagtctaagctgccttctgcggggcttgccttctggccatgcccttcttctctcccttgcacctgtacctcttggtctttgaataaagcctgagtaggaaggctagcaaaaaaaaaaaaaaaaaaaaaaaaaaaaaaaaaaaaaaaaaaaaaaaaaaaaaaaaaaaaaaaaaaaaaaaaaaaaaaaa

SEQ ID NO: 6855 - RNA, 5797 nt, synthetic construct
  source 1..5797: mol_type = other RNA
aggaaataagagagaaaagaagagtaagaagaaatataagagccaccatggcccctaagaagaagcgtaaagtgagccggatggaacgcctcgtctacgaggtgcggcagaagtgcagaaacatcgaggacatctgcatctcctgcggatctctgaacgtgaccctggagcacccactgttcatcggcggcatgtgccagaactgtaaaaactgttttctggagtgtgcctatcaatacgacgatgacggctaccagagctactgcaccatctgttgcggcggaagagaggtgctgatgtgtggaaataacaactgctgccggtgcttctgcgtggaatgcgtggacctgctggtgggccccggcgccgcccaggccgctattaaggaagatccttggaactgctacatgtgcggccacaagggcacatacggcctgctgagacggagagaggactggcctagcagactgcagatgttcttcgccaataaccacgaccaggagttcgacccccctaaggtgtaccctcccgtccccgccgagaagagaaagcccatccgggtcctgagcctgttcgatggcatcgccaccggtctgctggtgctgaaggacctgggcatccaggtggataggtacattgcctccgaggtgtgcgaggactccatcaccgtgggaatggtgcgtcatcagggcaagatcatgtacgtgggcgacgtgcggagcgtgacacagaagcatatccaggagtggggccctttcgacctggtgatcggcggcagcccttgcaatgacctgagcatcgtgaacccagcccggaagggcctgtacgagggaaccggcagactgttcttcgagttttacagactgctgcacgacgcccggcctaaggaaggcgacgaccggcccttcttttggctgttcgagaatgtggtggccatgggagtcagcgacaagcgggatattagccggttcctggagagcaaccccgtgatgatcgatgccaaggaagtgagcgccgcccaccgggccagatacttctggggcaatctgcctggcatgaacagacccctggccagcaccgtgaacgacaagctggagctgcaggagtgcctggagcacggccggatcgccaagttcagcaaggtgagaaccatcaccacccgaagcaacagcatcaaacaaggcaaggaccagcactttcctgtgttcatgaacgagaaggaggacatcctgtggtgtaccgagatggagagagtgttcgggttcccagtccactacacagatgtcagcaacatgtctagactggccagacagagactgctgggaagaagctggtccgtccctgtgatcagacacctgttcgcccctctgaaggagtacttcgcctgcgtgagcagcggcaacagcaacgccaacagccggggccccagcttctctagcggcctggtgccactgtccctgagagggagccacatgggccccatggagatctacaaaaccgtgagcgcctggaagcggcagcctgtgcgcgtgctgagcctgtttcggaatatcgataaagtcctgaaaagcctgggattcctggagagcggctctggctccggcggtggcaccctgaagtacgtggaggatgtgacaaacgtggtcagacgggatgtggagaagtggggccccttcgatctggtgtacggcagcacccaacccctgggcagctcttgtgaccggtgccctggctggtacatgtttcagttccaccggatcctgcagtacgccctgccgagacaggagtcccagcggccattcttttggattttcatggacaacttgctgctgaccgaggatgaccaggaaactaccactcggttcctgcagaccgaagccgtgaccctgcaggacgtgagaggccgggactaccagaacgccatgcgggtgtggtccaacatccctggactgaaaagcaagcacgcacctctgacccctaaagaagaggagtacctgcaggcccaggtgcggagcagaagcaagctggacgcccctaaggtggatctgctggtgaagaattgcctcctgcccctgagagagtacttcaagtatttcagccagaatagtctgcccctgggcggcccaagcagcggcgcccctcctcccagcggcggcagcccagccggctccccaacctctaccgaggagggcacctctgagtccgccacccccgagagcggccctggcacctccaccgagcccagcgagggcagcgcacccggcagccctgccggcagccccacctccacagaggagggaaccagcaccgagcccagcgaaggcagcgccccaggcaccagcaccgagcctagtgagggcggctctggcggcggcagcgcccaggagattaaacggatcaacaagatcagaagaagacttgtgaaagacagcaacaccaagaaggccggcaagacaggccccatgaaaaccctgctggttagagtgatgacacccgatctgagagagcggctggaaaacctgagaaagaagcctgaaaatatcccccagcccatcagcaatacatctagagccaacctgaataagctgctgaccgattacaccgaaatgaagaaggcgatcctgcatgtgtactgggaagagttccagaaggaccctgtgggcctgatgagccgggtggcccagcctgccagcaagaagatcgatcagaacaagctgaaacctgagatggacgagaagggcaacctgaccaccgccggctttgcctgctctcagtgtggccagcccctgttcgtgtacaagctggagcaggtgtctgagaagggcaaggcttacaccaactacttcggacggtgcaatgtggccgagcacgaaaagctgatcctgctggcccagctgaagcccgagaaggatagcgacgaagccgtgacatatagcctgggaaagtttgggcagagggccctggatttctacagcattcatgtgaccaaggagtccacccaccccgtgaagcccctggcccagatcgccggaaacagatacgcctccggacctgtgggaaaggccctgagcgacgcatgtatgggcacaatcgcctccttcctgtctaagtaccaggacatcatcatcgaacaccagaaggtggtgaagggcaaccagaagagactggagagcctgcgggagctggccggcaaggaaaacctggaataccctagcgtgaccctgccacctcagcctcacaccaaggagggcgttgatgcctacaacgaagtgatcgcccgggtgcgaatgtgggtgaacctgaacctgtggcagaagctgaagctaagcagagatgatgccaagcctctgctgagactgaagggattcccttcctttcctctggtcgagagacaggccaacgaagtggactggtgggacatggtgtgtaacgtgaagaagctgatcaacgagaaaaaggaggatggcaaggtgttttggcagaatctggctggctacaagagacaggaagccctgagaccatacctgagcagcgaggaagatcggaagaagggaaagaaattcgctcggtaccagctgggcgacctgctgctgcacctggaaaagaagcacggcgaggactggggaaaggtgtacgacgaggcctgggagcggattgacaagaaagtggaaggcctgagcaagcacatcaagctggaagaggaacggagaagcgaggacgcccagagcaaggccgccctgaccgactggctgcgggctaaggccagcttcgtgatcgagggcctgaaggaggccgacaaggacgagttctgcagatgcgagctgaagctgcagaagtggtacggggacctgcggggaaagcccttcgccatcgaagccgagaacagcatcctggacatcagcggcttcagcaagcagtacaactgtgccttcatctggcagaaggacggcgtgaagaagctgaacctgtacctgatcatcaactacttcaagggcggcaagctgcggttcaagaagatcaaacctgaagccttcgaagccaacagattctacaccgtgatcaacaaaaagagcggcgagatcgtgcccatggaggtgaacttcaacttcgacgaccccaacctgatcatcctgcctctggcctttggcaagagacagggcagagaattcatctggaacgacctgctgtccctggaaaccggcagcctgaagctggccaacggaagagtgatcgagaagacactgtacaacagaagaacccggcaggatgagcctgccctgttcgtggccctgaccttcgagcggcgggaggtcctggactcctccaatatcaaaccaatgaacctgatcggcgtggcaagaggcgaaaacatccccgccgtgatcgccctgaccgaccccgagggctgcccactgagccggtttaaggatagcctgggaaacccaacccacatcctgagaatcggcgagagctataaggagaagcagcggaccatccaggccaagaaggaggtggagcagcggagagccggcggctacagccggaagtacgccagcaaagccaagaatctggcagacgatatggtgagaaacaccgctagagatctgctgtactacgccgtgacccaggatgccatgctgatcttcgccaacctgagccggggcttcggccggcagggcaagcggaccttcatggccgagagacagtacacacggatggaggactggctgaccgccaagctggcctacgagggcctgagcaagacctacctgtccaagacactggcccagtacacctccaagacatgcagcaactgtgggtttaccatcaccagcgccgactacgacagggtgctggagaagctgaagaagacagcaacaggctggatgaccacaattaacggcaaggagctgaaggtggagggccagattacctactacaacagatacaagagacagaacgtagtcaaggacctgtccgtcgagctggatagactgagcgaagaatctgtgaacaacgacatctcctcctggacaaagggcagaagcggagaagctctgagcctcctgaagaaaagattctcccatagacccgtgcaggagaagttcgtgtgcctgaactgcggcttcgagacacacgcagccgagcaagccgccctgaacatcgccagatcctggctgttcctgcggagccaggagtacaagaaataccagacaaacaagacaaccggcaacaccgataagagagccttcgtcgagacctggcagtccttttaccggaagaagcttaaggaggtgtggaaacctgccgtgcggtctggcggatctggcggaggctccacaagcatgagccagggcagcgtgaccttcagggacgtggccatcgacttcagccaggaggagtggaagtggctgcagcccgcccagagggacctgtacaggtgcgtgatgctggagaactacggccacctggtgagcctgggcctgagcatcagcaagcccgacgtggtgagcctgctggagcagggcaaggagccctggctgggcaagagagacgtgaagagggacctgttcagcgtgctgaaggagaccagccccaagaaaaagagaaaagtctaagctgccttctgcggggcttgccttctggccatgcccttcttctctcccttgcacctgtacctcttggtctttgaataaagcctgagtaggaaggctagcaaaaaaaaaaaaaaaaaaaaaaaaaaaaaaaaaaaaaaaaaaaaaaaaaaaaaaaaaaaaaaaaaaaaaaaaaaaaaaaa

SEQ ID NO: 6856 - RNA, 5797 nt, synthetic construct
  source 1..5797: mol_type = other RNA
aggaaataagagagaaaagaagagtaagaagaaatataagagccaccatggcccctaagaagaagcgtaaagtgagccggatggaacgcctcgtctacgaggtgcggcagaagtgcagaaacatcgaggacatctgcatctcctgcggatctctgaacgtgaccctggagcacccactgttcatcggcggcatgtgccagaactgtaaaaactgttttctggagtgtgcctatcaatacgacgatgacggctaccagagctactgcaccatctgttgcggcggaagagaggtgctgatgtgtggaaataacaactgctgccggtgcttctgcgtggaatgcgtggacctgctggtgggccccggcgccgcccaggccgctattaaggaagatccttggaactgctacatgtgcggccacaagggcacatacggcctgctgagacggagagaggactggcctagcagactgcagatgttcttcgccaataaccacgaccaggagttcgacccccctaaggtgtaccctcccgtccccgccgagaagagaaagcccatccgggtcctgagcctgttcgatggcatcgccaccggtctgctggtgctgaaggacctgggcatccaggtggataggtacattgcctccgaggtgtgcgaggactccatcaccgtgggaatggtgcgtcatcagggcaagatcatgtacgtgggcgacgtgcggagcgtgacacagaagcatatccaggagtggggccctttcgacctggtgatcggcggcagcccttgcaatgacctgagcatcgtgaacccagcccggaagggcctgtacgagggaaccggcagactgttcttcgagttttacagactgctgcacgacgcccggcctaaggaaggcgacgaccggcccttcttttggctgttcgagaatgtggtggccatgggagtcagcgacaagcgggatattagccggttcctggagagcaaccccgtgatgatcgatgccaaggaagtgagcgccgcccaccgggccagatacttctggggcaatctgcctggcatgaacagacccctggccagcaccgtgaacgacaagctggagctgcaggagtgcctggagcacggccggatcgccaagttcagcaaggtgagaaccatcaccacccgaagcaacagcatcaaacaaggcaaggaccagcactttcctgtgttcatgaacgagaaggaggacatcctgtggtgtaccgagatggagagagtgttcgggttcccagtccactacacagatgtcagcaacatgtctagactggccagacagagactgctgggaagaagctggtccgtccctgtgatcagacacctgttcgcccctctgaaggagtacttcgcctgcgtgagcagcggcaacagcaacgccaacagccggggccccagcttctctagcggcctggtgccactgtccctgagagggagccacatgggccccatggagatctacaaaaccgtgagcgcctggaagcggcagcctgtgcgcgtgctgagcctgtttcggaatatcgataaagtcctgaaaagcctgggattcctggagagcggctctggctccggcggtggcaccctgaagtacgtggaggatgtgacaaacgtggtcagacgggatgtggagaagtggggccccttcgatctggtgtacggcagcacccaacccctgggcagctcttgtgaccggtgccctggctggtacatgtttcagttccaccggatcctgcagtacgccctgccgagacaggagtcccagcggccattcttttggattttcatggacaacttgctgctgaccgaggatgaccaggaaactaccactcggttcctgcagaccgaagccgtgaccctgcaggacgtgagaggccgggactaccagaacgccatgcgggtgtggtccaacatccctggactgaaaagcaagcacgcacctctgacccctaaagaagaggagtacctgcaggcccaggtgcggagcagaagcaagctggacgcccctaaggtggatctgctggtgaagaattgcctcctgcccctgagagagtacttcaagtatttcagccagaatagtctgcccctgggcggcccaagcagcggcgcccctcctcccagcggcggcagcccagccggctccccaacctctaccgaggagggcacctctgagtccgccacccccgagagcggccctggcacctccaccgagcccagcgagggcagcgcacccggcagccctgccggcagccccacctccacagaggagggaaccagcaccgagcccagcgaaggcagcgccccaggcaccagcaccgagcctagtgagggcggctctggcggcggcagcgcccaggagattaaacggatcaacaagatcagaagaagacttgtgaaagacagcaacaccaagaaggccggcaagacaggccccatgaaaaccctgctggttagagtgatgacacccgatctgagagagcggctggaaaacctgagaaagaagcctgaaaatatcccccagcccatcagcaatacatctagagccaacctgaataagctgctgaccgattacaccgaaatgaagaaggcgatcctgcatgtgtactgggaagagttccagaaggaccctgtgggcctgatgagccgggtggcccagcctgccagcaagaagatcgatcagaacaagctgaaacctgagatggacgagaagggcaacctgaccaccgccggctttgcctgctctcagtgtggccagcccctgttcgtgtacaagctggagcaggtgtctgagaagggcaaggcttacaccaactacttcggacggtgcaatgtggccgagcacgaaaagctgatcctgctggcccagctgaagcccgagaaggatagcgacgaagccgtgacatatagcctgggaaagtttgggcagagggccctggatttctacagcattcatgtgaccaaggagtccacccaccccgtgaagcccctggcccagatcgccggaaacagatacgcctccggacctgtgggaaaggccctgagcgacgcatgtatgggcacaatcgcctccttcctgtctaagtaccaggacatcatcatcgaacaccagaaggtggtgaagggcaaccagaagagactggagagcctgcgggagctggccggcaaggaaaacctggaataccctagcgtgaccctgccacctcagcctcacaccaaggagggcgttgatgcctacaacgaagtgatcgcccgggtgcgaatgtgggtgaacctgaacctgtggcagaagctgaagctaagcagagatgatgccaagcctctgctgagactgaagggattcccttcctttcctctggtcgagagacaggccaacgaagtggactggtgggacatggtgtgtaacgtgaagaagctgatcaacgagaaaaaggaggatggcaaggtgttttggcagaatctggctggctacaagagacaggaagccctgagaccatacctgagcagcgaggaagatcggaagaagggaaagaaattcgctcggtaccagctgggcgacctgctgctgcacctggaaaagaagcacggcgaggactggggaaaggtgtacgacgaggcctgggagcggattgacaagaaagtggaaggcctgagcaagcacatcaagctggaagaggaacggagaagcgaggacgcccagagcaaggccgccctgaccgactggctgcgggctaaggccagcttcgtgatcgagggcctgaaggaggccgacaaggacgagttctgcagatgcgagctgaagctgcagaagtggtacggggacctgcggggaaagcccttcgccatcgaagccgagaacagcatcctggacatcagcggcttcagcaagcagtacaactgtgccttcatctggcagaaggacggcgtgaagaagctgaacctgtacctgatcatcaactacttcaagggcggcaagctgcggttcaagaagatcaaacctgaagccttcgaagccaacagattctacaccgtgatcaacaaaaagagcggcgagatcgtgcccatggaggtgaacttcaacttcgacgaccccaacctgatcatcctgcctctggcctttggcaagagacagggcagagaattcatctggaacgacctgctgtccctggaaaccggcagcctgaagctggccaacggaagagtgatcgagaagacactgtacaacagaagaacccggcaggatgagcctgccctgttcgtggccctgaccttcgagcggcgggaggtcctggactcctccaatatcaaaccaatgaacctgatcggcgtggcaagaggcgaaaacatccccgccgtgatcgccctgaccgaccccgagggctgcccactgagccggtttaaggatagcctgggaaacccaacccacatcctgagaatcggcgagagctataaggagaagcagcggaccatccaggccaagaaggaggtggagcagcggagagccggcggctacagccggaagtacgccagcaaagccaagaatctggcagacgatatggtgagaaacaccgctagagatctgctgtactacgccgtgacccaggatgccatgctgatcttcgccaacctgagccggggcttcggccggcagggcaagcggaccttcatggccgagagacagtacacacggatggaggactggctgaccgccaagctggcctacgagggcctgagcaagacctacctgtccaagacactggcccagtacacctccaagacatgcagcaactgtgggtttaccatcaccagcgccgactacgacagggtgctggagaagctgaagaagacagcaacaggctggatgaccacaattaacggcaaggagctgaaggtggagggccagattacctactacaacagatacaagagacagaacgtagtcaaggacctgtccgtcgagctggatagactgagcgaagaatctgtgaacaacgacatctcctcctggacaaagggcagaagcggagaagctctgagcctcctgaagaaaagattctcccatagacccgtgcaggagaagttcgtgtgcctgaactgcggcttcgagacacacgcagccgagcaagccgccctgaacatcgccagatcctggctgttcctgcggagccaggagtacaagaaataccagacaaacaagacaaccggcaacaccgataagagagccttcgtcgagacctggcagtccttttaccggaagaagcttaaggaggtgtggaaacctgccgtgcggtctggcggatctggcggaggctccacaagcatgggcaggctgatgttccaggacgtggccatcgacttcacccaggaggagtgggagtgcctggacctgagccagagggacctgtacagggacgtgatgctggagacctacggcaacctggccagcctgggcctggtggtgagcaagcccgacctggtgaccttcctggagcagatgaagaacccctgggacgtgaggaggaccgacaccaaggccacctaccccgccgtgagcagccacaacaccagccccaagaaaaagagaaaagtctaagctgccttctgcggggcttgccttctggccatgcccttcttctctcccttgcacctgtacctcttggtctttgaataaagcctgagtaggaaggctagcaaaaaaaaaaaaaaaaaaaaaaaaaaaaaaaaaaaaaaaaaaaaaaaaaaaaaaaaaaaaaaaaaaaaaaaaaaaaaaaa

SEQ ID NO: 6857 - RNA, 5797 nt, synthetic construct
  source 1..5797: mol_type = other RNA
aggaaataagagagaaaagaagagtaagaagaaatataagagccaccatggcccctaagaagaagcgtaaagtgagccggatggaacgcctcgtctacgaggtgcggcagaagtgcagaaacatcgaggacatctgcatctcctgcggatctctgaacgtgaccctggagcacccactgttcatcggcggcatgtgccagaactgtaaaaactgttttctggagtgtgcctatcaatacgacgatgacggctaccagagctactgcaccatctgttgcggcggaagagaggtgctgatgtgtggaaataacaactgctgccggtgcttctgcgtggaatgcgtggacctgctggtgggccccggcgccgcccaggccgctattaaggaagatccttggaactgctacatgtgcggccacaagggcacatacggcctgctgagacggagagaggactggcctagcagactgcagatgttcttcgccaataaccacgaccaggagttcgacccccctaaggtgtaccctcccgtccccgccgagaagagaaagcccatccgggtcctgagcctgttcgatggcatcgccaccggtctgctggtgctgaaggacctgggcatccaggtggataggtacattgcctccgaggtgtgcgaggactccatcaccgtgggaatggtgcgtcatcagggcaagatcatgtacgtgggcgacgtgcggagcgtgacacagaagcatatccaggagtggggccctttcgacctggtgatcggcggcagcccttgcaatgacctgagcatcgtgaacccagcccggaagggcctgtacgagggaaccggcagactgttcttcgagttttacagactgctgcacgacgcccggcctaaggaaggcgacgaccggcccttcttttggctgttcgagaatgtggtggccatgggagtcagcgacaagcgggatattagccggttcctggagagcaaccccgtgatgatcgatgccaaggaagtgagcgccgcccaccgggccagatacttctggggcaatctgcctggcatgaacagacccctggccagcaccgtgaacgacaagctggagctgcaggagtgcctggagcacggccggatcgccaagttcagcaaggtgagaaccatcaccacccgaagcaacagcatcaaacaaggcaaggaccagcactttcctgtgttcatgaacgagaaggaggacatcctgtggtgtaccgagatggagagagtgttcgggttcccagtccactacacagatgtcagcaacatgtctagactggccagacagagactgctgggaagaagctggtccgtccctgtgatcagacacctgttcgcccctctgaaggagtacttcgcctgcgtgagcagcggcaacagcaacgccaacagccggggccccagcttctctagcggcctggtgccactgtccctgagagggagccacatgggccccatggagatctacaaaaccgtgagcgcctggaagcggcagcctgtgcgcgtgctgagcctgtttcggaatatcgataaagtcctgaaaagcctgggattcctggagagcggctctggctccggcggtggcaccctgaagtacgtggaggatgtgacaaacgtggtcagacgggatgtggagaagtggggccccttcgatctggtgtacggcagcacccaacccctgggcagctcttgtgaccggtgccctggctggtacatgtttcagttccaccggatcctgcagtacgccctgccgagacaggagtcccagcggccattcttttggattttcatggacaacttgctgctgaccgaggatgaccaggaaactaccactcggttcctgcagaccgaagccgtgaccctgcaggacgtgagaggccgggactaccagaacgccatgcgggtgtggtccaacatccctggactgaaaagcaagcacgcacctctgacccctaaagaagaggagtacctgcaggcccaggtgcggagcagaagcaagctggacgcccctaaggtggatctgctggtgaagaattgcctcctgcccctgagagagtacttcaagtatttcagccagaatagtctgcccctgggcggcccaagcagcggcgcccctcctcccagcggcggcagcccagccggctccccaacctctaccgaggagggcacctctgagtccgccacccccgagagcggccctggcacctccaccgagcccagcgagggcagcgcacccggcagccctgccggcagccccacctccacagaggagggaaccagcaccgagcccagcgaaggcagcgccccaggcaccagcaccgagcctagtgagggcggctctggcggcggcagcgcccaggagattaaacggatcaacaagatcagaagaagacttgtgaaagacagcaacaccaagaaggccggcaagacaggccccatgaaaaccctgctggttagagtgatgacacccgatctgagagagcggctggaaaacctgagaaagaagcctgaaaatatcccccagcccatcagcaatacatctagagccaacctgaataagctgctgaccgattacaccgaaatgaagaaggcgatcctgcatgtgtactgggaagagttccagaaggaccctgtgggcctgatgagccgggtggcccagcctgccagcaagaagatcgatcagaacaagctgaaacctgagatggacgagaagggcaacctgaccaccgccggctttgcctgctctcagtgtggccagcccctgttcgtgtacaagctggagcaggtgtctgagaagggcaaggcttacaccaactacttcggacggtgcaatgtggccgagcacgaaaagctgatcctgctggcccagctgaagcccgagaaggatagcgacgaagccgtgacatatagcctgggaaagtttgggcagagggccctggatttctacagcattcatgtgaccaaggagtccacccaccccgtgaagcccctggcccagatcgccggaaacagatacgcctccggacctgtgggaaaggccctgagcgacgcatgtatgggcacaatcgcctccttcctgtctaagtaccaggacatcatcatcgaacaccagaaggtggtgaagggcaaccagaagagactggagagcctgcgggagctggccggcaaggaaaacctggaataccctagcgtgaccctgccacctcagcctcacaccaaggagggcgttgatgcctacaacgaagtgatcgcccgggtgcgaatgtgggtgaacctgaacctgtggcagaagctgaagctaagcagagatgatgccaagcctctgctgagactgaagggattcccttcctttcctctggtcgagagacaggccaacgaagtggactggtgggacatggtgtgtaacgtgaagaagctgatcaacgagaaaaaggaggatggcaaggtgttttggcagaatctggctggctacaagagacaggaagccctgagaccatacctgagcagcgaggaagatcggaagaagggaaagaaattcgctcggtaccagctgggcgacctgctgctgcacctggaaaagaagcacggcgaggactggggaaaggtgtacgacgaggcctgggagcggattgacaagaaagtggaaggcctgagcaagcacatcaagctggaagaggaacggagaagcgaggacgcccagagcaaggccgccctgaccgactggctgcgggctaaggccagcttcgtgatcgagggcctgaaggaggccgacaaggacgagttctgcagatgcgagctgaagctgcagaagtggtacggggacctgcggggaaagcccttcgccatcgaagccgagaacagcatcctggacatcagcggcttcagcaagcagtacaactgtgccttcatctggcagaaggacggcgtgaagaagctgaacctgtacctgatcatcaactacttcaagggcggcaagctgcggttcaagaagatcaaacctgaagccttcgaagccaacagattctacaccgtgatcaacaaaaagagcggcgagatcgtgcccatggaggtgaacttcaacttcgacgaccccaacctgatcatcctgcctctggcctttggcaagagacagggcagagaattcatctggaacgacctgctgtccctggaaaccggcagcctgaagctggccaacggaagagtgatcgagaagacactgtacaacagaagaacccggcaggatgagcctgccctgttcgtggccctgaccttcgagcggcgggaggtcctggactcctccaatatcaaaccaatgaacctgatcggcgtggcaagaggcgaaaacatccccgccgtgatcgccctgaccgaccccgagggctgcccactgagccggtttaaggatagcctgggaaacccaacccacatcctgagaatcggcgagagctataaggagaagcagcggaccatccaggccaagaaggaggtggagcagcggagagccggcggctacagccggaagtacgccagcaaagccaagaatctggcagacgatatggtgagaaacaccgctagagatctgctgtactacgccgtgacccaggatgccatgctgatcttcgccaacctgagccggggcttcggccggcagggcaagcggaccttcatggccgagagacagtacacacggatggaggactggctgaccgccaagctggcctacgagggcctgagcaagacctacctgtccaagacactggcccagtacacctccaagacatgcagcaactgtgggtttaccatcaccagcgccgactacgacagggtgctggagaagctgaagaagacagcaacaggctggatgaccacaattaacggcaaggagctgaaggtggagggccagattacctactacaacagatacaagagacagaacgtagtcaaggacctgtccgtcgagctggatagactgagcgaagaatctgtgaacaacgacatctcctcctggacaaagggcagaagcggagaagctctgagcctcctgaagaaaagattctcccatagacccgtgcaggagaagttcgtgtgcctgaactgcggcttcgagacacacgcagccgagcaagccgccctgaacatcgccagatcctggctgttcctgcggagccaggagtacaagaaataccagacaaacaagacaaccggcaacaccgataagagagccttcgtcgagacctggcagtccttttaccggaagaagcttaaggaggtgtggaaacctgccgtgcggtctggcggatctggcggaggctccacaagcttcctgatgcccgtgaccttcgaggaggtggccgtgtacttcacccccggccagggcgccctgctggaccccgcccagagggccctgtacagggacgtgatgcaggagaactacgagaccgtggccagcctgggcttcagcatccccaagcccgacctgatcgcccagctggagcagggcgaggagccctgggtgcccgacctgcagcccagcaaggagatggtgatcctgaggggcatctgcaccagccccaagaaaaagagaaaagtctaagctgccttctgcggggcttgccttctggccatgcccttcttctctcccttgcacctgtacctcttggtctttgaataaagcctgagtaggaaggctagcaaaaaaaaaaaaaaaaaaaaaaaaaaaaaaaaaaaaaaaaaaaaaaaaaaaaaaaaaaaaaaaaaaaaaaaaaaaaaaaa

SEQ ID NO: 6858 - RNA, 5797 nt, synthetic construct
  source 1..5797: mol_type = other RNA
aggaaataagagagaaaagaagagtaagaagaaatataagagccaccatggcccctaagaagaagcgtaaagtgagccggatggaacgcctcgtctacgaggtgcggcagaagtgcagaaacatcgaggacatctgcatctcctgcggatctctgaacgtgaccctggagcacccactgttcatcggcggcatgtgccagaactgtaaaaactgttttctggagtgtgcctatcaatacgacgatgacggctaccagagctactgcaccatctgttgcggcggaagagaggtgctgatgtgtggaaataacaactgctgccggtgcttctgcgtggaatgcgtggacctgctggtgggccccggcgccgcccaggccgctattaaggaagatccttggaactgctacatgtgcggccacaagggcacatacggcctgctgagacggagagaggactggcctagcagactgcagatgttcttcgccaataaccacgaccaggagttcgacccccctaaggtgtaccctcccgtccccgccgagaagagaaagcccatccgggtcctgagcctgttcgatggcatcgccaccggtctgctggtgctgaaggacctgggcatccaggtggataggtacattgcctccgaggtgtgcgaggactccatcaccgtgggaatggtgcgtcatcagggcaagatcatgtacgtgggcgacgtgcggagcgtgacacagaagcatatccaggagtggggccctttcgacctggtgatcggcggcagcccttgcaatgacctgagcatcgtgaacccagcccggaagggcctgtacgagggaaccggcagactgttcttcgagttttacagactgctgcacgacgcccggcctaaggaaggcgacgaccggcccttcttttggctgttcgagaatgtggtggccatgggagtcagcgacaagcgggatattagccggttcctggagagcaaccccgtgatgatcgatgccaaggaagtgagcgccgcccaccgggccagatacttctggggcaatctgcctggcatgaacagacccctggccagcaccgtgaacgacaagctggagctgcaggagtgcctggagcacggccggatcgccaagttcagcaaggtgagaaccatcaccacccgaagcaacagcatcaaacaaggcaaggaccagcactttcctgtgttcatgaacgagaaggaggacatcctgtggtgtaccgagatggagagagtgttcgggttcccagtccactacacagatgtcagcaacatgtctagactggccagacagagactgctgggaagaagctggtccgtccctgtgatcagacacctgttcgcccctctgaaggagtacttcgcctgcgtgagcagcggcaacagcaacgccaacagccggggccccagcttctctagcggcctggtgccactgtccctgagagggagccacatgggccccatggagatctacaaaaccgtgagcgcctggaagcggcagcctgtgcgcgtgctgagcctgtttcggaatatcgataaagtcctgaaaagcctgggattcctggagagcggctctggctccggcggtggcaccctgaagtacgtggaggatgtgacaaacgtggtcagacgggatgtggagaagtggggccccttcgatctggtgtacggcagcacccaacccctgggcagctcttgtgaccggtgccctggctggtacatgtttcagttccaccggatcctgcagtacgccctgccgagacaggagtcccagcggccattcttttggattttcatggacaacttgctgctgaccgaggatgaccaggaaactaccactcggttcctgcagaccgaagccgtgaccctgcaggacgtgagaggccgggactaccagaacgccatgcgggtgtggtccaacatccctggactgaaaagcaagcacgcacctctgacccctaaagaagaggagtacctgcaggcccaggtgcggagcagaagcaagctggacgcccctaaggtggatctgctggtgaagaattgcctcctgcccctgagagagtacttcaagtatttcagccagaatagtctgcccctgggcggcccaagcagcggcgcccctcctcccagcggcggcagcccagccggctccccaacctctaccgaggagggcacctctgagtccgccacccccgagagcggccctggcacctccaccgagcccagcgagggcagcgcacccggcagccctgccggcagccccacctccacagaggagggaaccagcaccgagcccagcgaaggcagcgccccaggcaccagcaccgagcctagtgagggcggctctggcggcggcagcgcccaggagattaaacggatcaacaagatcagaagaagacttgtgaaagacagcaacaccaagaaggccggcaagacaggccccatgaaaaccctgctggttagagtgatgacacccgatctgagagagcggctggaaaacctgagaaagaagcctgaaaatatcccccagcccatcagcaatacatctagagccaacctgaataagctgctgaccgattacaccgaaatgaagaaggcgatcctgcatgtgtactgggaagagttccagaaggaccctgtgggcctgatgagccgggtggcccagcctgccagcaagaagatcgatcagaacaagctgaaacctgagatggacgagaagggcaacctgaccaccgccggctttgcctgctctcagtgtggccagcccctgttcgtgtacaagctggagcaggtgtctgagaagggcaaggcttacaccaactacttcggacggtgcaatgtggccgagcacgaaaagctgatcctgctggcccagctgaagcccgagaaggatagcgacgaagccgtgacatatagcctgggaaagtttgggcagagggccctggatttctacagcattcatgtgaccaaggagtccacccaccccgtgaagcccctggcccagatcgccggaaacagatacgcctccggacctgtgggaaaggccctgagcgacgcatgtatgggcacaatcgcctccttcctgtctaagtaccaggacatcatcatcgaacaccagaaggtggtgaagggcaaccagaagagactggagagcctgcgggagctggccggcaaggaaaacctggaataccctagcgtgaccctgccacctcagcctcacaccaaggagggcgttgatgcctacaacgaagtgatcgcccgggtgcgaatgtgggtgaacctgaacctgtggcagaagctgaagctaagcagagatgatgccaagcctctgctgagactgaagggattcccttcctttcctctggtcgagagacaggccaacgaagtggactggtgggacatggtgtgtaacgtgaagaagctgatcaacgagaaaaaggaggatggcaaggtgttttggcagaatctggctggctacaagagacaggaagccctgagaccatacctgagcagcgaggaagatcggaagaagggaaagaaattcgctcggtaccagctgggcgacctgctgctgcacctggaaaagaagcacggcgaggactggggaaaggtgtacgacgaggcctgggagcggattgacaagaaagtggaaggcctgagcaagcacatcaagctggaagaggaacggagaagcgaggacgcccagagcaaggccgccctgaccgactggctgcgggctaaggccagcttcgtgatcgagggcctgaaggaggccgacaaggacgagttctgcagatgcgagctgaagctgcagaagtggtacggggacctgcggggaaagcccttcgccatcgaagccgagaacagcatcctggacatcagcggcttcagcaagcagtacaactgtgccttcatctggcagaaggacggcgtgaagaagctgaacctgtacctgatcatcaactacttcaagggcggcaagctgcggttcaagaagatcaaacctgaagccttcgaagccaacagattctacaccgtgatcaacaaaaagagcggcgagatcgtgcccatggaggtgaacttcaacttcgacgaccccaacctgatcatcctgcctctggcctttggcaagagacagggcagagaattcatctggaacgacctgctgtccctggaaaccggcagcctgaagctggccaacggaagagtgatcgagaagacactgtacaacagaagaacccggcaggatgagcctgccctgttcgtggccctgaccttcgagcggcgggaggtcctggactcctccaatatcaaaccaatgaacctgatcggcgtggcaagaggcgaaaacatccccgccgtgatcgccctgaccgaccccgagggctgcccactgagccggtttaaggatagcctgggaaacccaacccacatcctgagaatcggcgagagctataaggagaagcagcggaccatccaggccaagaaggaggtggagcagcggagagccggcggctacagccggaagtacgccagcaaagccaagaatctggcagacgatatggtgagaaacaccgctagagatctgctgtactacgccgtgacccaggatgccatgctgatcttcgccaacctgagccggggcttcggccggcagggcaagcggaccttcatggccgagagacagtacacacggatggaggactggctgaccgccaagctggcctacgagggcctgagcaagacctacctgtccaagacactggcccagtacacctccaagacatgcagcaactgtgggtttaccatcaccagcgccgactacgacagggtgctggagaagctgaagaagacagcaacaggctggatgaccacaattaacggcaaggagctgaaggtggagggccagattacctactacaacagatacaagagacagaacgtagtcaaggacctgtccgtcgagctggatagactgagcgaagaatctgtgaacaacgacatctcctcctggacaaagggcagaagcggagaagctctgagcctcctgaagaaaagattctcccatagacccgtgcaggagaagttcgtgtgcctgaactgcggcttcgagacacacgcagccgagcaagccgccctgaacatcgccagatcctggctgttcctgcggagccaggagtacaagaaataccagacaaacaagacaaccggcaacaccgataagagagccttcgtcgagacctggcagtccttttaccggaagaagcttaaggaggtgtggaaacctgccgtgcggtctggcggatctggcggaggctccacaagctgcgagggcagcgtgagcttcgaggacgtgaccatggacttcagcagggaggagtggcagcagctggaccccgcccagaggtgcctgtaccaggacgtgatgctggagatctacagccacctgctgttcgtgggctacaacatccccaaccccgagatcatcagcaggatggagaagggcgaggagccctggatgagggagatccagctgccccaccagaggcacagggagagggccttcggcaccagccccaagaaaaagagaaaagtctaagctgccttctgcggggcttgccttctggccatgcccttcttctctcccttgcacctgtacctcttggtctttgaataaagcctgagtaggaaggctagcaaaaaaaaaaaaaaaaaaaaaaaaaaaaaaaaaaaaaaaaaaaaaaaaaaaaaaaaaaaaaaaaaaaaaaaaaaaaaaaa

SEQ ID NO: 6859 - RNA, 5797 nt, synthetic construct
  source 1..5797: mol_type = other RNA
aggaaataagagagaaaagaagagtaagaagaaatataagagccaccatggcccctaagaagaagcgtaaagtgagccggatggaacgcctcgtctacgaggtgcggcagaagtgcagaaacatcgaggacatctgcatctcctgcggatctctgaacgtgaccctggagcacccactgttcatcggcggcatgtgccagaactgtaaaaactgttttctggagtgtgcctatcaatacgacgatgacggctaccagagctactgcaccatctgttgcggcggaagagaggtgctgatgtgtggaaataacaactgctgccggtgcttctgcgtggaatgcgtggacctgctggtgggccccggcgccgcccaggccgctattaaggaagatccttggaactgctacatgtgcggccacaagggcacatacggcctgctgagacggagagaggactggcctagcagactgcagatgttcttcgccaataaccacgaccaggagttcgacccccctaaggtgtaccctcccgtccccgccgagaagagaaagcccatccgggtcctgagcctgttcgatggcatcgccaccggtctgctggtgctgaaggacctgggcatccaggtggataggtacattgcctccgaggtgtgcgaggactccatcaccgtgggaatggtgcgtcatcagggcaagatcatgtacgtgggcgacgtgcggagcgtgacacagaagcatatccaggagtggggccctttcgacctggtgatcggcggcagcccttgcaatgacctgagcatcgtgaacccagcccggaagggcctgtacgagggaaccggcagactgttcttcgagttttacagactgctgcacgacgcccggcctaaggaaggcgacgaccggcccttcttttggctgttcgagaatgtggtggccatgggagtcagcgacaagcgggatattagccggttcctggagagcaaccccgtgatgatcgatgccaaggaagtgagcgccgcccaccgggccagatacttctggggcaatctgcctggcatgaacagacccctggccagcaccgtgaacgacaagctggagctgcaggagtgcctggagcacggccggatcgccaagttcagcaaggtgagaaccatcaccacccgaagcaacagcatcaaacaaggcaaggaccagcactttcctgtgttcatgaacgagaaggaggacatcctgtggtgtaccgagatggagagagtgttcgggttcccagtccactacacagatgtcagcaacatgtctagactggccagacagagactgctgggaagaagctggtccgtccctgtgatcagacacctgttcgcccctctgaaggagtacttcgcctgcgtgagcagcggcaacagcaacgccaacagccggggccccagcttctctagcggcctggtgccactgtccctgagagggagccacatgggccccatggagatctacaaaaccgtgagcgcctggaagcggcagcctgtgcgcgtgctgagcctgtttcggaatatcgataaagtcctgaaaagcctgggattcctggagagcggctctggctccggcggtggcaccctgaagtacgtggaggatgtgacaaacgtggtcagacgggatgtggagaagtggggccccttcgatctggtgtacggcagcacccaacccctgggcagctcttgtgaccggtgccctggctggtacatgtttcagttccaccggatcctgcagtacgccctgccgagacaggagtcccagcggccattcttttggattttcatggacaacttgctgctgaccgaggatgaccaggaaactaccactcggttcctgcagaccgaagccgtgaccctgcaggacgtgagaggccgggactaccagaacgccatgcgggtgtggtccaacatccctggactgaaaagcaagcacgcacctctgacccctaaagaagaggagtacctgcaggcccaggtgcggagcagaagcaagctggacgcccctaaggtggatctgctggtgaagaattgcctcctgcccctgagagagtacttcaagtatttcagccagaatagtctgcccctgggcggcccaagcagcggcgcccctcctcccagcggcggcagcccagccggctccccaacctctaccgaggagggcacctctgagtccgccacccccgagagcggccctggcacctccaccgagcccagcgagggcagcgcacccggcagccctgccggcagccccacctccacagaggagggaaccagcaccgagcccagcgaaggcagcgccccaggcaccagcaccgagcctagtgagggcggctctggcggcggcagcgcccaggagattaaacggatcaacaagatcagaagaagacttgtgaaagacagcaacaccaagaaggccggcaagacaggccccatgaaaaccctgctggttagagtgatgacacccgatctgagagagcggctggaaaacctgagaaagaagcctgaaaatatcccccagcccatcagcaatacatctagagccaacctgaataagctgctgaccgattacaccgaaatgaagaaggcgatcctgcatgtgtactgggaagagttccagaaggaccctgtgggcctgatgagccgggtggcccagcctgccagcaagaagatcgatcagaacaagctgaaacctgagatggacgagaagggcaacctgaccaccgccggctttgcctgctctcagtgtggccagcccctgttcgtgtacaagctggagcaggtgtctgagaagggcaaggcttacaccaactacttcggacggtgcaatgtggccgagcacgaaaagctgatcctgctggcccagctgaagcccgagaaggatagcgacgaagccgtgacatatagcctgggaaagtttgggcagagggccctggatttctacagcattcatgtgaccaaggagtccacccaccccgtgaagcccctggcccagatcgccggaaacagatacgcctccggacctgtgggaaaggccctgagcgacgcatgtatgggcacaatcgcctccttcctgtctaagtaccaggacatcatcatcgaacaccagaaggtggtgaagggcaaccagaagagactggagagcctgcgggagctggccggcaaggaaaacctggaataccctagcgtgaccctgccacctcagcctcacaccaaggagggcgttgatgcctacaacgaagtgatcgcccgggtgcgaatgtgggtgaacctgaacctgtggcagaagctgaagctaagcagagatgatgccaagcctctgctgagactgaagggattcccttcctttcctctggtcgagagacaggccaacgaagtggactggtgggacatggtgtgtaacgtgaagaagctgatcaacgagaaaaaggaggatggcaaggtgttttggcagaatctggctggctacaagagacaggaagccctgagaccatacctgagcagcgaggaagatcggaagaagggaaagaaattcgctcggtaccagctgggcgacctgctgctgcacctggaaaagaagcacggcgaggactggggaaaggtgtacgacgaggcctgggagcggattgacaagaaagtggaaggcctgagcaagcacatcaagctggaagaggaacggagaagcgaggacgcccagagcaaggccgccctgaccgactggctgcgggctaaggccagcttcgtgatcgagggcctgaaggaggccgacaaggacgagttctgcagatgcgagctgaagctgcagaagtggtacggggacctgcggggaaagcccttcgccatcgaagccgagaacagcatcctggacatcagcggcttcagcaagcagtacaactgtgccttcatctggcagaaggacggcgtgaagaagctgaacctgtacctgatcatcaactacttcaagggcggcaagctgcggttcaagaagatcaaacctgaagccttcgaagccaacagattctacaccgtgatcaacaaaaagagcggcgagatcgtgcccatggaggtgaacttcaacttcgacgaccccaacctgatcatcctgcctctggcctttggcaagagacagggcagagaattcatctggaacgacctgctgtccctggaaaccggcagcctgaagctggccaacggaagagtgatcgagaagacactgtacaacagaagaacccggcaggatgagcctgccctgttcgtggccctgaccttcgagcggcgggaggtcctggactcctccaatatcaaaccaatgaacctgatcggcgtggcaagaggcgaaaacatccccgccgtgatcgccctgaccgaccccgagggctgcccactgagccggtttaaggatagcctgggaaacccaacccacatcctgagaatcggcgagagctataaggagaagcagcggaccatccaggccaagaaggaggtggagcagcggagagccggcggctacagccggaagtacgccagcaaagccaagaatctggcagacgatatggtgagaaacaccgctagagatctgctgtactacgccgtgacccaggatgccatgctgatcttcgccaacctgagccggggcttcggccggcagggcaagcggaccttcatggccgagagacagtacacacggatggaggactggctgaccgccaagctggcctacgagggcctgagcaagacctacctgtccaagacactggcccagtacacctccaagacatgcagcaactgtgggtttaccatcaccagcgccgactacgacagggtgctggagaagctgaagaagacagcaacaggctggatgaccacaattaacggcaaggagctgaaggtggagggccagattacctactacaacagatacaagagacagaacgtagtcaaggacctgtccgtcgagctggatagactgagcgaagaatctgtgaacaacgacatctcctcctggacaaagggcagaagcggagaagctctgagcctcctgaagaaaagattctcccatagacccgtgcaggagaagttcgtgtgcctgaactgcggcttcgagacacacgcagccgagcaagccgccctgaacatcgccagatcctggctgttcctgcggagccaggagtacaagaaataccagacaaacaagacaaccggcaacaccgataagagagccttcgtcgagacctggcagtccttttaccggaagaagcttaaggaggtgtggaaacctgccgtgcggtctggcggatctggcggaggctccacaagccagggcctggtgagcttcaaggacgtggccgtggacttcacccaggaggagtggcagcagctggaccccgcccagaggaccctgtacagggacgtgatgctggagaacttcagccacctggtgagcatcggctacgccgtgagcaagcccgacgtgatcagcaagctggagcagggcgaggacccctggatcatcaagagggacatccccaactggatctaccccgacgagaaccaggccgacaccagccccaagaaaaagagaaaagtctaagctgccttctgcggggcttgccttctggccatgcccttcttctctcccttgcacctgtacctcttggtctttgaataaagcctgagtaggaaggctagcaaaaaaaaaaaaaaaaaaaaaaaaaaaaaaaaaaaaaaaaaaaaaaaaaaaaaaaaaaaaaaaaaaaaaaaaaaaaaaaa

SEQ ID NO: 6860 - RNA, 5797 nt, synthetic construct
  source 1..5797: mol_type = other RNA
aggaaataagagagaaaagaagagtaagaagaaatataagagccaccatggcccctaagaagaagcgtaaagtgagccggatggaacgcctcgtctacgaggtgcggcagaagtgcagaaacatcgaggacatctgcatctcctgcggatctctgaacgtgaccctggagcacccactgttcatcggcggcatgtgccagaactgtaaaaactgttttctggagtgtgcctatcaatacgacgatgacggctaccagagctactgcaccatctgttgcggcggaagagaggtgctgatgtgtggaaataacaactgctgccggtgcttctgcgtggaatgcgtggacctgctggtgggccccggcgccgcccaggccgctattaaggaagatccttggaactgctacatgtgcggccacaagggcacatacggcctgctgagacggagagaggactggcctagcagactgcagatgttcttcgccaataaccacgaccaggagttcgacccccctaaggtgtaccctcccgtccccgccgagaagagaaagcccatccgggtcctgagcctgttcgatggcatcgccaccggtctgctggtgctgaaggacctgggcatccaggtggataggtacattgcctccgaggtgtgcgaggactccatcaccgtgggaatggtgcgtcatcagggcaagatcatgtacgtgggcgacgtgcggagcgtgacacagaagcatatccaggagtggggccctttcgacctggtgatcggcggcagcccttgcaatgacctgagcatcgtgaacccagcccggaagggcctgtacgagggaaccggcagactgttcttcgagttttacagactgctgcacgacgcccggcctaaggaaggcgacgaccggcccttcttttggctgttcgagaatgtggtggccatgggagtcagcgacaagcgggatattagccggttcctggagagcaaccccgtgatgatcgatgccaaggaagtgagcgccgcccaccgggccagatacttctggggcaatctgcctggcatgaacagacccctggccagcaccgtgaacgacaagctggagctgcaggagtgcctggagcacggccggatcgccaagttcagcaaggtgagaaccatcaccacccgaagcaacagcatcaaacaaggcaaggaccagcactttcctgtgttcatgaacgagaaggaggacatcctgtggtgtaccgagatggagagagtgttcgggttcccagtccactacacagatgtcagcaacatgtctagactggccagacagagactgctgggaagaagctggtccgtccctgtgatcagacacctgttcgcccctctgaaggagtacttcgcctgcgtgagcagcggcaacagcaacgccaacagccggggccccagcttctctagcggcctggtgccactgtccctgagagggagccacatgggccccatggagatctacaaaaccgtgagcgcctggaagcggcagcctgtgcgcgtgctgagcctgtttcggaatatcgataaagtcctgaaaagcctgggattcctggagagcggctctggctccggcggtggcaccctgaagtacgtggaggatgtgacaaacgtggtcagacgggatgtggagaagtggggccccttcgatctggtgtacggcagcacccaacccctgggcagctcttgtgaccggtgccctggctggtacatgtttcagttccaccggatcctgcagtacgccctgccgagacaggagtcccagcggccattcttttggattttcatggacaacttgctgctgaccgaggatgaccaggaaactaccactcggttcctgcagaccgaagccgtgaccctgcaggacgtgagaggccgggactaccagaacgccatgcgggtgtggtccaacatccctggactgaaaagcaagcacgcacctctgacccctaaagaagaggagtacctgcaggcccaggtgcggagcagaagcaagctggacgcccctaaggtggatctgctggtgaagaattgcctcctgcccctgagagagtacttcaagtatttcagccagaatagtctgcccctgggcggcccaagcagcggcgcccctcctcccagcggcggcagcccagccggctccccaacctctaccgaggagggcacctctgagtccgccacccccgagagcggccctggcacctccaccgagcccagcgagggcagcgcacccggcagccctgccggcagccccacctccacagaggagggaaccagcaccgagcccagcgaaggcagcgccccaggcaccagcaccgagcctagtgagggcggctctggcggcggcagcgcccaggagattaaacggatcaacaagatcagaagaagacttgtgaaagacagcaacaccaagaaggccggcaagacaggccccatgaaaaccctgctggttagagtgatgacacccgatctgagagagcggctggaaaacctgagaaagaagcctgaaaatatcccccagcccatcagcaatacatctagagccaacctgaataagctgctgaccgattacaccgaaatgaagaaggcgatcctgcatgtgtactgggaagagttccagaaggaccctgtgggcctgatgagccgggtggcccagcctgccagcaagaagatcgatcagaacaagctgaaacctgagatggacgagaagggcaacctgaccaccgccggctttgcctgctctcagtgtggccagcccctgttcgtgtacaagctggagcaggtgtctgagaagggcaaggcttacaccaactacttcggacggtgcaatgtggccgagcacgaaaagctgatcctgctggcccagctgaagcccgagaaggatagcgacgaagccgtgacatatagcctgggaaagtttgggcagagggccctggatttctacagcattcatgtgaccaaggagtccacccaccccgtgaagcccctggcccagatcgccggaaacagatacgcctccggacctgtgggaaaggccctgagcgacgcatgtatgggcacaatcgcctccttcctgtctaagtaccaggacatcatcatcgaacaccagaaggtggtgaagggcaaccagaagagactggagagcctgcgggagctggccggcaaggaaaacctggaataccctagcgtgaccctgccacctcagcctcacaccaaggagggcgttgatgcctacaacgaagtgatcgcccgggtgcgaatgtgggtgaacctgaacctgtggcagaagctgaagctaagcagagatgatgccaagcctctgctgagactgaagggattcccttcctttcctctggtcgagagacaggccaacgaagtggactggtgggacatggtgtgtaacgtgaagaagctgatcaacgagaaaaaggaggatggcaaggtgttttggcagaatctggctggctacaagagacaggaagccctgagaccatacctgagcagcgaggaagatcggaagaagggaaagaaattcgctcggtaccagctgggcgacctgctgctgcacctggaaaagaagcacggcgaggactggggaaaggtgtacgacgaggcctgggagcggattgacaagaaagtggaaggcctgagcaagcacatcaagctggaagaggaacggagaagcgaggacgcccagagcaaggccgccctgaccgactggctgcgggctaaggccagcttcgtgatcgagggcctgaaggaggccgacaaggacgagttctgcagatgcgagctgaagctgcagaagtggtacggggacctgcggggaaagcccttcgccatcgaagccgagaacagcatcctggacatcagcggcttcagcaagcagtacaactgtgccttcatctggcagaaggacggcgtgaagaagctgaacctgtacctgatcatcaactacttcaagggcggcaagctgcggttcaagaagatcaaacctgaagccttcgaagccaacagattctacaccgtgatcaacaaaaagagcggcgagatcgtgcccatggaggtgaacttcaacttcgacgaccccaacctgatcatcctgcctctggcctttggcaagagacagggcagagaattcatctggaacgacctgctgtccctggaaaccggcagcctgaagctggccaacggaagagtgatcgagaagacactgtacaacagaagaacccggcaggatgagcctgccctgttcgtggccctgaccttcgagcggcgggaggtcctggactcctccaatatcaaaccaatgaacctgatcggcgtggcaagaggcgaaaacatccccgccgtgatcgccctgaccgaccccgagggctgcccactgagccggtttaaggatagcctgggaaacccaacccacatcctgagaatcggcgagagctataaggagaagcagcggaccatccaggccaagaaggaggtggagcagcggagagccggcggctacagccggaagtacgccagcaaagccaagaatctggcagacgatatggtgagaaacaccgctagagatctgctgtactacgccgtgacccaggatgccatgctgatcttcgccaacctgagccggggcttcggccggcagggcaagcggaccttcatggccgagagacagtacacacggatggaggactggctgaccgccaagctggcctacgagggcctgagcaagacctacctgtccaagacactggcccagtacacctccaagacatgcagcaactgtgggtttaccatcaccagcgccgactacgacagggtgctggagaagctgaagaagacagcaacaggctggatgaccacaattaacggcaaggagctgaaggtggagggccagattacctactacaacagatacaagagacagaacgtagtcaaggacctgtccgtcgagctggatagactgagcgaagaatctgtgaacaacgacatctcctcctggacaaagggcagaagcggagaagctctgagcctcctgaagaaaagattctcccatagacccgtgcaggagaagttcgtgtgcctgaactgcggcttcgagacacacgcagccgagcaagccgccctgaacatcgccagatcctggctgttcctgcggagccaggagtacaagaaataccagacaaacaagacaaccggcaacaccgataagagagccttcgtcgagacctggcagtccttttaccggaagaagcttaaggaggtgtggaaacctgccgtgcggtctggcggatctggcggaggctccacaagcagcctgggcatggtgagcttcgacgacgtgatggtgaccttcagcctggaggagtggcagctgctgagcaccagccagaggaccctgtacaggaccgtgatgctggacacctacagcagcctggccgccctgggccactgcgccgtgaagcccggcgtgatcatcaagctggagcagggcgccgagccctggatgggcgcccaggccccccccaggagcctgagcgacccctgcggccccagcaccagccccaagaaaaagagaaaagtctaagctgccttctgcggggcttgccttctggccatgcccttcttctctcccttgcacctgtacctcttggtctttgaataaagcctgagtaggaaggctagcaaaaaaaaaaaaaaaaaaaaaaaaaaaaaaaaaaaaaaaaaaaaaaaaaaaaaaaaaaaaaaaaaaaaaaaaaaaaaaaa

SEQ ID NO: 6861 - RNA, 5797 nt, synthetic construct
  source 1..5797: mol_type = other RNA
aggaaataagagagaaaagaagagtaagaagaaatataagagccaccatggcccctaagaagaagcgtaaagtgagccggatggaacgcctcgtctacgaggtgcggcagaagtgcagaaacatcgaggacatctgcatctcctgcggatctctgaacgtgaccctggagcacccactgttcatcggcggcatgtgccagaactgtaaaaactgttttctggagtgtgcctatcaatacgacgatgacggctaccagagctactgcaccatctgttgcggcggaagagaggtgctgatgtgtggaaataacaactgctgccggtgcttctgcgtggaatgcgtggacctgctggtgggccccggcgccgcccaggccgctattaaggaagatccttggaactgctacatgtgcggccacaagggcacatacggcctgctgagacggagagaggactggcctagcagactgcagatgttcttcgccaataaccacgaccaggagttcgacccccctaaggtgtaccctcccgtccccgccgagaagagaaagcccatccgggtcctgagcctgttcgatggcatcgccaccggtctgctggtgctgaaggacctgggcatccaggtggataggtacattgcctccgaggtgtgcgaggactccatcaccgtgggaatggtgcgtcatcagggcaagatcatgtacgtgggcgacgtgcggagcgtgacacagaagcatatccaggagtggggccctttcgacctggtgatcggcggcagcccttgcaatgacctgagcatcgtgaacccagcccggaagggcctgtacgagggaaccggcagactgttcttcgagttttacagactgctgcacgacgcccggcctaaggaaggcgacgaccggcccttcttttggctgttcgagaatgtggtggccatgggagtcagcgacaagcgggatattagccggttcctggagagcaaccccgtgatgatcgatgccaaggaagtgagcgccgcccaccgggccagatacttctggggcaatctgcctggcatgaacagacccctggccagcaccgtgaacgacaagctggagctgcaggagtgcctggagcacggccggatcgccaagttcagcaaggtgagaaccatcaccacccgaagcaacagcatcaaacaaggcaaggaccagcactttcctgtgttcatgaacgagaaggaggacatcctgtggtgtaccgagatggagagagtgttcgggttcccagtccactacacagatgtcagcaacatgtctagactggccagacagagactgctgggaagaagctggtccgtccctgtgatcagacacctgttcgcccctctgaaggagtacttcgcctgcgtgagcagcggcaacagcaacgccaacagccggggccccagcttctctagcggcctggtgccactgtccctgagagggagccacatgggccccatggagatctacaaaaccgtgagcgcctggaagcggcagcctgtgcgcgtgctgagcctgtttcggaatatcgataaagtcctgaaaagcctgggattcctggagagcggctctggctccggcggtggcaccctgaagtacgtggaggatgtgacaaacgtggtcagacgggatgtggagaagtggggccccttcgatctggtgtacggcagcacccaacccctgggcagctcttgtgaccggtgccctggctggtacatgtttcagttccaccggatcctgcagtacgccctgccgagacaggagtcccagcggccattcttttggattttcatggacaacttgctgctgaccgaggatgaccaggaaactaccactcggttcctgcagaccgaagccgtgaccctgcaggacgtgagaggccgggactaccagaacgccatgcgggtgtggtccaacatccctggactgaaaagcaagcacgcacctctgacccctaaagaagaggagtacctgcaggcccaggtgcggagcagaagcaagctggacgcccctaaggtggatctgctggtgaagaattgcctcctgcccctgagagagtacttcaagtatttcagccagaatagtctgcccctgggcggcccaagcagcggcgcccctcctcccagcggcggcagcccagccggctccccaacctctaccgaggagggcacctctgagtccgccacccccgagagcggccctggcacctccaccgagcccagcgagggcagcgcacccggcagccctgccggcagccccacctccacagaggagggaaccagcaccgagcccagcgaaggcagcgccccaggcaccagcaccgagcctagtgagggcggctctggcggcggcagcgcccaggagattaaacggatcaacaagatcagaagaagacttgtgaaagacagcaacaccaagaaggccggcaagacaggccccatgaaaaccctgctggttagagtgatgacacccgatctgagagagcggctggaaaacctgagaaagaagcctgaaaatatcccccagcccatcagcaatacatctagagccaacctgaataagctgctgaccgattacaccgaaatgaagaaggcgatcctgcatgtgtactgggaagagttccagaaggaccctgtgggcctgatgagccgggtggcccagcctgccagcaagaagatcgatcagaacaagctgaaacctgagatggacgagaagggcaacctgaccaccgccggctttgcctgctctcagtgtggccagcccctgttcgtgtacaagctggagcaggtgtctgagaagggcaaggcttacaccaactacttcggacggtgcaatgtggccgagcacgaaaagctgatcctgctggcccagctgaagcccgagaaggatagcgacgaagccgtgacatatagcctgggaaagtttgggcagagggccctggatttctacagcattcatgtgaccaaggagtccacccaccccgtgaagcccctggcccagatcgccggaaacagatacgcctccggacctgtgggaaaggccctgagcgacgcatgtatgggcacaatcgcctccttcctgtctaagtaccaggacatcatcatcgaacaccagaaggtggtgaagggcaaccagaagagactggagagcctgcgggagctggccggcaaggaaaacctggaataccctagcgtgaccctgccacctcagcctcacaccaaggagggcgttgatgcctacaacgaagtgatcgcccgggtgcgaatgtgggtgaacctgaacctgtggcagaagctgaagctaagcagagatgatgccaagcctctgctgagactgaagggattcccttcctttcctctggtcgagagacaggccaacgaagtggactggtgggacatggtgtgtaacgtgaagaagctgatcaacgagaaaaaggaggatggcaaggtgttttggcagaatctggctggctacaagagacaggaagccctgagaccatacctgagcagcgaggaagatcggaagaagggaaagaaattcgctcggtaccagctgggcgacctgctgctgcacctggaaaagaagcacggcgaggactggggaaaggtgtacgacgaggcctgggagcggattgacaagaaagtggaaggcctgagcaagcacatcaagctggaagaggaacggagaagcgaggacgcccagagcaaggccgccctgaccgactggctgcgggctaaggccagcttcgtgatcgagggcctgaaggaggccgacaaggacgagttctgcagatgcgagctgaagctgcagaagtggtacggggacctgcggggaaagcccttcgccatcgaagccgagaacagcatcctggacatcagcggcttcagcaagcagtacaactgtgccttcatctggcagaaggacggcgtgaagaagctgaacctgtacctgatcatcaactacttcaagggcggcaagctgcggttcaagaagatcaaacctgaagccttcgaagccaacagattctacaccgtgatcaacaaaaagagcggcgagatcgtgcccatggaggtgaacttcaacttcgacgaccccaacctgatcatcctgcctctggcctttggcaagagacagggcagagaattcatctggaacgacctgctgtccctggaaaccggcagcctgaagctggccaacggaagagtgatcgagaagacactgtacaacagaagaacccggcaggatgagcctgccctgttcgtggccctgaccttcgagcggcgggaggtcctggactcctccaatatcaaaccaatgaacctgatcggcgtggcaagaggcgaaaacatccccgccgtgatcgccctgaccgaccccgagggctgcccactgagccggtttaaggatagcctgggaaacccaacccacatcctgagaatcggcgagagctataaggagaagcagcggaccatccaggccaagaaggaggtggagcagcggagagccggcggctacagccggaagtacgccagcaaagccaagaatctggcagacgatatggtgagaaacaccgctagagatctgctgtactacgccgtgacccaggatgccatgctgatcttcgccaacctgagccggggcttcggccggcagggcaagcggaccttcatggccgagagacagtacacacggatggaggactggctgaccgccaagctggcctacgagggcctgagcaagacctacctgtccaagacactggcccagtacacctccaagacatgcagcaactgtgggtttaccatcaccagcgccgactacgacagggtgctggagaagctgaagaagacagcaacaggctggatgaccacaattaacggcaaggagctgaaggtggagggccagattacctactacaacagatacaagagacagaacgtagtcaaggacctgtccgtcgagctggatagactgagcgaagaatctgtgaacaacgacatctcctcctggacaaagggcagaagcggagaagctctgagcctcctgaagaaaagattctcccatagacccgtgcaggagaagttcgtgtgcctgaactgcggcttcgagacacacgcagccgagcaagccgccctgaacatcgccagatcctggctgttcctgcggagccaggagtacaagaaataccagacaaacaagacaaccggcaacaccgataagagagccttcgtcgagacctggcagtccttttaccggaagaagcttaaggaggtgtggaaacctgccgtgcggtctggcggatctggcggaggctccacaagcacccaggagagcgtgatgttcgaggacgtggccgtggacttcaccagggaggagtggagccacctggaccccgcccagagggccctgtacagggaggtgatgctggagaactacgagaacctggtgagcctgggcctgcccgtgagcaagctggacgtgatcagcctgctggagaggggcgaggccccctggaggcccgagggcggcggccccaggtgcagctgccccgaccccttcatcgagaccagccccaagaaaaagagaaaagtctaagctgccttctgcggggcttgccttctggccatgcccttcttctctcccttgcacctgtacctcttggtctttgaataaagcctgagtaggaaggctagcaaaaaaaaaaaaaaaaaaaaaaaaaaaaaaaaaaaaaaaaaaaaaaaaaaaaaaaaaaaaaaaaaaaaaaaaaaaaaaaa

SEQ ID NO: 6862 - RNA, 5797 nt, synthetic construct
  source 1..5797: mol_type = other RNA
aggaaataagagagaaaagaagagtaagaagaaatataagagccaccatggcccctaagaagaagcgtaaagtgagccggatggaacgcctcgtctacgaggtgcggcagaagtgcagaaacatcgaggacatctgcatctcctgcggatctctgaacgtgaccctggagcacccactgttcatcggcggcatgtgccagaactgtaaaaactgttttctggagtgtgcctatcaatacgacgatgacggctaccagagctactgcaccatctgttgcggcggaagagaggtgctgatgtgtggaaataacaactgctgccggtgcttctgcgtggaatgcgtggacctgctggtgggccccggcgccgcccaggccgctattaaggaagatccttggaactgctacatgtgcggccacaagggcacatacggcctgctgagacggagagaggactggcctagcagactgcagatgttcttcgccaataaccacgaccaggagttcgacccccctaaggtgtaccctcccgtccccgccgagaagagaaagcccatccgggtcctgagcctgttcgatggcatcgccaccggtctgctggtgctgaaggacctgggcatccaggtggataggtacattgcctccgaggtgtgcgaggactccatcaccgtgggaatggtgcgtcatcagggcaagatcatgtacgtgggcgacgtgcggagcgtgacacagaagcatatccaggagtggggccctttcgacctggtgatcggcggcagcccttgcaatgacctgagcatcgtgaacccagcccggaagggcctgtacgagggaaccggcagactgttcttcgagttttacagactgctgcacgacgcccggcctaaggaaggcgacgaccggcccttcttttggctgttcgagaatgtggtggccatgggagtcagcgacaagcgggatattagccggttcctggagagcaaccccgtgatgatcgatgccaaggaagtgagcgccgcccaccgggccagatacttctggggcaatctgcctggcatgaacagacccctggccagcaccgtgaacgacaagctggagctgcaggagtgcctggagcacggccggatcgccaagttcagcaaggtgagaaccatcaccacccgaagcaacagcatcaaacaaggcaaggaccagcactttcctgtgttcatgaacgagaaggaggacatcctgtggtgtaccgagatggagagagtgttcgggttcccagtccactacacagatgtcagcaacatgtctagactggccagacagagactgctgggaagaagctggtccgtccctgtgatcagacacctgttcgcccctctgaaggagtacttcgcctgcgtgagcagcggcaacagcaacgccaacagccggggccccagcttctctagcggcctggtgccactgtccctgagagggagccacatgggccccatggagatctacaaaaccgtgagcgcctggaagcggcagcctgtgcgcgtgctgagcctgtttcggaatatcgataaagtcctgaaaagcctgggattcctggagagcggctctggctccggcggtggcaccctgaagtacgtggaggatgtgacaaacgtggtcagacgggatgtggagaagtggggccccttcgatctggtgtacggcagcacccaacccctgggcagctcttgtgaccggtgccctggctggtacatgtttcagttccaccggatcctgcagtacgccctgccgagacaggagtcccagcggccattcttttggattttcatggacaacttgctgctgaccgaggatgaccaggaaactaccactcggttcctgcagaccgaagccgtgaccctgcaggacgtgagaggccgggactaccagaacgccatgcgggtgtggtccaacatccctggactgaaaagcaagcacgcacctctgacccctaaagaagaggagtacctgcaggcccaggtgcggagcagaagcaagctggacgcccctaaggtggatctgctggtgaagaattgcctcctgcccctgagagagtacttcaagtatttcagccagaatagtctgcccctgggcggcccaagcagcggcgcccctcctcccagcggcggcagcccagccggctccccaacctctaccgaggagggcacctctgagtccgccacccccgagagcggccctggcacctccaccgagcccagcgagggcagcgcacccggcagccctgccggcagccccacctccacagaggagggaaccagcaccgagcccagcgaaggcagcgccccaggcaccagcaccgagcctagtgagggcggctctggcggcggcagcgcccaggagattaaacggatcaacaagatcagaagaagacttgtgaaagacagcaacaccaagaaggccggcaagacaggccccatgaaaaccctgctggttagagtgatgacacccgatctgagagagcggctggaaaacctgagaaagaagcctgaaaatatcccccagcccatcagcaatacatctagagccaacctgaataagctgctgaccgattacaccgaaatgaagaaggcgatcctgcatgtgtactgggaagagttccagaaggaccctgtgggcctgatgagccgggtggcccagcctgccagcaagaagatcgatcagaacaagctgaaacctgagatggacgagaagggcaacctgaccaccgccggctttgcctgctctcagtgtggccagcccctgttcgtgtacaagctggagcaggtgtctgagaagggcaaggcttacaccaactacttcggacggtgcaatgtggccgagcacgaaaagctgatcctgctggcccagctgaagcccgagaaggatagcgacgaagccgtgacatatagcctgggaaagtttgggcagagggccctggatttctacagcattcatgtgaccaaggagtccacccaccccgtgaagcccctggcccagatcgccggaaacagatacgcctccggacctgtgggaaaggccctgagcgacgcatgtatgggcacaatcgcctccttcctgtctaagtaccaggacatcatcatcgaacaccagaaggtggtgaagggcaaccagaagagactggagagcctgcgggagctggccggcaaggaaaacctggaataccctagcgtgaccctgccacctcagcctcacaccaaggagggcgttgatgcctacaacgaagtgatcgcccgggtgcgaatgtgggtgaacctgaacctgtggcagaagctgaagctaagcagagatgatgccaagcctctgctgagactgaagggattcccttcctttcctctggtcgagagacaggccaacgaagtggactggtgggacatggtgtgtaacgtgaagaagctgatcaacgagaaaaaggaggatggcaaggtgttttggcagaatctggctggctacaagagacaggaagccctgagaccatacctgagcagcgaggaagatcggaagaagggaaagaaattcgctcggtaccagctgggcgacctgctgctgcacctggaaaagaagcacggcgaggactggggaaaggtgtacgacgaggcctgggagcggattgacaagaaagtggaaggcctgagcaagcacatcaagctggaagaggaacggagaagcgaggacgcccagagcaaggccgccctgaccgactggctgcgggctaaggccagcttcgtgatcgagggcctgaaggaggccgacaaggacgagttctgcagatgcgagctgaagctgcagaagtggtacggggacctgcggggaaagcccttcgccatcgaagccgagaacagcatcctggacatcagcggcttcagcaagcagtacaactgtgccttcatctggcagaaggacggcgtgaagaagctgaacctgtacctgatcatcaactacttcaagggcggcaagctgcggttcaagaagatcaaacctgaagccttcgaagccaacagattctacaccgtgatcaacaaaaagagcggcgagatcgtgcccatggaggtgaacttcaacttcgacgaccccaacctgatcatcctgcctctggcctttggcaagagacagggcagagaattcatctggaacgacctgctgtccctggaaaccggcagcctgaagctggccaacggaagagtgatcgagaagacactgtacaacagaagaacccggcaggatgagcctgccctgttcgtggccctgaccttcgagcggcgggaggtcctggactcctccaatatcaaaccaatgaacctgatcggcgtggcaagaggcgaaaacatccccgccgtgatcgccctgaccgaccccgagggctgcccactgagccggtttaaggatagcctgggaaacccaacccacatcctgagaatcggcgagagctataaggagaagcagcggaccatccaggccaagaaggaggtggagcagcggagagccggcggctacagccggaagtacgccagcaaagccaagaatctggcagacgatatggtgagaaacaccgctagagatctgctgtactacgccgtgacccaggatgccatgctgatcttcgccaacctgagccggggcttcggccggcagggcaagcggaccttcatggccgagagacagtacacacggatggaggactggctgaccgccaagctggcctacgagggcctgagcaagacctacctgtccaagacactggcccagtacacctccaagacatgcagcaactgtgggtttaccatcaccagcgccgactacgacagggtgctggagaagctgaagaagacagcaacaggctggatgaccacaattaacggcaaggagctgaaggtggagggccagattacctactacaacagatacaagagacagaacgtagtcaaggacctgtccgtcgagctggatagactgagcgaagaatctgtgaacaacgacatctcctcctggacaaagggcagaagcggagaagctctgagcctcctgaagaaaagattctcccatagacccgtgcaggagaagttcgtgtgcctgaactgcggcttcgagacacacgcagccgagcaagccgccctgaacatcgccagatcctggctgttcctgcggagccaggagtacaagaaataccagacaaacaagacaaccggcaacaccgataagagagccttcgtcgagacctggcagtccttttaccggaagaagcttaaggaggtgtggaaacctgccgtgcggtctggcggatctggcggaggctccacaagcatggtgaccttcaaggacgtggccgtggccttcagcgaggaggagctgaggctgctggaccccgcccagaggaagctgtaccaggaggtgatggtggagaacttccagaacctgctgagcgtgggcatcaacaaccagagcgagctgagggccgtgcaggacggcggcagccacgaggccctgagctgctggcagatctggcagagggtgatcgacaacctgaccaggtgccaggacagcatgaccagccccaagaaaaagagaaaagtctaagctgccttctgcggggcttgccttctggccatgcccttcttctctcccttgcacctgtacctcttggtctttgaataaagcctgagtaggaaggctagcaaaaaaaaaaaaaaaaaaaaaaaaaaaaaaaaaaaaaaaaaaaaaaaaaaaaaaaaaaaaaaaaaaaaaaaaaaaaaaaa

SEQ ID NO: 6863 - RNA, 5797 nt, synthetic construct
  source 1..5797: mol_type = other RNA
aggaaataagagagaaaagaagagtaagaagaaatataagagccaccatggcccctaagaagaagcgtaaagtgagccggatggaacgcctcgtctacgaggtgcggcagaagtgcagaaacatcgaggacatctgcatctcctgcggatctctgaacgtgaccctggagcacccactgttcatcggcggcatgtgccagaactgtaaaaactgttttctggagtgtgcctatcaatacgacgatgacggctaccagagctactgcaccatctgttgcggcggaagagaggtgctgatgtgtggaaataacaactgctgccggtgcttctgcgtggaatgcgtggacctgctggtgggccccggcgccgcccaggccgctattaaggaagatccttggaactgctacatgtgcggccacaagggcacatacggcctgctgagacggagagaggactggcctagcagactgcagatgttcttcgccaataaccacgaccaggagttcgacccccctaaggtgtaccctcccgtccccgccgagaagagaaagcccatccgggtcctgagcctgttcgatggcatcgccaccggtctgctggtgctgaaggacctgggcatccaggtggataggtacattgcctccgaggtgtgcgaggactccatcaccgtgggaatggtgcgtcatcagggcaagatcatgtacgtgggcgacgtgcggagcgtgacacagaagcatatccaggagtggggccctttcgacctggtgatcggcggcagcccttgcaatgacctgagcatcgtgaacccagcccggaagggcctgtacgagggaaccggcagactgttcttcgagttttacagactgctgcacgacgcccggcctaaggaaggcgacgaccggcccttcttttggctgttcgagaatgtggtggccatgggagtcagcgacaagcgggatattagccggttcctggagagcaaccccgtgatgatcgatgccaaggaagtgagcgccgcccaccgggccagatacttctggggcaatctgcctggcatgaacagacccctggccagcaccgtgaacgacaagctggagctgcaggagtgcctggagcacggccggatcgccaagttcagcaaggtgagaaccatcaccacccgaagcaacagcatcaaacaaggcaaggaccagcactttcctgtgttcatgaacgagaaggaggacatcctgtggtgtaccgagatggagagagtgttcgggttcccagtccactacacagatgtcagcaacatgtctagactggccagacagagactgctgggaagaagctggtccgtccctgtgatcagacacctgttcgcccctctgaaggagtacttcgcctgcgtgagcagcggcaacagcaacgccaacagccggggccccagcttctctagcggcctggtgccactgtccctgagagggagccacatgggccccatggagatctacaaaaccgtgagcgcctggaagcggcagcctgtgcgcgtgctgagcctgtttcggaatatcgataaagtcctgaaaagcctgggattcctggagagcggctctggctccggcggtggcaccctgaagtacgtggaggatgtgacaaacgtggtcagacgggatgtggagaagtggggccccttcgatctggtgtacggcagcacccaacccctgggcagctcttgtgaccggtgccctggctggtacatgtttcagttccaccggatcctgcagtacgccctgccgagacaggagtcccagcggccattcttttggattttcatggacaacttgctgctgaccgaggatgaccaggaaactaccactcggttcctgcagaccgaagccgtgaccctgcaggacgtgagaggccgggactaccagaacgccatgcgggtgtggtccaacatccctggactgaaaagcaagcacgcacctctgacccctaaagaagaggagtacctgcaggcccaggtgcggagcagaagcaagctggacgcccctaaggtggatctgctggtgaagaattgcctcctgcccctgagagagtacttcaagtatttcagccagaatagtctgcccctgggcggcccaagcagcggcgcccctcctcccagcggcggcagcccagccggctccccaacctctaccgaggagggcacctctgagtccgccacccccgagagcggccctggcacctccaccgagcccagcgagggcagcgcacccggcagccctgccggcagccccacctccacagaggagggaaccagcaccgagcccagcgaaggcagcgccccaggcaccagcaccgagcctagtgagggcggctctggcggcggcagcgcccaggagattaaacggatcaacaagatcagaagaagacttgtgaaagacagcaacaccaagaaggccggcaagacaggccccatgaaaaccctgctggttagagtgatgacacccgatctgagagagcggctggaaaacctgagaaagaagcctgaaaatatcccccagcccatcagcaatacatctagagccaacctgaataagctgctgaccgattacaccgaaatgaagaaggcgatcctgcatgtgtactgggaagagttccagaaggaccctgtgggcctgatgagccgggtggcccagcctgccagcaagaagatcgatcagaacaagctgaaacctgagatggacgagaagggcaacctgaccaccgccggctttgcctgctctcagtgtggccagcccctgttcgtgtacaagctggagcaggtgtctgagaagggcaaggcttacaccaactacttcggacggtgcaatgtggccgagcacgaaaagctgatcctgctggcccagctgaagcccgagaaggatagcgacgaagccgtgacatatagcctgggaaagtttgggcagagggccctggatttctacagcattcatgtgaccaaggagtccacccaccccgtgaagcccctggcccagatcgccggaaacagatacgcctccggacctgtgggaaaggccctgagcgacgcatgtatgggcacaatcgcctccttcctgtctaagtaccaggacatcatcatcgaacaccagaaggtggtgaagggcaaccagaagagactggagagcctgcgggagctggccggcaaggaaaacctggaataccctagcgtgaccctgccacctcagcctcacaccaaggagggcgttgatgcctacaacgaagtgatcgcccgggtgcgaatgtgggtgaacctgaacctgtggcagaagctgaagctaagcagagatgatgccaagcctctgctgagactgaagggattcccttcctttcctctggtcgagagacaggccaacgaagtggactggtgggacatggtgtgtaacgtgaagaagctgatcaacgagaaaaaggaggatggcaaggtgttttggcagaatctggctggctacaagagacaggaagccctgagaccatacctgagcagcgaggaagatcggaagaagggaaagaaattcgctcggtaccagctgggcgacctgctgctgcacctggaaaagaagcacggcgaggactggggaaaggtgtacgacgaggcctgggagcggattgacaagaaagtggaaggcctgagcaagcacatcaagctggaagaggaacggagaagcgaggacgcccagagcaaggccgccctgaccgactggctgcgggctaaggccagcttcgtgatcgagggcctgaaggaggccgacaaggacgagttctgcagatgcgagctgaagctgcagaagtggtacggggacctgcggggaaagcccttcgccatcgaagccgagaacagcatcctggacatcagcggcttcagcaagcagtacaactgtgccttcatctggcagaaggacggcgtgaagaagctgaacctgtacctgatcatcaactacttcaagggcggcaagctgcggttcaagaagatcaaacctgaagccttcgaagccaacagattctacaccgtgatcaacaaaaagagcggcgagatcgtgcccatggaggtgaacttcaacttcgacgaccccaacctgatcatcctgcctctggcctttggcaagagacagggcagagaattcatctggaacgacctgctgtccctggaaaccggcagcctgaagctggccaacggaagagtgatcgagaagacactgtacaacagaagaacccggcaggatgagcctgccctgttcgtggccctgaccttcgagcggcgggaggtcctggactcctccaatatcaaaccaatgaacctgatcggcgtggcaagaggcgaaaacatccccgccgtgatcgccctgaccgaccccgagggctgcccactgagccggtttaaggatagcctgggaaacccaacccacatcctgagaatcggcgagagctataaggagaagcagcggaccatccaggccaagaaggaggtggagcagcggagagccggcggctacagccggaagtacgccagcaaagccaagaatctggcagacgatatggtgagaaacaccgctagagatctgctgtactacgccgtgacccaggatgccatgctgatcttcgccaacctgagccggggcttcggccggcagggcaagcggaccttcatggccgagagacagtacacacggatggaggactggctgaccgccaagctggcctacgagggcctgagcaagacctacctgtccaagacactggcccagtacacctccaagacatgcagcaactgtgggtttaccatcaccagcgccgactacgacagggtgctggagaagctgaagaagacagcaacaggctggatgaccacaattaacggcaaggagctgaaggtggagggccagattacctactacaacagatacaagagacagaacgtagtcaaggacctgtccgtcgagctggatagactgagcgaagaatctgtgaacaacgacatctcctcctggacaaagggcagaagcggagaagctctgagcctcctgaagaaaagattctcccatagacccgtgcaggagaagttcgtgtgcctgaactgcggcttcgagacacacgcagccgagcaagccgccctgaacatcgccagatcctggctgttcctgcggagccaggagtacaagaaataccagacaaacaagacaaccggcaacaccgataagagagccttcgtcgagacctggcagtccttttaccggaagaagcttaaggaggtgtggaaacctgccgtgcggtctggcggatctggcggaggctccacaagcatgcccggcccccccggcagcctggagatgggcgtgctgaccttcagggacgtggccatcgagttcagcctggaggagtggcagtgcctggacatcacccagcagaacctgtacaggaacgtgatgctggagaactacaggaacctggtgttcgtgggcatcgccgccagcaagcccgacctgatcacctgcctggagcagggcaaggagccctggaacgtgaagaggcacgagatggtggccaccagccccaagaaaaagagaaaagtctaagctgccttctgcggggcttgccttctggccatgcccttcttctctcccttgcacctgtacctcttggtctttgaataaagcctgagtaggaaggctagcaaaaaaaaaaaaaaaaaaaaaaaaaaaaaaaaaaaaaaaaaaaaaaaaaaaaaaaaaaaaaaaaaaaaaaaaaaaaaaaa

SEQ ID NO: 6864 - RNA, 5797 nt, synthetic construct
  source 1..5797: mol_type = other RNA
aggaaataagagagaaaagaagagtaagaagaaatataagagccaccatggcccctaagaagaagcgtaaagtgagccggatggaacgcctcgtctacgaggtgcggcagaagtgcagaaacatcgaggacatctgcatctcctgcggatctctgaacgtgaccctggagcacccactgttcatcggcggcatgtgccagaactgtaaaaactgttttctggagtgtgcctatcaatacgacgatgacggctaccagagctactgcaccatctgttgcggcggaagagaggtgctgatgtgtggaaataacaactgctgccggtgcttctgcgtggaatgcgtggacctgctggtgggccccggcgccgcccaggccgctattaaggaagatccttggaactgctacatgtgcggccacaagggcacatacggcctgctgagacggagagaggactggcctagcagactgcagatgttcttcgccaataaccacgaccaggagttcgacccccctaaggtgtaccctcccgtccccgccgagaagagaaagcccatccgggtcctgagcctgttcgatggcatcgccaccggtctgctggtgctgaaggacctgggcatccaggtggataggtacattgcctccgaggtgtgcgaggactccatcaccgtgggaatggtgcgtcatcagggcaagatcatgtacgtgggcgacgtgcggagcgtgacacagaagcatatccaggagtggggccctttcgacctggtgatcggcggcagcccttgcaatgacctgagcatcgtgaacccagcccggaagggcctgtacgagggaaccggcagactgttcttcgagttttacagactgctgcacgacgcccggcctaaggaaggcgacgaccggcccttcttttggctgttcgagaatgtggtggccatgggagtcagcgacaagcgggatattagccggttcctggagagcaaccccgtgatgatcgatgccaaggaagtgagcgccgcccaccgggccagatacttctggggcaatctgcctggcatgaacagacccctggccagcaccgtgaacgacaagctggagctgcaggagtgcctggagcacggccggatcgccaagttcagcaaggtgagaaccatcaccacccgaagcaacagcatcaaacaaggcaaggaccagcactttcctgtgttcatgaacgagaaggaggacatcctgtggtgtaccgagatggagagagtgttcgggttcccagtccactacacagatgtcagcaacatgtctagactggccagacagagactgctgggaagaagctggtccgtccctgtgatcagacacctgttcgcccctctgaaggagtacttcgcctgcgtgagcagcggcaacagcaacgccaacagccggggccccagcttctctagcggcctggtgccactgtccctgagagggagccacatgggccccatggagatctacaaaaccgtgagcgcctggaagcggcagcctgtgcgcgtgctgagcctgtttcggaatatcgataaagtcctgaaaagcctgggattcctggagagcggctctggctccggcggtggcaccctgaagtacgtggaggatgtgacaaacgtggtcagacgggatgtggagaagtggggccccttcgatctggtgtacggcagcacccaacccctgggcagctcttgtgaccggtgccctggctggtacatgtttcagttccaccggatcctgcagtacgccctgccgagacaggagtcccagcggccattcttttggattttcatggacaacttgctgctgaccgaggatgaccaggaaactaccactcggttcctgcagaccgaagccgtgaccctgcaggacgtgagaggccgggactaccagaacgccatgcgggtgtggtccaacatccctggactgaaaagcaagcacgcacctctgacccctaaagaagaggagtacctgcaggcccaggtgcggagcagaagcaagctggacgcccctaaggtggatctgctggtgaagaattgcctcctgcccctgagagagtacttcaagtatttcagccagaatagtctgcccctgggcggcccaagcagcggcgcccctcctcccagcggcggcagcccagccggctccccaacctctaccgaggagggcacctctgagtccgccacccccgagagcggccctggcacctccaccgagcccagcgagggcagcgcacccggcagccctgccggcagccccacctccacagaggagggaaccagcaccgagcccagcgaaggcagcgccccaggcaccagcaccgagcctagtgagggcggctctggcggcggcagcgcccaggagattaaacggatcaacaagatcagaagaagacttgtgaaagacagcaacaccaagaaggccggcaagacaggccccatgaaaaccctgctggttagagtgatgacacccgatctgagagagcggctggaaaacctgagaaagaagcctgaaaatatcccccagcccatcagcaatacatctagagccaacctgaataagctgctgaccgattacaccgaaatgaagaaggcgatcctgcatgtgtactgggaagagttccagaaggaccctgtgggcctgatgagccgggtggcccagcctgccagcaagaagatcgatcagaacaagctgaaacctgagatggacgagaagggcaacctgaccaccgccggctttgcctgctctcagtgtggccagcccctgttcgtgtacaagctggagcaggtgtctgagaagggcaaggcttacaccaactacttcggacggtgcaatgtggccgagcacgaaaagctgatcctgctggcccagctgaagcccgagaaggatagcgacgaagccgtgacatatagcctgggaaagtttgggcagagggccctggatttctacagcattcatgtgaccaaggagtccacccaccccgtgaagcccctggcccagatcgccggaaacagatacgcctccggacctgtgggaaaggccctgagcgacgcatgtatgggcacaatcgcctccttcctgtctaagtaccaggacatcatcatcgaacaccagaaggtggtgaagggcaaccagaagagactggagagcctgcgggagctggccggcaaggaaaacctggaataccctagcgtgaccctgccacctcagcctcacaccaaggagggcgttgatgcctacaacgaagtgatcgcccgggtgcgaatgtgggtgaacctgaacctgtggcagaagctgaagctaagcagagatgatgccaagcctctgctgagactgaagggattcccttcctttcctctggtcgagagacaggccaacgaagtggactggtgggacatggtgtgtaacgtgaagaagctgatcaacgagaaaaaggaggatggcaaggtgttttggcagaatctggctggctacaagagacaggaagccctgagaccatacctgagcagcgaggaagatcggaagaagggaaagaaattcgctcggtaccagctgggcgacctgctgctgcacctggaaaagaagcacggcgaggactggggaaaggtgtacgacgaggcctgggagcggattgacaagaaagtggaaggcctgagcaagcacatcaagctggaagaggaacggagaagcgaggacgcccagagcaaggccgccctgaccgactggctgcgggctaaggccagcttcgtgatcgagggcctgaaggaggccgacaaggacgagttctgcagatgcgagctgaagctgcagaagtggtacggggacctgcggggaaagcccttcgccatcgaagccgagaacagcatcctggacatcagcggcttcagcaagcagtacaactgtgccttcatctggcagaaggacggcgtgaagaagctgaacctgtacctgatcatcaactacttcaagggcggcaagctgcggttcaagaagatcaaacctgaagccttcgaagccaacagattctacaccgtgatcaacaaaaagagcggcgagatcgtgcccatggaggtgaacttcaacttcgacgaccccaacctgatcatcctgcctctggcctttggcaagagacagggcagagaattcatctggaacgacctgctgtccctggaaaccggcagcctgaagctggccaacggaagagtgatcgagaagacactgtacaacagaagaacccggcaggatgagcctgccctgttcgtggccctgaccttcgagcggcgggaggtcctggactcctccaatatcaaaccaatgaacctgatcggcgtggcaagaggcgaaaacatccccgccgtgatcgccctgaccgaccccgagggctgcccactgagccggtttaaggatagcctgggaaacccaacccacatcctgagaatcggcgagagctataaggagaagcagcggaccatccaggccaagaaggaggtggagcagcggagagccggcggctacagccggaagtacgccagcaaagccaagaatctggcagacgatatggtgagaaacaccgctagagatctgctgtactacgccgtgacccaggatgccatgctgatcttcgccaacctgagccggggcttcggccggcagggcaagcggaccttcatggccgagagacagtacacacggatggaggactggctgaccgccaagctggcctacgagggcctgagcaagacctacctgtccaagacactggcccagtacacctccaagacatgcagcaactgtgggtttaccatcaccagcgccgactacgacagggtgctggagaagctgaagaagacagcaacaggctggatgaccacaattaacggcaaggagctgaaggtggagggccagattacctactacaacagatacaagagacagaacgtagtcaaggacctgtccgtcgagctggatagactgagcgaagaatctgtgaacaacgacatctcctcctggacaaagggcagaagcggagaagctctgagcctcctgaagaaaagattctcccatagacccgtgcaggagaagttcgtgtgcctgaactgcggcttcgagacacacgcagccgagcaagccgccctgaacatcgccagatcctggctgttcctgcggagccaggagtacaagaaataccagacaaacaagacaaccggcaacaccgataagagagccttcgtcgagacctggcagtccttttaccggaagaagcttaaggaggtgtggaaacctgccgtgcggtctggcggatctggcggaggctccacaagcgacatgggcctggtgagcttcgaggacgtggccgtggacttcacctggcaggagtggcaggagctggacgccgcccagaggaccctgtacagggacgtgatgctggagaactacaggagcctggtgtggctgggccactgcctggccaagcccgagctgatcagcaagctggaggagggcttcgagccctggggcgtggccgaggccaccgagcagtgcctgccctgcgccgaggaccagaccaccagccccaagaaaaagagaaaagtctaagctgccttctgcggggcttgccttctggccatgcccttcttctctcccttgcacctgtacctcttggtctttgaataaagcctgagtaggaaggctagcaaaaaaaaaaaaaaaaaaaaaaaaaaaaaaaaaaaaaaaaaaaaaaaaaaaaaaaaaaaaaaaaaaaaaaaaaaaaaaaa

SEQ ID NO: 6865 - RNA, 5797 nt, synthetic construct
  source 1..5797: mol_type = other RNA
aggaaataagagagaaaagaagagtaagaagaaatataagagccaccatggcccctaagaagaagcgtaaagtgagccggatggaacgcctcgtctacgaggtgcggcagaagtgcagaaacatcgaggacatctgcatctcctgcggatctctgaacgtgaccctggagcacccactgttcatcggcggcatgtgccagaactgtaaaaactgttttctggagtgtgcctatcaatacgacgatgacggctaccagagctactgcaccatctgttgcggcggaagagaggtgctgatgtgtggaaataacaactgctgccggtgcttctgcgtggaatgcgtggacctgctggtgggccccggcgccgcccaggccgctattaaggaagatccttggaactgctacatgtgcggccacaagggcacatacggcctgctgagacggagagaggactggcctagcagactgcagatgttcttcgccaataaccacgaccaggagttcgacccccctaaggtgtaccctcccgtccccgccgagaagagaaagcccatccgggtcctgagcctgttcgatggcatcgccaccggtctgctggtgctgaaggacctgggcatccaggtggataggtacattgcctccgaggtgtgcgaggactccatcaccgtgggaatggtgcgtcatcagggcaagatcatgtacgtgggcgacgtgcggagcgtgacacagaagcatatccaggagtggggccctttcgacctggtgatcggcggcagcccttgcaatgacctgagcatcgtgaacccagcccggaagggcctgtacgagggaaccggcagactgttcttcgagttttacagactgctgcacgacgcccggcctaaggaaggcgacgaccggcccttcttttggctgttcgagaatgtggtggccatgggagtcagcgacaagcgggatattagccggttcctggagagcaaccccgtgatgatcgatgccaaggaagtgagcgccgcccaccgggccagatacttctggggcaatctgcctggcatgaacagacccctggccagcaccgtgaacgacaagctggagctgcaggagtgcctggagcacggccggatcgccaagttcagcaaggtgagaaccatcaccacccgaagcaacagcatcaaacaaggcaaggaccagcactttcctgtgttcatgaacgagaaggaggacatcctgtggtgtaccgagatggagagagtgttcgggttcccagtccactacacagatgtcagcaacatgtctagactggccagacagagactgctgggaagaagctggtccgtccctgtgatcagacacctgttcgcccctctgaaggagtacttcgcctgcgtgagcagcggcaacagcaacgccaacagccggggccccagcttctctagcggcctggtgccactgtccctgagagggagccacatgggccccatggagatctacaaaaccgtgagcgcctggaagcggcagcctgtgcgcgtgctgagcctgtttcggaatatcgataaagtcctgaaaagcctgggattcctggagagcggctctggctccggcggtggcaccctgaagtacgtggaggatgtgacaaacgtggtcagacgggatgtggagaagtggggccccttcgatctggtgtacggcagcacccaacccctgggcagctcttgtgaccggtgccctggctggtacatgtttcagttccaccggatcctgcagtacgccctgccgagacaggagtcccagcggccattcttttggattttcatggacaacttgctgctgaccgaggatgaccaggaaactaccactcggttcctgcagaccgaagccgtgaccctgcaggacgtgagaggccgggactaccagaacgccatgcgggtgtggtccaacatccctggactgaaaagcaagcacgcacctctgacccctaaagaagaggagtacctgcaggcccaggtgcggagcagaagcaagctggacgcccctaaggtggatctgctggtgaagaattgcctcctgcccctgagagagtacttcaagtatttcagccagaatagtctgcccctgggcggcccaagcagcggcgcccctcctcccagcggcggcagcccagccggctccccaacctctaccgaggagggcacctctgagtccgccacccccgagagcggccctggcacctccaccgagcccagcgagggcagcgcacccggcagccctgccggcagccccacctccacagaggagggaaccagcaccgagcccagcgaaggcagcgccccaggcaccagcaccgagcctagtgagggcggctctggcggcggcagcgcccaggagattaaacggatcaacaagatcagaagaagacttgtgaaagacagcaacaccaagaaggccggcaagacaggccccatgaaaaccctgctggttagagtgatgacacccgatctgagagagcggctggaaaacctgagaaagaagcctgaaaatatcccccagcccatcagcaatacatctagagccaacctgaataagctgctgaccgattacaccgaaatgaagaaggcgatcctgcatgtgtactgggaagagttccagaaggaccctgtgggcctgatgagccgggtggcccagcctgccagcaagaagatcgatcagaacaagctgaaacctgagatggacgagaagggcaacctgaccaccgccggctttgcctgctctcagtgtggccagcccctgttcgtgtacaagctggagcaggtgtctgagaagggcaaggcttacaccaactacttcggacggtgcaatgtggccgagcacgaaaagctgatcctgctggcccagctgaagcccgagaaggatagcgacgaagccgtgacatatagcctgggaaagtttgggcagagggccctggatttctacagcattcatgtgaccaaggagtccacccaccccgtgaagcccctggcccagatcgccggaaacagatacgcctccggacctgtgggaaaggccctgagcgacgcatgtatgggcacaatcgcctccttcctgtctaagtaccaggacatcatcatcgaacaccagaaggtggtgaagggcaaccagaagagactggagagcctgcgggagctggccggcaaggaaaacctggaataccctagcgtgaccctgccacctcagcctcacaccaaggagggcgttgatgcctacaacgaagtgatcgcccgggtgcgaatgtgggtgaacctgaacctgtggcagaagctgaagctaagcagagatgatgccaagcctctgctgagactgaagggattcccttcctttcctctggtcgagagacaggccaacgaagtggactggtgggacatggtgtgtaacgtgaagaagctgatcaacgagaaaaaggaggatggcaaggtgttttggcagaatctggctggctacaagagacaggaagccctgagaccatacctgagcagcgaggaagatcggaagaagggaaagaaattcgctcggtaccagctgggcgacctgctgctgcacctggaaaagaagcacggcgaggactggggaaaggtgtacgacgaggcctgggagcggattgacaagaaagtggaaggcctgagcaagcacatcaagctggaagaggaacggagaagcgaggacgcccagagcaaggccgccctgaccgactggctgcgggctaaggccagcttcgtgatcgagggcctgaaggaggccgacaaggacgagttctgcagatgcgagctgaagctgcagaagtggtacggggacctgcggggaaagcccttcgccatcgaagccgagaacagcatcctggacatcagcggcttcagcaagcagtacaactgtgccttcatctggcagaaggacggcgtgaagaagctgaacctgtacctgatcatcaactacttcaagggcggcaagctgcggttcaagaagatcaaacctgaagccttcgaagccaacagattctacaccgtgatcaacaaaaagagcggcgagatcgtgcccatggaggtgaacttcaacttcgacgaccccaacctgatcatcctgcctctggcctttggcaagagacagggcagagaattcatctggaacgacctgctgtccctggaaaccggcagcctgaagctggccaacggaagagtgatcgagaagacactgtacaacagaagaacccggcaggatgagcctgccctgttcgtggccctgaccttcgagcggcgggaggtcctggactcctccaatatcaaaccaatgaacctgatcggcgtggcaagaggcgaaaacatccccgccgtgatcgccctgaccgaccccgagggctgcccactgagccggtttaaggatagcctgggaaacccaacccacatcctgagaatcggcgagagctataaggagaagcagcggaccatccaggccaagaaggaggtggagcagcggagagccggcggctacagccggaagtacgccagcaaagccaagaatctggcagacgatatggtgagaaacaccgctagagatctgctgtactacgccgtgacccaggatgccatgctgatcttcgccaacctgagccggggcttcggccggcagggcaagcggaccttcatggccgagagacagtacacacggatggaggactggctgaccgccaagctggcctacgagggcctgagcaagacctacctgtccaagacactggcccagtacacctccaagacatgcagcaactgtgggtttaccatcaccagcgccgactacgacagggtgctggagaagctgaagaagacagcaacaggctggatgaccacaattaacggcaaggagctgaaggtggagggccagattacctactacaacagatacaagagacagaacgtagtcaaggacctgtccgtcgagctggatagactgagcgaagaatctgtgaacaacgacatctcctcctggacaaagggcagaagcggagaagctctgagcctcctgaagaaaagattctcccatagacccgtgcaggagaagttcgtgtgcctgaactgcggcttcgagacacacgcagccgagcaagccgccctgaacatcgccagatcctggctgttcctgcggagccaggagtacaagaaataccagacaaacaagacaaccggcaacaccgataagagagccttcgtcgagacctggcagtccttttaccggaagaagcttaaggaggtgtggaaacctgccgtgcggtctggcggatctggcggaggctccacaagcctgcagggccagctgaccttcagggacgtggccatcgagttcagcgaggaggagtggaggtgcctgacccacacccagaggcagctgtacagggacatgatgctggagaactacaggcacctgctgttcctgggcctgatcgtgagcaagcccgacctggtgagcttcctggagcagaagaaggacccctgggacgtgaagaggaagaagaccgtggtgttcgaccccggcaggtgggagtggaccagccccaagaaaaagagaaaagtctaagctgccttctgcggggcttgccttctggccatgcccttcttctctcccttgcacctgtacctcttggtctttgaataaagcctgagtaggaaggctagcaaaaaaaaaaaaaaaaaaaaaaaaaaaaaaaaaaaaaaaaaaaaaaaaaaaaaaaaaaaaaaaaaaaaaaaaaaaaaaaa

SEQ ID NO: 6866 - RNA, 5797 nt, synthetic construct
  source 1..5797: mol_type = other RNA
aggaaataagagagaaaagaagagtaagaagaaatataagagccaccatggcccctaagaagaagcgtaaagtgagccggatggaacgcctcgtctacgaggtgcggcagaagtgcagaaacatcgaggacatctgcatctcctgcggatctctgaacgtgaccctggagcacccactgttcatcggcggcatgtgccagaactgtaaaaactgttttctggagtgtgcctatcaatacgacgatgacggctaccagagctactgcaccatctgttgcggcggaagagaggtgctgatgtgtggaaataacaactgctgccggtgcttctgcgtggaatgcgtggacctgctggtgggccccggcgccgcccaggccgctattaaggaagatccttggaactgctacatgtgcggccacaagggcacatacggcctgctgagacggagagaggactggcctagcagactgcagatgttcttcgccaataaccacgaccaggagttcgacccccctaaggtgtaccctcccgtccccgccgagaagagaaagcccatccgggtcctgagcctgttcgatggcatcgccaccggtctgctggtgctgaaggacctgggcatccaggtggataggtacattgcctccgaggtgtgcgaggactccatcaccgtgggaatggtgcgtcatcagggcaagatcatgtacgtgggcgacgtgcggagcgtgacacagaagcatatccaggagtggggccctttcgacctggtgatcggcggcagcccttgcaatgacctgagcatcgtgaacccagcccggaagggcctgtacgagggaaccggcagactgttcttcgagttttacagactgctgcacgacgcccggcctaaggaaggcgacgaccggcccttcttttggctgttcgagaatgtggtggccatgggagtcagcgacaagcgggatattagccggttcctggagagcaaccccgtgatgatcgatgccaaggaagtgagcgccgcccaccgggccagatacttctggggcaatctgcctggcatgaacagacccctggccagcaccgtgaacgacaagctggagctgcaggagtgcctggagcacggccggatcgccaagttcagcaaggtgagaaccatcaccacccgaagcaacagcatcaaacaaggcaaggaccagcactttcctgtgttcatgaacgagaaggaggacatcctgtggtgtaccgagatggagagagtgttcgggttcccagtccactacacagatgtcagcaacatgtctagactggccagacagagactgctgggaagaagctggtccgtccctgtgatcagacacctgttcgcccctctgaaggagtacttcgcctgcgtgagcagcggcaacagcaacgccaacagccggggccccagcttctctagcggcctggtgccactgtccctgagagggagccacatgggccccatggagatctacaaaaccgtgagcgcctggaagcggcagcctgtgcgcgtgctgagcctgtttcggaatatcgataaagtcctgaaaagcctgggattcctggagagcggctctggctccggcggtggcaccctgaagtacgtggaggatgtgacaaacgtggtcagacgggatgtggagaagtggggccccttcgatctggtgtacggcagcacccaacccctgggcagctcttgtgaccggtgccctggctggtacatgtttcagttccaccggatcctgcagtacgccctgccgagacaggagtcccagcggccattcttttggattttcatggacaacttgctgctgaccgaggatgaccaggaaactaccactcggttcctgcagaccgaagccgtgaccctgcaggacgtgagaggccgggactaccagaacgccatgcgggtgtggtccaacatccctggactgaaaagcaagcacgcacctctgacccctaaagaagaggagtacctgcaggcccaggtgcggagcagaagcaagctggacgcccctaaggtggatctgctggtgaagaattgcctcctgcccctgagagagtacttcaagtatttcagccagaatagtctgcccctgggcggcccaagcagcggcgcccctcctcccagcggcggcagcccagccggctccccaacctctaccgaggagggcacctctgagtccgccacccccgagagcggccctggcacctccaccgagcccagcgagggcagcgcacccggcagccctgccggcagccccacctccacagaggagggaaccagcaccgagcccagcgaaggcagcgccccaggcaccagcaccgagcctagtgagggcggctctggcggcggcagcgcccaggagattaaacggatcaacaagatcagaagaagacttgtgaaagacagcaacaccaagaaggccggcaagacaggccccatgaaaaccctgctggttagagtgatgacacccgatctgagagagcggctggaaaacctgagaaagaagcctgaaaatatcccccagcccatcagcaatacatctagagccaacctgaataagctgctgaccgattacaccgaaatgaagaaggcgatcctgcatgtgtactgggaagagttccagaaggaccctgtgggcctgatgagccgggtggcccagcctgccagcaagaagatcgatcagaacaagctgaaacctgagatggacgagaagggcaacctgaccaccgccggctttgcctgctctcagtgtggccagcccctgttcgtgtacaagctggagcaggtgtctgagaagggcaaggcttacaccaactacttcggacggtgcaatgtggccgagcacgaaaagctgatcctgctggcccagctgaagcccgagaaggatagcgacgaagccgtgacatatagcctgggaaagtttgggcagagggccctggatttctacagcattcatgtgaccaaggagtccacccaccccgtgaagcccctggcccagatcgccggaaacagatacgcctccggacctgtgggaaaggccctgagcgacgcatgtatgggcacaatcgcctccttcctgtctaagtaccaggacatcatcatcgaacaccagaaggtggtgaagggcaaccagaagagactggagagcctgcgggagctggccggcaaggaaaacctggaataccctagcgtgaccctgccacctcagcctcacaccaaggagggcgttgatgcctacaacgaagtgatcgcccgggtgcgaatgtgggtgaacctgaacctgtggcagaagctgaagctaagcagagatgatgccaagcctctgctgagactgaagggattcccttcctttcctctggtcgagagacaggccaacgaagtggactggtgggacatggtgtgtaacgtgaagaagctgatcaacgagaaaaaggaggatggcaaggtgttttggcagaatctggctggctacaagagacaggaagccctgagaccatacctgagcagcgaggaagatcggaagaagggaaagaaattcgctcggtaccagctgggcgacctgctgctgcacctggaaaagaagcacggcgaggactggggaaaggtgtacgacgaggcctgggagcggattgacaagaaagtggaaggcctgagcaagcacatcaagctggaagaggaacggagaagcgaggacgcccagagcaaggccgccctgaccgactggctgcgggctaaggccagcttcgtgatcgagggcctgaaggaggccgacaaggacgagttctgcagatgcgagctgaagctgcagaagtggtacggggacctgcggggaaagcccttcgccatcgaagccgagaacagcatcctggacatcagcggcttcagcaagcagtacaactgtgccttcatctggcagaaggacggcgtgaagaagctgaacctgtacctgatcatcaactacttcaagggcggcaagctgcggttcaagaagatcaaacctgaagccttcgaagccaacagattctacaccgtgatcaacaaaaagagcggcgagatcgtgcccatggaggtgaacttcaacttcgacgaccccaacctgatcatcctgcctctggcctttggcaagagacagggcagagaattcatctggaacgacctgctgtccctggaaaccggcagcctgaagctggccaacggaagagtgatcgagaagacactgtacaacagaagaacccggcaggatgagcctgccctgttcgtggccctgaccttcgagcggcgggaggtcctggactcctccaatatcaaaccaatgaacctgatcggcgtggcaagaggcgaaaacatccccgccgtgatcgccctgaccgaccccgagggctgcccactgagccggtttaaggatagcctgggaaacccaacccacatcctgagaatcggcgagagctataaggagaagcagcggaccatccaggccaagaaggaggtggagcagcggagagccggcggctacagccggaagtacgccagcaaagccaagaatctggcagacgatatggtgagaaacaccgctagagatctgctgtactacgccgtgacccaggatgccatgctgatcttcgccaacctgagccggggcttcggccggcagggcaagcggaccttcatggccgagagacagtacacacggatggaggactggctgaccgccaagctggcctacgagggcctgagcaagacctacctgtccaagacactggcccagtacacctccaagacatgcagcaactgtgggtttaccatcaccagcgccgactacgacagggtgctggagaagctgaagaagacagcaacaggctggatgaccacaattaacggcaaggagctgaaggtggagggccagattacctactacaacagatacaagagacagaacgtagtcaaggacctgtccgtcgagctggatagactgagcgaagaatctgtgaacaacgacatctcctcctggacaaagggcagaagcggagaagctctgagcctcctgaagaaaagattctcccatagacccgtgcaggagaagttcgtgtgcctgaactgcggcttcgagacacacgcagccgagcaagccgccctgaacatcgccagatcctggctgttcctgcggagccaggagtacaagaaataccagacaaacaagacaaccggcaacaccgataagagagccttcgtcgagacctggcagtccttttaccggaagaagcttaaggaggtgtggaaacctgccgtgcggtctggcggatctggcggaggctccacaagcagccaggagcccgtgaccttcgccgacgtggccgtggtgttcacccccgaggagtgggtgttcctggacagcacccagaggagcctgtacagggacgtgatgctggagaactacaggaacctggccagcgtggccgaccagctgtgcaagcccaacgccagcagctacctggagcagaggggcgagcagtggaccaccgacaggggcatcctggccgacacctgcgccgagccccagctgcagaccagccccaagaaaaagagaaaagtctaagctgccttctgcggggcttgccttctggccatgcccttcttctctcccttgcacctgtacctcttggtctttgaataaagcctgagtaggaaggctagcaaaaaaaaaaaaaaaaaaaaaaaaaaaaaaaaaaaaaaaaaaaaaaaaaaaaaaaaaaaaaaaaaaaaaaaaaaaaaaaa

SEQ ID NO: 6867 - RNA, 5797 nt, synthetic construct
  source 1..5797: mol_type = other RNA
aggaaataagagagaaaagaagagtaagaagaaatataagagccaccatggcccctaagaagaagcgtaaagtgagccggatggaacgcctcgtctacgaggtgcggcagaagtgcagaaacatcgaggacatctgcatctcctgcggatctctgaacgtgaccctggagcacccactgttcatcggcggcatgtgccagaactgtaaaaactgttttctggagtgtgcctatcaatacgacgatgacggctaccagagctactgcaccatctgttgcggcggaagagaggtgctgatgtgtggaaataacaactgctgccggtgcttctgcgtggaatgcgtggacctgctggtgggccccggcgccgcccaggccgctattaaggaagatccttggaactgctacatgtgcggccacaagggcacatacggcctgctgagacggagagaggactggcctagcagactgcagatgttcttcgccaataaccacgaccaggagttcgacccccctaaggtgtaccctcccgtccccgccgagaagagaaagcccatccgggtcctgagcctgttcgatggcatcgccaccggtctgctggtgctgaaggacctgggcatccaggtggataggtacattgcctccgaggtgtgcgaggactccatcaccgtgggaatggtgcgtcatcagggcaagatcatgtacgtgggcgacgtgcggagcgtgacacagaagcatatccaggagtggggccctttcgacctggtgatcggcggcagcccttgcaatgacctgagcatcgtgaacccagcccggaagggcctgtacgagggaaccggcagactgttcttcgagttttacagactgctgcacgacgcccggcctaaggaaggcgacgaccggcccttcttttggctgttcgagaatgtggtggccatgggagtcagcgacaagcgggatattagccggttcctggagagcaaccccgtgatgatcgatgccaaggaagtgagcgccgcccaccgggccagatacttctggggcaatctgcctggcatgaacagacccctggccagcaccgtgaacgacaagctggagctgcaggagtgcctggagcacggccggatcgccaagttcagcaaggtgagaaccatcaccacccgaagcaacagcatcaaacaaggcaaggaccagcactttcctgtgttcatgaacgagaaggaggacatcctgtggtgtaccgagatggagagagtgttcgggttcccagtccactacacagatgtcagcaacatgtctagactggccagacagagactgctgggaagaagctggtccgtccctgtgatcagacacctgttcgcccctctgaaggagtacttcgcctgcgtgagcagcggcaacagcaacgccaacagccggggccccagcttctctagcggcctggtgccactgtccctgagagggagccacatgggccccatggagatctacaaaaccgtgagcgcctggaagcggcagcctgtgcgcgtgctgagcctgtttcggaatatcgataaagtcctgaaaagcctgggattcctggagagcggctctggctccggcggtggcaccctgaagtacgtggaggatgtgacaaacgtggtcagacgggatgtggagaagtggggccccttcgatctggtgtacggcagcacccaacccctgggcagctcttgtgaccggtgccctggctggtacatgtttcagttccaccggatcctgcagtacgccctgccgagacaggagtcccagcggccattcttttggattttcatggacaacttgctgctgaccgaggatgaccaggaaactaccactcggttcctgcagaccgaagccgtgaccctgcaggacgtgagaggccgggactaccagaacgccatgcgggtgtggtccaacatccctggactgaaaagcaagcacgcacctctgacccctaaagaagaggagtacctgcaggcccaggtgcggagcagaagcaagctggacgcccctaaggtggatctgctggtgaagaattgcctcctgcccctgagagagtacttcaagtatttcagccagaatagtctgcccctgggcggcccaagcagcggcgcccctcctcccagcggcggcagcccagccggctccccaacctctaccgaggagggcacctctgagtccgccacccccgagagcggccctggcacctccaccgagcccagcgagggcagcgcacccggcagccctgccggcagccccacctccacagaggagggaaccagcaccgagcccagcgaaggcagcgccccaggcaccagcaccgagcctagtgagggcggctctggcggcggcagcgcccaggagattaaacggatcaacaagatcagaagaagacttgtgaaagacagcaacaccaagaaggccggcaagacaggccccatgaaaaccctgctggttagagtgatgacacccgatctgagagagcggctggaaaacctgagaaagaagcctgaaaatatcccccagcccatcagcaatacatctagagccaacctgaataagctgctgaccgattacaccgaaatgaagaaggcgatcctgcatgtgtactgggaagagttccagaaggaccctgtgggcctgatgagccgggtggcccagcctgccagcaagaagatcgatcagaacaagctgaaacctgagatggacgagaagggcaacctgaccaccgccggctttgcctgctctcagtgtggccagcccctgttcgtgtacaagctggagcaggtgtctgagaagggcaaggcttacaccaactacttcggacggtgcaatgtggccgagcacgaaaagctgatcctgctggcccagctgaagcccgagaaggatagcgacgaagccgtgacatatagcctgggaaagtttgggcagagggccctggatttctacagcattcatgtgaccaaggagtccacccaccccgtgaagcccctggcccagatcgccggaaacagatacgcctccggacctgtgggaaaggccctgagcgacgcatgtatgggcacaatcgcctccttcctgtctaagtaccaggacatcatcatcgaacaccagaaggtggtgaagggcaaccagaagagactggagagcctgcgggagctggccggcaaggaaaacctggaataccctagcgtgaccctgccacctcagcctcacaccaaggagggcgttgatgcctacaacgaagtgatcgcccgggtgcgaatgtgggtgaacctgaacctgtggcagaagctgaagctaagcagagatgatgccaagcctctgctgagactgaagggattcccttcctttcctctggtcgagagacaggccaacgaagtggactggtgggacatggtgtgtaacgtgaagaagctgatcaacgagaaaaaggaggatggcaaggtgttttggcagaatctggctggctacaagagacaggaagccctgagaccatacctgagcagcgaggaagatcggaagaagggaaagaaattcgctcggtaccagctgggcgacctgctgctgcacctggaaaagaagcacggcgaggactggggaaaggtgtacgacgaggcctgggagcggattgacaagaaagtggaaggcctgagcaagcacatcaagctggaagaggaacggagaagcgaggacgcccagagcaaggccgccctgaccgactggctgcgggctaaggccagcttcgtgatcgagggcctgaaggaggccgacaaggacgagttctgcagatgcgagctgaagctgcagaagtggtacggggacctgcggggaaagcccttcgccatcgaagccgagaacagcatcctggacatcagcggcttcagcaagcagtacaactgtgccttcatctggcagaaggacggcgtgaagaagctgaacctgtacctgatcatcaactacttcaagggcggcaagctgcggttcaagaagatcaaacctgaagccttcgaagccaacagattctacaccgtgatcaacaaaaagagcggcgagatcgtgcccatggaggtgaacttcaacttcgacgaccccaacctgatcatcctgcctctggcctttggcaagagacagggcagagaattcatctggaacgacctgctgtccctggaaaccggcagcctgaagctggccaacggaagagtgatcgagaagacactgtacaacagaagaacccggcaggatgagcctgccctgttcgtggccctgaccttcgagcggcgggaggtcctggactcctccaatatcaaaccaatgaacctgatcggcgtggcaagaggcgaaaacatccccgccgtgatcgccctgaccgaccccgagggctgcccactgagccggtttaaggatagcctgggaaacccaacccacatcctgagaatcggcgagagctataaggagaagcagcggaccatccaggccaagaaggaggtggagcagcggagagccggcggctacagccggaagtacgccagcaaagccaagaatctggcagacgatatggtgagaaacaccgctagagatctgctgtactacgccgtgacccaggatgccatgctgatcttcgccaacctgagccggggcttcggccggcagggcaagcggaccttcatggccgagagacagtacacacggatggaggactggctgaccgccaagctggcctacgagggcctgagcaagacctacctgtccaagacactggcccagtacacctccaagacatgcagcaactgtgggtttaccatcaccagcgccgactacgacagggtgctggagaagctgaagaagacagcaacaggctggatgaccacaattaacggcaaggagctgaaggtggagggccagattacctactacaacagatacaagagacagaacgtagtcaaggacctgtccgtcgagctggatagactgagcgaagaatctgtgaacaacgacatctcctcctggacaaagggcagaagcggagaagctctgagcctcctgaagaaaagattctcccatagacccgtgcaggagaagttcgtgtgcctgaactgcggcttcgagacacacgcagccgagcaagccgccctgaacatcgccagatcctggctgttcctgcggagccaggagtacaagaaataccagacaaacaagacaaccggcaacaccgataagagagccttcgtcgagacctggcagtccttttaccggaagaagcttaaggaggtgtggaaacctgccgtgcggtctggcggatctggcggaggctccacaagcgacgtggtgacctacgaggacgtgcacgtgaacttcacccaggaggagtgggccctgctggaccccagccagaagaggctgtacaaggtggtgatgctggagacctacaagaacctgagcgccatcggctacatctgggaggaccacaccatcgagcagcacttccagagcagcaggagccacggcaggcacaagaggcacaggaccggcgagcagcccagcgagctgatccagcacggcaagaccagccccaagaaaaagagaaaagtctaagctgccttctgcggggcttgccttctggccatgcccttcttctctcccttgcacctgtacctcttggtctttgaataaagcctgagtaggaaggctagcaaaaaaaaaaaaaaaaaaaaaaaaaaaaaaaaaaaaaaaaaaaaaaaaaaaaaaaaaaaaaaaaaaaaaaaaaaaaaaaa

SEQ ID NO: 6868 - RNA, 5797 nt, synthetic construct
  source 1..5797: mol_type = other RNA
aggaaataagagagaaaagaagagtaagaagaaatataagagccaccatggcccctaagaagaagcgtaaagtgagccggatggaacgcctcgtctacgaggtgcggcagaagtgcagaaacatcgaggacatctgcatctcctgcggatctctgaacgtgaccctggagcacccactgttcatcggcggcatgtgccagaactgtaaaaactgttttctggagtgtgcctatcaatacgacgatgacggctaccagagctactgcaccatctgttgcggcggaagagaggtgctgatgtgtggaaataacaactgctgccggtgcttctgcgtggaatgcgtggacctgctggtgggccccggcgccgcccaggccgctattaaggaagatccttggaactgctacatgtgcggccacaagggcacatacggcctgctgagacggagagaggactggcctagcagactgcagatgttcttcgccaataaccacgaccaggagttcgacccccctaaggtgtaccctcccgtccccgccgagaagagaaagcccatccgggtcctgagcctgttcgatggcatcgccaccggtctgctggtgctgaaggacctgggcatccaggtggataggtacattgcctccgaggtgtgcgaggactccatcaccgtgggaatggtgcgtcatcagggcaagatcatgtacgtgggcgacgtgcggagcgtgacacagaagcatatccaggagtggggccctttcgacctggtgatcggcggcagcccttgcaatgacctgagcatcgtgaacccagcccggaagggcctgtacgagggaaccggcagactgttcttcgagttttacagactgctgcacgacgcccggcctaaggaaggcgacgaccggcccttcttttggctgttcgagaatgtggtggccatgggagtcagcgacaagcgggatattagccggttcctggagagcaaccccgtgatgatcgatgccaaggaagtgagcgccgcccaccgggccagatacttctggggcaatctgcctggcatgaacagacccctggccagcaccgtgaacgacaagctggagctgcaggagtgcctggagcacggccggatcgccaagttcagcaaggtgagaaccatcaccacccgaagcaacagcatcaaacaaggcaaggaccagcactttcctgtgttcatgaacgagaaggaggacatcctgtggtgtaccgagatggagagagtgttcgggttcccagtccactacacagatgtcagcaacatgtctagactggccagacagagactgctgggaagaagctggtccgtccctgtgatcagacacctgttcgcccctctgaaggagtacttcgcctgcgtgagcagcggcaacagcaacgccaacagccggggccccagcttctctagcggcctggtgccactgtccctgagagggagccacatgggccccatggagatctacaaaaccgtgagcgcctggaagcggcagcctgtgcgcgtgctgagcctgtttcggaatatcgataaagtcctgaaaagcctgggattcctggagagcggctctggctccggcggtggcaccctgaagtacgtggaggatgtgacaaacgtggtcagacgggatgtggagaagtggggccccttcgatctggtgtacggcagcacccaacccctgggcagctcttgtgaccggtgccctggctggtacatgtttcagttccaccggatcctgcagtacgccctgccgagacaggagtcccagcggccattcttttggattttcatggacaacttgctgctgaccgaggatgaccaggaaactaccactcggttcctgcagaccgaagccgtgaccctgcaggacgtgagaggccgggactaccagaacgccatgcgggtgtggtccaacatccctggactgaaaagcaagcacgcacctctgacccctaaagaagaggagtacctgcaggcccaggtgcggagcagaagcaagctggacgcccctaaggtggatctgctggtgaagaattgcctcctgcccctgagagagtacttcaagtatttcagccagaatagtctgcccctgggcggcccaagcagcggcgcccctcctcccagcggcggcagcccagccggctccccaacctctaccgaggagggcacctctgagtccgccacccccgagagcggccctggcacctccaccgagcccagcgagggcagcgcacccggcagccctgccggcagccccacctccacagaggagggaaccagcaccgagcccagcgaaggcagcgccccaggcaccagcaccgagcctagtgagggcggctctggcggcggcagcgcccaggagattaaacggatcaacaagatcagaagaagacttgtgaaagacagcaacaccaagaaggccggcaagacaggccccatgaaaaccctgctggttagagtgatgacacccgatctgagagagcggctggaaaacctgagaaagaagcctgaaaatatcccccagcccatcagcaatacatctagagccaacctgaataagctgctgaccgattacaccgaaatgaagaaggcgatcctgcatgtgtactgggaagagttccagaaggaccctgtgggcctgatgagccgggtggcccagcctgccagcaagaagatcgatcagaacaagctgaaacctgagatggacgagaagggcaacctgaccaccgccggctttgcctgctctcagtgtggccagcccctgttcgtgtacaagctggagcaggtgtctgagaagggcaaggcttacaccaactacttcggacggtgcaatgtggccgagcacgaaaagctgatcctgctggcccagctgaagcccgagaaggatagcgacgaagccgtgacatatagcctgggaaagtttgggcagagggccctggatttctacagcattcatgtgaccaaggagtccacccaccccgtgaagcccctggcccagatcgccggaaacagatacgcctccggacctgtgggaaaggccctgagcgacgcatgtatgggcacaatcgcctccttcctgtctaagtaccaggacatcatcatcgaacaccagaaggtggtgaagggcaaccagaagagactggagagcctgcgggagctggccggcaaggaaaacctggaataccctagcgtgaccctgccacctcagcctcacaccaaggagggcgttgatgcctacaacgaagtgatcgcccgggtgcgaatgtgggtgaacctgaacctgtggcagaagctgaagctaagcagagatgatgccaagcctctgctgagactgaagggattcccttcctttcctctggtcgagagacaggccaacgaagtggactggtgggacatggtgtgtaacgtgaagaagctgatcaacgagaaaaaggaggatggcaaggtgttttggcagaatctggctggctacaagagacaggaagccctgagaccatacctgagcagcgaggaagatcggaagaagggaaagaaattcgctcggtaccagctgggcgacctgctgctgcacctggaaaagaagcacggcgaggactggggaaaggtgtacgacgaggcctgggagcggattgacaagaaagtggaaggcctgagcaagcacatcaagctggaagaggaacggagaagcgaggacgcccagagcaaggccgccctgaccgactggctgcgggctaaggccagcttcgtgatcgagggcctgaaggaggccgacaaggacgagttctgcagatgcgagctgaagctgcagaagtggtacggggacctgcggggaaagcccttcgccatcgaagccgagaacagcatcctggacatcagcggcttcagcaagcagtacaactgtgccttcatctggcagaaggacggcgtgaagaagctgaacctgtacctgatcatcaactacttcaagggcggcaagctgcggttcaagaagatcaaacctgaagccttcgaagccaacagattctacaccgtgatcaacaaaaagagcggcgagatcgtgcccatggaggtgaacttcaacttcgacgaccccaacctgatcatcctgcctctggcctttggcaagagacagggcagagaattcatctggaacgacctgctgtccctggaaaccggcagcctgaagctggccaacggaagagtgatcgagaagacactgtacaacagaagaacccggcaggatgagcctgccctgttcgtggccctgaccttcgagcggcgggaggtcctggactcctccaatatcaaaccaatgaacctgatcggcgtggcaagaggcgaaaacatccccgccgtgatcgccctgaccgaccccgagggctgcccactgagccggtttaaggatagcctgggaaacccaacccacatcctgagaatcggcgagagctataaggagaagcagcggaccatccaggccaagaaggaggtggagcagcggagagccggcggctacagccggaagtacgccagcaaagccaagaatctggcagacgatatggtgagaaacaccgctagagatctgctgtactacgccgtgacccaggatgccatgctgatcttcgccaacctgagccggggcttcggccggcagggcaagcggaccttcatggccgagagacagtacacacggatggaggactggctgaccgccaagctggcctacgagggcctgagcaagacctacctgtccaagacactggcccagtacacctccaagacatgcagcaactgtgggtttaccatcaccagcgccgactacgacagggtgctggagaagctgaagaagacagcaacaggctggatgaccacaattaacggcaaggagctgaaggtggagggccagattacctactacaacagatacaagagacagaacgtagtcaaggacctgtccgtcgagctggatagactgagcgaagaatctgtgaacaacgacatctcctcctggacaaagggcagaagcggagaagctctgagcctcctgaagaaaagattctcccatagacccgtgcaggagaagttcgtgtgcctgaactgcggcttcgagacacacgcagccgagcaagccgccctgaacatcgccagatcctggctgttcctgcggagccaggagtacaagaaataccagacaaacaagacaaccggcaacaccgataagagagccttcgtcgagacctggcagtccttttaccggaagaagcttaaggaggtgtggaaacctgccgtgcggtctggcggatctggcggaggctccacaagcatggacgccgtgacctacgaggacgtgcacgtgaacttcagcagggaggagtgggtgctgctggaccccagccagaagagcctgtacaaggacgtgatgctggagacctactggaacctgacctgcatcggctacaagtggaaggaccacgacaacgaggagtactgccagaacagcggcaggcacggcaggtgcatcaactgccccagcgcctacggcaagaagcagtgcaccaacctgttcaccagccccaagaaaaagagaaaagtctaagctgccttctgcggggcttgccttctggccatgcccttcttctctcccttgcacctgtacctcttggtctttgaataaagcctgagtaggaaggctagcaaaaaaaaaaaaaaaaaaaaaaaaaaaaaaaaaaaaaaaaaaaaaaaaaaaaaaaaaaaaaaaaaaaaaaaaaaaaaaaa

SEQ ID NO: 6869 - RNA, 5797 nt, synthetic construct
  source 1..5797: mol_type = other RNA
aggaaataagagagaaaagaagagtaagaagaaatataagagccaccatggcccctaagaagaagcgtaaagtgagccggatggaacgcctcgtctacgaggtgcggcagaagtgcagaaacatcgaggacatctgcatctcctgcggatctctgaacgtgaccctggagcacccactgttcatcggcggcatgtgccagaactgtaaaaactgttttctggagtgtgcctatcaatacgacgatgacggctaccagagctactgcaccatctgttgcggcggaagagaggtgctgatgtgtggaaataacaactgctgccggtgcttctgcgtggaatgcgtggacctgctggtgggccccggcgccgcccaggccgctattaaggaagatccttggaactgctacatgtgcggccacaagggcacatacggcctgctgagacggagagaggactggcctagcagactgcagatgttcttcgccaataaccacgaccaggagttcgacccccctaaggtgtaccctcccgtccccgccgagaagagaaagcccatccgggtcctgagcctgttcgatggcatcgccaccggtctgctggtgctgaaggacctgggcatccaggtggataggtacattgcctccgaggtgtgcgaggactccatcaccgtgggaatggtgcgtcatcagggcaagatcatgtacgtgggcgacgtgcggagcgtgacacagaagcatatccaggagtggggccctttcgacctggtgatcggcggcagcccttgcaatgacctgagcatcgtgaacccagcccggaagggcctgtacgagggaaccggcagactgttcttcgagttttacagactgctgcacgacgcccggcctaaggaaggcgacgaccggcccttcttttggctgttcgagaatgtggtggccatgggagtcagcgacaagcgggatattagccggttcctggagagcaaccccgtgatgatcgatgccaaggaagtgagcgccgcccaccgggccagatacttctggggcaatctgcctggcatgaacagacccctggccagcaccgtgaacgacaagctggagctgcaggagtgcctggagcacggccggatcgccaagttcagcaaggtgagaaccatcaccacccgaagcaacagcatcaaacaaggcaaggaccagcactttcctgtgttcatgaacgagaaggaggacatcctgtggtgtaccgagatggagagagtgttcgggttcccagtccactacacagatgtcagcaacatgtctagactggccagacagagactgctgggaagaagctggtccgtccctgtgatcagacacctgttcgcccctctgaaggagtacttcgcctgcgtgagcagcggcaacagcaacgccaacagccggggccccagcttctctagcggcctggtgccactgtccctgagagggagccacatgggccccatggagatctacaaaaccgtgagcgcctggaagcggcagcctgtgcgcgtgctgagcctgtttcggaatatcgataaagtcctgaaaagcctgggattcctggagagcggctctggctccggcggtggcaccctgaagtacgtggaggatgtgacaaacgtggtcagacgggatgtggagaagtggggccccttcgatctggtgtacggcagcacccaacccctgggcagctcttgtgaccggtgccctggctggtacatgtttcagttccaccggatcctgcagtacgccctgccgagacaggagtcccagcggccattcttttggattttcatggacaacttgctgctgaccgaggatgaccaggaaactaccactcggttcctgcagaccgaagccgtgaccctgcaggacgtgagaggccgggactaccagaacgccatgcgggtgtggtccaacatccctggactgaaaagcaagcacgcacctctgacccctaaagaagaggagtacctgcaggcccaggtgcggagcagaagcaagctggacgcccctaaggtggatctgctggtgaagaattgcctcctgcccctgagagagtacttcaagtatttcagccagaatagtctgcccctgggcggcccaagcagcggcgcccctcctcccagcggcggcagcccagccggctccccaacctctaccgaggagggcacctctgagtccgccacccccgagagcggccctggcacctccaccgagcccagcgagggcagcgcacccggcagccctgccggcagccccacctccacagaggagggaaccagcaccgagcccagcgaaggcagcgccccaggcaccagcaccgagcctagtgagggcggctctggcggcggcagcgcccaggagattaaacggatcaacaagatcagaagaagacttgtgaaagacagcaacaccaagaaggccggcaagacaggccccatgaaaaccctgctggttagagtgatgacacccgatctgagagagcggctggaaaacctgagaaagaagcctgaaaatatcccccagcccatcagcaatacatctagagccaacctgaataagctgctgaccgattacaccgaaatgaagaaggcgatcctgcatgtgtactgggaagagttccagaaggaccctgtgggcctgatgagccgggtggcccagcctgccagcaagaagatcgatcagaacaagctgaaacctgagatggacgagaagggcaacctgaccaccgccggctttgcctgctctcagtgtggccagcccctgttcgtgtacaagctggagcaggtgtctgagaagggcaaggcttacaccaactacttcggacggtgcaatgtggccgagcacgaaaagctgatcctgctggcccagctgaagcccgagaaggatagcgacgaagccgtgacatatagcctgggaaagtttgggcagagggccctggatttctacagcattcatgtgaccaaggagtccacccaccccgtgaagcccctggcccagatcgccggaaacagatacgcctccggacctgtgggaaaggccctgagcgacgcatgtatgggcacaatcgcctccttcctgtctaagtaccaggacatcatcatcgaacaccagaaggtggtgaagggcaaccagaagagactggagagcctgcgggagctggccggcaaggaaaacctggaataccctagcgtgaccctgccacctcagcctcacaccaaggagggcgttgatgcctacaacgaagtgatcgcccgggtgcgaatgtgggtgaacctgaacctgtggcagaagctgaagctaagcagagatgatgccaagcctctgctgagactgaagggattcccttcctttcctctggtcgagagacaggccaacgaagtggactggtgggacatggtgtgtaacgtgaagaagctgatcaacgagaaaaaggaggatggcaaggtgttttggcagaatctggctggctacaagagacaggaagccctgagaccatacctgagcagcgaggaagatcggaagaagggaaagaaattcgctcggtaccagctgggcgacctgctgctgcacctggaaaagaagcacggcgaggactggggaaaggtgtacgacgaggcctgggagcggattgacaagaaagtggaaggcctgagcaagcacatcaagctggaagaggaacggagaagcgaggacgcccagagcaaggccgccctgaccgactggctgcgggctaaggccagcttcgtgatcgagggcctgaaggaggccgacaaggacgagttctgcagatgcgagctgaagctgcagaagtggtacggggacctgcggggaaagcccttcgccatcgaagccgagaacagcatcctggacatcagcggcttcagcaagcagtacaactgtgccttcatctggcagaaggacggcgtgaagaagctgaacctgtacctgatcatcaactacttcaagggcggcaagctgcggttcaagaagatcaaacctgaagccttcgaagccaacagattctacaccgtgatcaacaaaaagagcggcgagatcgtgcccatggaggtgaacttcaacttcgacgaccccaacctgatcatcctgcctctggcctttggcaagagacagggcagagaattcatctggaacgacctgctgtccctggaaaccggcagcctgaagctggccaacggaagagtgatcgagaagacactgtacaacagaagaacccggcaggatgagcctgccctgttcgtggccctgaccttcgagcggcgggaggtcctggactcctccaatatcaaaccaatgaacctgatcggcgtggcaagaggcgaaaacatccccgccgtgatcgccctgaccgaccccgagggctgcccactgagccggtttaaggatagcctgggaaacccaacccacatcctgagaatcggcgagagctataaggagaagcagcggaccatccaggccaagaaggaggtggagcagcggagagccggcggctacagccggaagtacgccagcaaagccaagaatctggcagacgatatggtgagaaacaccgctagagatctgctgtactacgccgtgacccaggatgccatgctgatcttcgccaacctgagccggggcttcggccggcagggcaagcggaccttcatggccgagagacagtacacacggatggaggactggctgaccgccaagctggcctacgagggcctgagcaagacctacctgtccaagacactggcccagtacacctccaagacatgcagcaactgtgggtttaccatcaccagcgccgactacgacagggtgctggagaagctgaagaagacagcaacaggctggatgaccacaattaacggcaaggagctgaaggtggagggccagattacctactacaacagatacaagagacagaacgtagtcaaggacctgtccgtcgagctggatagactgagcgaagaatctgtgaacaacgacatctcctcctggacaaagggcagaagcggagaagctctgagcctcctgaagaaaagattctcccatagacccgtgcaggagaagttcgtgtgcctgaactgcggcttcgagacacacgcagccgagcaagccgccctgaacatcgccagatcctggctgttcctgcggagccaggagtacaagaaataccagacaaacaagacaaccggcaacaccgataagagagccttcgtcgagacctggcagtccttttaccggaagaagcttaaggaggtgtggaaacctgccgtgcggtctggcggatctggcggaggctccacaagcggcagccagggcaacctgccccaggccgagatcaccctgatgaaccaggcccaggagagcgtgaccttcgaggacgtggccgtgaacttcaccaacagggagtggcagtgcctgacctacgcccagaggcacctgtacaaggacgtgatgctggagaactacggcaacatggtgagcctgggcttccccttccccaagccccccctgatcagccacctggagagggaggtggacccctgcgtgaccagccccaagaaaaagagaaaagtctaagctgccttctgcggggcttgccttctggccatgcccttcttctctcccttgcacctgtacctcttggtctttgaataaagcctgagtaggaaggctagcaaaaaaaaaaaaaaaaaaaaaaaaaaaaaaaaaaaaaaaaaaaaaaaaaaaaaaaaaaaaaaaaaaaaaaaaaaaaaaaa

SEQ ID NO: 6870 - RNA, 5797 nt, synthetic construct
  source 1..5797: mol_type = other RNA
aggaaataagagagaaaagaagagtaagaagaaatataagagccaccatggcccctaagaagaagcgtaaagtgagccggatggaacgcctcgtctacgaggtgcggcagaagtgcagaaacatcgaggacatctgcatctcctgcggatctctgaacgtgaccctggagcacccactgttcatcggcggcatgtgccagaactgtaaaaactgttttctggagtgtgcctatcaatacgacgatgacggctaccagagctactgcaccatctgttgcggcggaagagaggtgctgatgtgtggaaataacaactgctgccggtgcttctgcgtggaatgcgtggacctgctggtgggccccggcgccgcccaggccgctattaaggaagatccttggaactgctacatgtgcggccacaagggcacatacggcctgctgagacggagagaggactggcctagcagactgcagatgttcttcgccaataaccacgaccaggagttcgacccccctaaggtgtaccctcccgtccccgccgagaagagaaagcccatccgggtcctgagcctgttcgatggcatcgccaccggtctgctggtgctgaaggacctgggcatccaggtggataggtacattgcctccgaggtgtgcgaggactccatcaccgtgggaatggtgcgtcatcagggcaagatcatgtacgtgggcgacgtgcggagcgtgacacagaagcatatccaggagtggggccctttcgacctggtgatcggcggcagcccttgcaatgacctgagcatcgtgaacccagcccggaagggcctgtacgagggaaccggcagactgttcttcgagttttacagactgctgcacgacgcccggcctaaggaaggcgacgaccggcccttcttttggctgttcgagaatgtggtggccatgggagtcagcgacaagcgggatattagccggttcctggagagcaaccccgtgatgatcgatgccaaggaagtgagcgccgcccaccgggccagatacttctggggcaatctgcctggcatgaacagacccctggccagcaccgtgaacgacaagctggagctgcaggagtgcctggagcacggccggatcgccaagttcagcaaggtgagaaccatcaccacccgaagcaacagcatcaaacaaggcaaggaccagcactttcctgtgttcatgaacgagaaggaggacatcctgtggtgtaccgagatggagagagtgttcgggttcccagtccactacacagatgtcagcaacatgtctagactggccagacagagactgctgggaagaagctggtccgtccctgtgatcagacacctgttcgcccctctgaaggagtacttcgcctgcgtgagcagcggcaacagcaacgccaacagccggggccccagcttctctagcggcctggtgccactgtccctgagagggagccacatgggccccatggagatctacaaaaccgtgagcgcctggaagcggcagcctgtgcgcgtgctgagcctgtttcggaatatcgataaagtcctgaaaagcctgggattcctggagagcggctctggctccggcggtggcaccctgaagtacgtggaggatgtgacaaacgtggtcagacgggatgtggagaagtggggccccttcgatctggtgtacggcagcacccaacccctgggcagctcttgtgaccggtgccctggctggtacatgtttcagttccaccggatcctgcagtacgccctgccgagacaggagtcccagcggccattcttttggattttcatggacaacttgctgctgaccgaggatgaccaggaaactaccactcggttcctgcagaccgaagccgtgaccctgcaggacgtgagaggccgggactaccagaacgccatgcgggtgtggtccaacatccctggactgaaaagcaagcacgcacctctgacccctaaagaagaggagtacctgcaggcccaggtgcggagcagaagcaagctggacgcccctaaggtggatctgctggtgaagaattgcctcctgcccctgagagagtacttcaagtatttcagccagaatagtctgcccctgggcggcccaagcagcggcgcccctcctcccagcggcggcagcccagccggctccccaacctctaccgaggagggcacctctgagtccgccacccccgagagcggccctggcacctccaccgagcccagcgagggcagcgcacccggcagccctgccggcagccccacctccacagaggagggaaccagcaccgagcccagcgaaggcagcgccccaggcaccagcaccgagcctagtgagggcggctctggcggcggcagcgcccaggagattaaacggatcaacaagatcagaagaagacttgtgaaagacagcaacaccaagaaggccggcaagacaggccccatgaaaaccctgctggttagagtgatgacacccgatctgagagagcggctggaaaacctgagaaagaagcctgaaaatatcccccagcccatcagcaatacatctagagccaacctgaataagctgctgaccgattacaccgaaatgaagaaggcgatcctgcatgtgtactgggaagagttccagaaggaccctgtgggcctgatgagccgggtggcccagcctgccagcaagaagatcgatcagaacaagctgaaacctgagatggacgagaagggcaacctgaccaccgccggctttgcctgctctcagtgtggccagcccctgttcgtgtacaagctggagcaggtgtctgagaagggcaaggcttacaccaactacttcggacggtgcaatgtggccgagcacgaaaagctgatcctgctggcccagctgaagcccgagaaggatagcgacgaagccgtgacatatagcctgggaaagtttgggcagagggccctggatttctacagcattcatgtgaccaaggagtccacccaccccgtgaagcccctggcccagatcgccggaaacagatacgcctccggacctgtgggaaaggccctgagcgacgcatgtatgggcacaatcgcctccttcctgtctaagtaccaggacatcatcatcgaacaccagaaggtggtgaagggcaaccagaagagactggagagcctgcgggagctggccggcaaggaaaacctggaataccctagcgtgaccctgccacctcagcctcacaccaaggagggcgttgatgcctacaacgaagtgatcgcccgggtgcgaatgtgggtgaacctgaacctgtggcagaagctgaagctaagcagagatgatgccaagcctctgctgagactgaagggattcccttcctttcctctggtcgagagacaggccaacgaagtggactggtgggacatggtgtgtaacgtgaagaagctgatcaacgagaaaaaggaggatggcaaggtgttttggcagaatctggctggctacaagagacaggaagccctgagaccatacctgagcagcgaggaagatcggaagaagggaaagaaattcgctcggtaccagctgggcgacctgctgctgcacctggaaaagaagcacggcgaggactggggaaaggtgtacgacgaggcctgggagcggattgacaagaaagtggaaggcctgagcaagcacatcaagctggaagaggaacggagaagcgaggacgcccagagcaaggccgccctgaccgactggctgcgggctaaggccagcttcgtgatcgagggcctgaaggaggccgacaaggacgagttctgcagatgcgagctgaagctgcagaagtggtacggggacctgcggggaaagcccttcgccatcgaagccgagaacagcatcctggacatcagcggcttcagcaagcagtacaactgtgccttcatctggcagaaggacggcgtgaagaagctgaacctgtacctgatcatcaactacttcaagggcggcaagctgcggttcaagaagatcaaacctgaagccttcgaagccaacagattctacaccgtgatcaacaaaaagagcggcgagatcgtgcccatggaggtgaacttcaacttcgacgaccccaacctgatcatcctgcctctggcctttggcaagagacagggcagagaattcatctggaacgacctgctgtccctggaaaccggcagcctgaagctggccaacggaagagtgatcgagaagacactgtacaacagaagaacccggcaggatgagcctgccctgttcgtggccctgaccttcgagcggcgggaggtcctggactcctccaatatcaaaccaatgaacctgatcggcgtggcaagaggcgaaaacatccccgccgtgatcgccctgaccgaccccgagggctgcccactgagccggtttaaggatagcctgggaaacccaacccacatcctgagaatcggcgagagctataaggagaagcagcggaccatccaggccaagaaggaggtggagcagcggagagccggcggctacagccggaagtacgccagcaaagccaagaatctggcagacgatatggtgagaaacaccgctagagatctgctgtactacgccgtgacccaggatgccatgctgatcttcgccaacctgagccggggcttcggccggcagggcaagcggaccttcatggccgagagacagtacacacggatggaggactggctgaccgccaagctggcctacgagggcctgagcaagacctacctgtccaagacactggcccagtacacctccaagacatgcagcaactgtgggtttaccatcaccagcgccgactacgacagggtgctggagaagctgaagaagacagcaacaggctggatgaccacaattaacggcaaggagctgaaggtggagggccagattacctactacaacagatacaagagacagaacgtagtcaaggacctgtccgtcgagctggatagactgagcgaagaatctgtgaacaacgacatctcctcctggacaaagggcagaagcggagaagctctgagcctcctgaagaaaagattctcccatagacccgtgcaggagaagttcgtgtgcctgaactgcggcttcgagacacacgcagccgagcaagccgccctgaacatcgccagatcctggctgttcctgcggagccaggagtacaagaaataccagacaaacaagacaaccggcaacaccgataagagagccttcgtcgagacctggcagtccttttaccggaagaagcttaaggaggtgtggaaacctgccgtgcggtctggcggatctggcggaggctccacaagccaggtgcccgtgaccttcgaggacctggccgtgaggttcagcgccgaggagtggcacctgctggaggagtggcagagggagttccacagggacgtgatgagggagaactacgagatgctggtgagcctgggcaccgcccagctgctgcccctgagcgccttcctgagcctgaccgagccccaggaggacatgggcgacaacggctgcagcgacggcgagtgggagaggcccggcggcggcctgaccagccccaagaaaaagagaaaagtctaagctgccttctgcggggcttgccttctggccatgcccttcttctctcccttgcacctgtacctcttggtctttgaataaagcctgagtaggaaggctagcaaaaaaaaaaaaaaaaaaaaaaaaaaaaaaaaaaaaaaaaaaaaaaaaaaaaaaaaaaaaaaaaaaaaaaaaaaaaaaaa

SEQ ID NO: 6871 - RNA, 5797 nt, synthetic construct
  source 1..5797: mol_type = other RNA
aggaaataagagagaaaagaagagtaagaagaaatataagagccaccatggcccctaagaagaagcgtaaagtgagccggatggaacgcctcgtctacgaggtgcggcagaagtgcagaaacatcgaggacatctgcatctcctgcggatctctgaacgtgaccctggagcacccactgttcatcggcggcatgtgccagaactgtaaaaactgttttctggagtgtgcctatcaatacgacgatgacggctaccagagctactgcaccatctgttgcggcggaagagaggtgctgatgtgtggaaataacaactgctgccggtgcttctgcgtggaatgcgtggacctgctggtgggccccggcgccgcccaggccgctattaaggaagatccttggaactgctacatgtgcggccacaagggcacatacggcctgctgagacggagagaggactggcctagcagactgcagatgttcttcgccaataaccacgaccaggagttcgacccccctaaggtgtaccctcccgtccccgccgagaagagaaagcccatccgggtcctgagcctgttcgatggcatcgccaccggtctgctggtgctgaaggacctgggcatccaggtggataggtacattgcctccgaggtgtgcgaggactccatcaccgtgggaatggtgcgtcatcagggcaagatcatgtacgtgggcgacgtgcggagcgtgacacagaagcatatccaggagtggggccctttcgacctggtgatcggcggcagcccttgcaatgacctgagcatcgtgaacccagcccggaagggcctgtacgagggaaccggcagactgttcttcgagttttacagactgctgcacgacgcccggcctaaggaaggcgacgaccggcccttcttttggctgttcgagaatgtggtggccatgggagtcagcgacaagcgggatattagccggttcctggagagcaaccccgtgatgatcgatgccaaggaagtgagcgccgcccaccgggccagatacttctggggcaatctgcctggcatgaacagacccctggccagcaccgtgaacgacaagctggagctgcaggagtgcctggagcacggccggatcgccaagttcagcaaggtgagaaccatcaccacccgaagcaacagcatcaaacaaggcaaggaccagcactttcctgtgttcatgaacgagaaggaggacatcctgtggtgtaccgagatggagagagtgttcgggttcccagtccactacacagatgtcagcaacatgtctagactggccagacagagactgctgggaagaagctggtccgtccctgtgatcagacacctgttcgcccctctgaaggagtacttcgcctgcgtgagcagcggcaacagcaacgccaacagccggggccccagcttctctagcggcctggtgccactgtccctgagagggagccacatgggccccatggagatctacaaaaccgtgagcgcctggaagcggcagcctgtgcgcgtgctgagcctgtttcggaatatcgataaagtcctgaaaagcctgggattcctggagagcggctctggctccggcggtggcaccctgaagtacgtggaggatgtgacaaacgtggtcagacgggatgtggagaagtggggccccttcgatctggtgtacggcagcacccaacccctgggcagctcttgtgaccggtgccctggctggtacatgtttcagttccaccggatcctgcagtacgccctgccgagacaggagtcccagcggccattcttttggattttcatggacaacttgctgctgaccgaggatgaccaggaaactaccactcggttcctgcagaccgaagccgtgaccctgcaggacgtgagaggccgggactaccagaacgccatgcgggtgtggtccaacatccctggactgaaaagcaagcacgcacctctgacccctaaagaagaggagtacctgcaggcccaggtgcggagcagaagcaagctggacgcccctaaggtggatctgctggtgaagaattgcctcctgcccctgagagagtacttcaagtatttcagccagaatagtctgcccctgggcggcccaagcagcggcgcccctcctcccagcggcggcagcccagccggctccccaacctctaccgaggagggcacctctgagtccgccacccccgagagcggccctggcacctccaccgagcccagcgagggcagcgcacccggcagccctgccggcagccccacctccacagaggagggaaccagcaccgagcccagcgaaggcagcgccccaggcaccagcaccgagcctagtgagggcggctctggcggcggcagcgcccaggagattaaacggatcaacaagatcagaagaagacttgtgaaagacagcaacaccaagaaggccggcaagacaggccccatgaaaaccctgctggttagagtgatgacacccgatctgagagagcggctggaaaacctgagaaagaagcctgaaaatatcccccagcccatcagcaatacatctagagccaacctgaataagctgctgaccgattacaccgaaatgaagaaggcgatcctgcatgtgtactgggaagagttccagaaggaccctgtgggcctgatgagccgggtggcccagcctgccagcaagaagatcgatcagaacaagctgaaacctgagatggacgagaagggcaacctgaccaccgccggctttgcctgctctcagtgtggccagcccctgttcgtgtacaagctggagcaggtgtctgagaagggcaaggcttacaccaactacttcggacggtgcaatgtggccgagcacgaaaagctgatcctgctggcccagctgaagcccgagaaggatagcgacgaagccgtgacatatagcctgggaaagtttgggcagagggccctggatttctacagcattcatgtgaccaaggagtccacccaccccgtgaagcccctggcccagatcgccggaaacagatacgcctccggacctgtgggaaaggccctgagcgacgcatgtatgggcacaatcgcctccttcctgtctaagtaccaggacatcatcatcgaacaccagaaggtggtgaagggcaaccagaagagactggagagcctgcgggagctggccggcaaggaaaacctggaataccctagcgtgaccctgccacctcagcctcacaccaaggagggcgttgatgcctacaacgaagtgatcgcccgggtgcgaatgtgggtgaacctgaacctgtggcagaagctgaagctaagcagagatgatgccaagcctctgctgagactgaagggattcccttcctttcctctggtcgagagacaggccaacgaagtggactggtgggacatggtgtgtaacgtgaagaagctgatcaacgagaaaaaggaggatggcaaggtgttttggcagaatctggctggctacaagagacaggaagccctgagaccatacctgagcagcgaggaagatcggaagaagggaaagaaattcgctcggtaccagctgggcgacctgctgctgcacctggaaaagaagcacggcgaggactggggaaaggtgtacgacgaggcctgggagcggattgacaagaaagtggaaggcctgagcaagcacatcaagctggaagaggaacggagaagcgaggacgcccagagcaaggccgccctgaccgactggctgcgggctaaggccagcttcgtgatcgagggcctgaaggaggccgacaaggacgagttctgcagatgcgagctgaagctgcagaagtggtacggggacctgcggggaaagcccttcgccatcgaagccgagaacagcatcctggacatcagcggcttcagcaagcagtacaactgtgccttcatctggcagaaggacggcgtgaagaagctgaacctgtacctgatcatcaactacttcaagggcggcaagctgcggttcaagaagatcaaacctgaagccttcgaagccaacagattctacaccgtgatcaacaaaaagagcggcgagatcgtgcccatggaggtgaacttcaacttcgacgaccccaacctgatcatcctgcctctggcctttggcaagagacagggcagagaattcatctggaacgacctgctgtccctggaaaccggcagcctgaagctggccaacggaagagtgatcgagaagacactgtacaacagaagaacccggcaggatgagcctgccctgttcgtggccctgaccttcgagcggcgggaggtcctggactcctccaatatcaaaccaatgaacctgatcggcgtggcaagaggcgaaaacatccccgccgtgatcgccctgaccgaccccgagggctgcccactgagccggtttaaggatagcctgggaaacccaacccacatcctgagaatcggcgagagctataaggagaagcagcggaccatccaggccaagaaggaggtggagcagcggagagccggcggctacagccggaagtacgccagcaaagccaagaatctggcagacgatatggtgagaaacaccgctagagatctgctgtactacgccgtgacccaggatgccatgctgatcttcgccaacctgagccggggcttcggccggcagggcaagcggaccttcatggccgagagacagtacacacggatggaggactggctgaccgccaagctggcctacgagggcctgagcaagacctacctgtccaagacactggcccagtacacctccaagacatgcagcaactgtgggtttaccatcaccagcgccgactacgacagggtgctggagaagctgaagaagacagcaacaggctggatgaccacaattaacggcaaggagctgaaggtggagggccagattacctactacaacagatacaagagacagaacgtagtcaaggacctgtccgtcgagctggatagactgagcgaagaatctgtgaacaacgacatctcctcctggacaaagggcagaagcggagaagctctgagcctcctgaagaaaagattctcccatagacccgtgcaggagaagttcgtgtgcctgaactgcggcttcgagacacacgcagccgagcaagccgccctgaacatcgccagatcctggctgttcctgcggagccaggagtacaagaaataccagacaaacaagacaaccggcaacaccgataagagagccttcgtcgagacctggcagtccttttaccggaagaagcttaaggaggtgtggaaacctgccgtgcggtctggcggatctggcggaggctccacaagcctgcaggaggccgtgaccttcaaggacgtggccgtggtgttcaccgaggaggagctgggcctgctggacagcacccagaggaccctgtacagggacgtgatgctggagaacttcaggaacctggtgagcctgggccaccagagcttcaagcccgacgtgatcagccagctggagagggaggagaagctgtggctgaagaagctgcagacccagaggggcaggaggagcggcggcaggagccagaccagccccaagaaaaagagaaaagtctaagctgccttctgcggggcttgccttctggccatgcccttcttctctcccttgcacctgtacctcttggtctttgaataaagcctgagtaggaaggctagcaaaaaaaaaaaaaaaaaaaaaaaaaaaaaaaaaaaaaaaaaaaaaaaaaaaaaaaaaaaaaaaaaaaaaaaaaaaaaaaa

SEQ ID NO: 6872 - RNA, 5830 nt, synthetic construct
  source 1..5830: mol_type = other RNA
aggaaataagagagaaaagaagagtaagaagaaatataagagccaccatggcccctaagaagaagcgtaaagtgagccggatggaacgcctcgtctacgaggtgcggcagaagtgcagaaacatcgaggacatctgcatctcctgcggatctctgaacgtgaccctggagcacccactgttcatcggcggcatgtgccagaactgtaaaaactgttttctggagtgtgcctatcaatacgacgatgacggctaccagagctactgcaccatctgttgcggcggaagagaggtgctgatgtgtggaaataacaactgctgccggtgcttctgcgtggaatgcgtggacctgctggtgggccccggcgccgcccaggccgctattaaggaagatccttggaactgctacatgtgcggccacaagggcacatacggcctgctgagacggagagaggactggcctagcagactgcagatgttcttcgccaataaccacgaccaggagttcgacccccctaaggtgtaccctcccgtccccgccgagaagagaaagcccatccgggtcctgagcctgttcgatggcatcgccaccggtctgctggtgctgaaggacctgggcatccaggtggataggtacattgcctccgaggtgtgcgaggactccatcaccgtgggaatggtgcgtcatcagggcaagatcatgtacgtgggcgacgtgcggagcgtgacacagaagcatatccaggagtggggccctttcgacctggtgatcggcggcagcccttgcaatgacctgagcatcgtgaacccagcccggaagggcctgtacgagggaaccggcagactgttcttcgagttttacagactgctgcacgacgcccggcctaaggaaggcgacgaccggcccttcttttggctgttcgagaatgtggtggccatgggagtcagcgacaagcgggatattagccggttcctggagagcaaccccgtgatgatcgatgccaaggaagtgagcgccgcccaccgggccagatacttctggggcaatctgcctggcatgaacagacccctggccagcaccgtgaacgacaagctggagctgcaggagtgcctggagcacggccggatcgccaagttcagcaaggtgagaaccatcaccacccgaagcaacagcatcaaacaaggcaaggaccagcactttcctgtgttcatgaacgagaaggaggacatcctgtggtgtaccgagatggagagagtgttcgggttcccagtccactacacagatgtcagcaacatgtctagactggccagacagagactgctgggaagaagctggtccgtccctgtgatcagacacctgttcgcccctctgaaggagtacttcgcctgcgtgagcagcggcaacagcaacgccaacagccggggccccagcttctctagcggcctggtgccactgtccctgagagggagccacatgggccccatggagatctacaaaaccgtgagcgcctggaagcggcagcctgtgcgcgtgctgagcctgtttcggaatatcgataaagtcctgaaaagcctgggattcctggagagcggctctggctccggcggtggcaccctgaagtacgtggaggatgtgacaaacgtggtcagacgggatgtggagaagtggggccccttcgatctggtgtacggcagcacccaacccctgggcagctcttgtgaccggtgccctggctggtacatgtttcagttccaccggatcctgcagtacgccctgccgagacaggagtcccagcggccattcttttggattttcatggacaacttgctgctgaccgaggatgaccaggaaactaccactcggttcctgcagaccgaagccgtgaccctgcaggacgtgagaggccgggactaccagaacgccatgcgggtgtggtccaacatccctggactgaaaagcaagcacgcacctctgacccctaaagaagaggagtacctgcaggcccaggtgcggagcagaagcaagctggacgcccctaaggtggatctgctggtgaagaattgcctcctgcccctgagagagtacttcaagtatttcagccagaatagtctgcccctgggcggcccaagcagcggcgcccctcctcccagcggcggcagcccagccggctccccaacctctaccgaggagggcacctctgagtccgccacccccgagagcggccctggcacctccaccgagcccagcgagggcagcgcacccggcagccctgccggcagccccacctccacagaggagggaaccagcaccgagcccagcgaaggcagcgccccaggcaccagcaccgagcctagtgagggcggctctggcggcggcagcgcccaggagattaaacggatcaacaagatcagaagaagacttgtgaaagacagcaacaccaagaaggccggcaagacaggccccatgaaaaccctgctggttagagtgatgacacccgatctgagagagcggctggaaaacctgagaaagaagcctgaaaatatcccccagcccatcagcaatacatctagagccaacctgaataagctgctgaccgattacaccgaaatgaagaaggcgatcctgcatgtgtactgggaagagttccagaaggaccctgtgggcctgatgagccgggtggcccagcctgccagcaagaagatcgatcagaacaagctgaaacctgagatggacgagaagggcaacctgaccaccgccggctttgcctgctctcagtgtggccagcccctgttcgtgtacaagctggagcaggtgtctgagaagggcaaggcttacaccaactacttcggacggtgcaatgtggccgagcacgaaaagctgatcctgctggcccagctgaagcccgagaaggatagcgacgaagccgtgacatatagcctgggaaagtttgggcagagggccctggatttctacagcattcatgtgaccaaggagtccacccaccccgtgaagcccctggcccagatcgccggaaacagatacgcctccggacctgtgggaaaggccctgagcgacgcatgtatgggcacaatcgcctccttcctgtctaagtaccaggacatcatcatcgaacaccagaaggtggtgaagggcaaccagaagagactggagagcctgcgggagctggccggcaaggaaaacctggaataccctagcgtgaccctgccacctcagcctcacaccaaggagggcgttgatgcctacaacgaagtgatcgcccgggtgcgaatgtgggtgaacctgaacctgtggcagaagctgaagctaagcagagatgatgccaagcctctgctgagactgaagggattcccttcctttcctctggtcgagagacaggccaacgaagtggactggtgggacatggtgtgtaacgtgaagaagctgatcaacgagaaaaaggaggatggcaaggtgttttggcagaatctggctggctacaagagacaggaagccctgagaccatacctgagcagcgaggaagatcggaagaagggaaagaaattcgctcggtaccagctgggcgacctgctgctgcacctggaaaagaagcacggcgaggactggggaaaggtgtacgacgaggcctgggagcggattgacaagaaagtggaaggcctgagcaagcacatcaagctggaagaggaacggagaagcgaggacgcccagagcaaggccgccctgaccgactggctgcgggctaaggccagcttcgtgatcgagggcctgaaggaggccgacaaggacgagttctgcagatgcgagctgaagctgcagaagtggtacggggacctgcggggaaagcccttcgccatcgaagccgagaacagcatcctggacatcagcggcttcagcaagcagtacaactgtgccttcatctggcagaaggacggcgtgaagaagctgaacctgtacctgatcatcaactacttcaagggcggcaagctgcggttcaagaagatcaaacctgaagccttcgaagccaacagattctacaccgtgatcaacaaaaagagcggcgagatcgtgcccatggaggtgaacttcaacttcgacgaccccaacctgatcatcctgcctctggcctttggcaagagacagggcagagaattcatctggaacgacctgctgtccctggaaaccggcagcctgaagctggccaacggaagagtgatcgagaagacactgtacaacagaagaacccggcaggatgagcctgccctgttcgtggccctgaccttcgagcggcgggaggtcctggactcctccaatatcaaaccaatgaacctgatcggcgtggcaagaggcgaaaacatccccgccgtgatcgccctgaccgaccccgagggctgcccactgagccggtttaaggatagcctgggaaacccaacccacatcctgagaatcggcgagagctataaggagaagcagcggaccatccaggccaagaaggaggtggagcagcggagagccggcggctacagccggaagtacgccagcaaagccaagaatctggcagacgatatggtgagaaacaccgctagagatctgctgtactacgccgtgacccaggatgccatgctgatcttcgccaacctgagccggggcttcggccggcagggcaagcggaccttcatggccgagagacagtacacacggatggaggactggctgaccgccaagctggcctacgagggcctgagcaagacctacctgtccaagacactggcccagtacacctccaagacatgcagcaactgtgggtttaccatcaccagcgccgactacgacagggtgctggagaagctgaagaagacagcaacaggctggatgaccacaattaacggcaaggagctgaaggtggagggccagattacctactacaacagatacaagagacagaacgtagtcaaggacctgtccgtcgagctggatagactgagcgaagaatctgtgaacaacgacatctcctcctggacaaagggcagaagcggagaagctctgagcctcctgaagaaaagattctcccatagacccgtgcaggagaagttcgtgtgcctgaactgcggcttcgagacacacgcagccgagcaagccgccctgaacatcgccagatcctggctgttcctgcggagccaggagtacaagaaataccagacaaacaagacaaccggcaacaccgataagagagccttcgtcgagacctggcagtccttttaccggaagaagcttaaggaggtgtggaaacctgccgtgcggtctggcggatctggcggaggctccacaagcgtggtgttcgaggacgtggccgtgtacttcagccaggaggagtggggcctgctggacgaggcccagaggcacctgtaccacgccgtgatgaccgagaacttcgccctggtgaccagcctgggctgctggcacggcgcccaggacgaggaggcccccagcgagcagagcatcagcgtgggcatgagcgaggtgggcacccccaagcccgaccccagcaccaagaagggccagccctacgagatgtgcgagcccctgagcaaggacctgctgcacctgaccagccccaagaaaaagagaaaagtctaagctgccttctgcggggcttgccttctggccatgcccttcttctctcccttgcacctgtacctcttggtctttgaataaagcctgagtaggaaggctagcaaaaaaaaaaaaaaaaaaaaaaaaaaaaaaaaaaaaaaaaaaaaaaaaaaaaaaaaaaaaaaaaaaaaaaaaaaaaaaaa

SEQ ID NO: 6873 - RNA, 5797 nt, synthetic construct
  source 1..5797: mol_type = other RNA
aggaaataagagagaaaagaagagtaagaagaaatataagagccaccatggcccctaagaagaagcgtaaagtgagccggatggaacgcctcgtctacgaggtgcggcagaagtgcagaaacatcgaggacatctgcatctcctgcggatctctgaacgtgaccctggagcacccactgttcatcggcggcatgtgccagaactgtaaaaactgttttctggagtgtgcctatcaatacgacgatgacggctaccagagctactgcaccatctgttgcggcggaagagaggtgctgatgtgtggaaataacaactgctgccggtgcttctgcgtggaatgcgtggacctgctggtgggccccggcgccgcccaggccgctattaaggaagatccttggaactgctacatgtgcggccacaagggcacatacggcctgctgagacggagagaggactggcctagcagactgcagatgttcttcgccaataaccacgaccaggagttcgacccccctaaggtgtaccctcccgtccccgccgagaagagaaagcccatccgggtcctgagcctgttcgatggcatcgccaccggtctgctggtgctgaaggacctgggcatccaggtggataggtacattgcctccgaggtgtgcgaggactccatcaccgtgggaatggtgcgtcatcagggcaagatcatgtacgtgggcgacgtgcggagcgtgacacagaagcatatccaggagtggggccctttcgacctggtgatcggcggcagcccttgcaatgacctgagcatcgtgaacccagcccggaagggcctgtacgagggaaccggcagactgttcttcgagttttacagactgctgcacgacgcccggcctaaggaaggcgacgaccggcccttcttttggctgttcgagaatgtggtggccatgggagtcagcgacaagcgggatattagccggttcctggagagcaaccccgtgatgatcgatgccaaggaagtgagcgccgcccaccgggccagatacttctggggcaatctgcctggcatgaacagacccctggccagcaccgtgaacgacaagctggagctgcaggagtgcctggagcacggccggatcgccaagttcagcaaggtgagaaccatcaccacccgaagcaacagcatcaaacaaggcaaggaccagcactttcctgtgttcatgaacgagaaggaggacatcctgtggtgtaccgagatggagagagtgttcgggttcccagtccactacacagatgtcagcaacatgtctagactggccagacagagactgctgggaagaagctggtccgtccctgtgatcagacacctgttcgcccctctgaaggagtacttcgcctgcgtgagcagcggcaacagcaacgccaacagccggggccccagcttctctagcggcctggtgccactgtccctgagagggagccacatgggccccatggagatctacaaaaccgtgagcgcctggaagcggcagcctgtgcgcgtgctgagcctgtttcggaatatcgataaagtcctgaaaagcctgggattcctggagagcggctctggctccggcggtggcaccctgaagtacgtggaggatgtgacaaacgtggtcagacgggatgtggagaagtggggccccttcgatctggtgtacggcagcacccaacccctgggcagctcttgtgaccggtgccctggctggtacatgtttcagttccaccggatcctgcagtacgccctgccgagacaggagtcccagcggccattcttttggattttcatggacaacttgctgctgaccgaggatgaccaggaaactaccactcggttcctgcagaccgaagccgtgaccctgcaggacgtgagaggccgggactaccagaacgccatgcgggtgtggtccaacatccctggactgaaaagcaagcacgcacctctgacccctaaagaagaggagtacctgcaggcccaggtgcggagcagaagcaagctggacgcccctaaggtggatctgctggtgaagaattgcctcctgcccctgagagagtacttcaagtatttcagccagaatagtctgcccctgggcggcccaagcagcggcgcccctcctcccagcggcggcagcccagccggctccccaacctctaccgaggagggcacctctgagtccgccacccccgagagcggccctggcacctccaccgagcccagcgagggcagcgcacccggcagccctgccggcagccccacctccacagaggagggaaccagcaccgagcccagcgaaggcagcgccccaggcaccagcaccgagcctagtgagggcggctctggcggcggcagcgcccaggagattaaacggatcaacaagatcagaagaagacttgtgaaagacagcaacaccaagaaggccggcaagacaggccccatgaaaaccctgctggttagagtgatgacacccgatctgagagagcggctggaaaacctgagaaagaagcctgaaaatatcccccagcccatcagcaatacatctagagccaacctgaataagctgctgaccgattacaccgaaatgaagaaggcgatcctgcatgtgtactgggaagagttccagaaggaccctgtgggcctgatgagccgggtggcccagcctgccagcaagaagatcgatcagaacaagctgaaacctgagatggacgagaagggcaacctgaccaccgccggctttgcctgctctcagtgtggccagcccctgttcgtgtacaagctggagcaggtgtctgagaagggcaaggcttacaccaactacttcggacggtgcaatgtggccgagcacgaaaagctgatcctgctggcccagctgaagcccgagaaggatagcgacgaagccgtgacatatagcctgggaaagtttgggcagagggccctggatttctacagcattcatgtgaccaaggagtccacccaccccgtgaagcccctggcccagatcgccggaaacagatacgcctccggacctgtgggaaaggccctgagcgacgcatgtatgggcacaatcgcctccttcctgtctaagtaccaggacatcatcatcgaacaccagaaggtggtgaagggcaaccagaagagactggagagcctgcgggagctggccggcaaggaaaacctggaataccctagcgtgaccctgccacctcagcctcacaccaaggagggcgttgatgcctacaacgaagtgatcgcccgggtgcgaatgtgggtgaacctgaacctgtggcagaagctgaagctaagcagagatgatgccaagcctctgctgagactgaagggattcccttcctttcctctggtcgagagacaggccaacgaagtggactggtgggacatggtgtgtaacgtgaagaagctgatcaacgagaaaaaggaggatggcaaggtgttttggcagaatctggctggctacaagagacaggaagccctgagaccatacctgagcagcgaggaagatcggaagaagggaaagaaattcgctcggtaccagctgggcgacctgctgctgcacctggaaaagaagcacggcgaggactggggaaaggtgtacgacgaggcctgggagcggattgacaagaaagtggaaggcctgagcaagcacatcaagctggaagaggaacggagaagcgaggacgcccagagcaaggccgccctgaccgactggctgcgggctaaggccagcttcgtgatcgagggcctgaaggaggccgacaaggacgagttctgcagatgcgagctgaagctgcagaagtggtacggggacctgcggggaaagcccttcgccatcgaagccgagaacagcatcctggacatcagcggcttcagcaagcagtacaactgtgccttcatctggcagaaggacggcgtgaagaagctgaacctgtacctgatcatcaactacttcaagggcggcaagctgcggttcaagaagatcaaacctgaagccttcgaagccaacagattctacaccgtgatcaacaaaaagagcggcgagatcgtgcccatggaggtgaacttcaacttcgacgaccccaacctgatcatcctgcctctggcctttggcaagagacagggcagagaattcatctggaacgacctgctgtccctggaaaccggcagcctgaagctggccaacggaagagtgatcgagaagacactgtacaacagaagaacccggcaggatgagcctgccctgttcgtggccctgaccttcgagcggcgggaggtcctggactcctccaatatcaaaccaatgaacctgatcggcgtggcaagaggcgaaaacatccccgccgtgatcgccctgaccgaccccgagggctgcccactgagccggtttaaggatagcctgggaaacccaacccacatcctgagaatcggcgagagctataaggagaagcagcggaccatccaggccaagaaggaggtggagcagcggagagccggcggctacagccggaagtacgccagcaaagccaagaatctggcagacgatatggtgagaaacaccgctagagatctgctgtactacgccgtgacccaggatgccatgctgatcttcgccaacctgagccggggcttcggccggcagggcaagcggaccttcatggccgagagacagtacacacggatggaggactggctgaccgccaagctggcctacgagggcctgagcaagacctacctgtccaagacactggcccagtacacctccaagacatgcagcaactgtgggtttaccatcaccagcgccgactacgacagggtgctggagaagctgaagaagacagcaacaggctggatgaccacaattaacggcaaggagctgaaggtggagggccagattacctactacaacagatacaagagacagaacgtagtcaaggacctgtccgtcgagctggatagactgagcgaagaatctgtgaacaacgacatctcctcctggacaaagggcagaagcggagaagctctgagcctcctgaagaaaagattctcccatagacccgtgcaggagaagttcgtgtgcctgaactgcggcttcgagacacacgcagccgagcaagccgccctgaacatcgccagatcctggctgttcctgcggagccaggagtacaagaaataccagacaaacaagacaaccggcaacaccgataagagagccttcgtcgagacctggcagtccttttaccggaagaagcttaaggaggtgtggaaacctgccgtgcggtctggcggatctggcggaggctccacaagcccccaggagcccgtgaccttcgccgacgtggccgtgctgttcacccccgaggagtggctgttcctggacagcgcccagaagagcctgtacagggacgtgatgctggagaactacaggaacctggccagcgtgggcgaccagctgtgcaagaccaggatgagcagccacctggagcagagggaggagctgtgcgtgaccgagaggggcatcttccccggcgcccacctgggcccccacttccagaccagccccaagaaaaagagaaaagtctaagctgccttctgcggggcttgccttctggccatgcccttcttctctcccttgcacctgtacctcttggtctttgaataaagcctgagtaggaaggctagcaaaaaaaaaaaaaaaaaaaaaaaaaaaaaaaaaaaaaaaaaaaaaaaaaaaaaaaaaaaaaaaaaaaaaaaaaaaaaaaa

SEQ ID NO: 6874 - RNA, 5794 nt, synthetic construct
  source 1..5794: mol_type = other RNA
aggaaataagagagaaaagaagagtaagaagaaatataagagccaccatggcccctaagaagaagcgtaaagtgagccggatggaacgcctcgtctacgaggtgcggcagaagtgcagaaacatcgaggacatctgcatctcctgcggatctctgaacgtgaccctggagcacccactgttcatcggcggcatgtgccagaactgtaaaaactgttttctggagtgtgcctatcaatacgacgatgacggctaccagagctactgcaccatctgttgcggcggaagagaggtgctgatgtgtggaaataacaactgctgccggtgcttctgcgtggaatgcgtggacctgctggtgggccccggcgccgcccaggccgctattaaggaagatccttggaactgctacatgtgcggccacaagggcacatacggcctgctgagacggagagaggactggcctagcagactgcagatgttcttcgccaataaccacgaccaggagttcgacccccctaaggtgtaccctcccgtccccgccgagaagagaaagcccatccgggtcctgagcctgttcgatggcatcgccaccggtctgctggtgctgaaggacctgggcatccaggtggataggtacattgcctccgaggtgtgcgaggactccatcaccgtgggaatggtgcgtcatcagggcaagatcatgtacgtgggcgacgtgcggagcgtgacacagaagcatatccaggagtggggccctttcgacctggtgatcggcggcagcccttgcaatgacctgagcatcgtgaacccagcccggaagggcctgtacgagggaaccggcagactgttcttcgagttttacagactgctgcacgacgcccggcctaaggaaggcgacgaccggcccttcttttggctgttcgagaatgtggtggccatgggagtcagcgacaagcgggatattagccggttcctggagagcaaccccgtgatgatcgatgccaaggaagtgagcgccgcccaccgggccagatacttctggggcaatctgcctggcatgaacagacccctggccagcaccgtgaacgacaagctggagctgcaggagtgcctggagcacggccggatcgccaagttcagcaaggtgagaaccatcaccacccgaagcaacagcatcaaacaaggcaaggaccagcactttcctgtgttcatgaacgagaaggaggacatcctgtggtgtaccgagatggagagagtgttcgggttcccagtccactacacagatgtcagcaacatgtctagactggccagacagagactgctgggaagaagctggtccgtccctgtgatcagacacctgttcgcccctctgaaggagtacttcgcctgcgtgagcagcggcaacagcaacgccaacagccggggccccagcttctctagcggcctggtgccactgtccctgagagggagccacatgggccccatggagatctacaaaaccgtgagcgcctggaagcggcagcctgtgcgcgtgctgagcctgtttcggaatatcgataaagtcctgaaaagcctgggattcctggagagcggctctggctccggcggtggcaccctgaagtacgtggaggatgtgacaaacgtggtcagacgggatgtggagaagtggggccccttcgatctggtgtacggcagcacccaacccctgggcagctcttgtgaccggtgccctggctggtacatgtttcagttccaccggatcctgcagtacgccctgccgagacaggagtcccagcggccattcttttggattttcatggacaacttgctgctgaccgaggatgaccaggaaactaccactcggttcctgcagaccgaagccgtgaccctgcaggacgtgagaggccgggactaccagaacgccatgcgggtgtggtccaacatccctggactgaaaagcaagcacgcacctctgacccctaaagaagaggagtacctgcaggcccaggtgcggagcagaagcaagctggacgcccctaaggtggatctgctggtgaagaattgcctcctgcccctgagagagtacttcaagtatttcagccagaatagtctgcccctgggcggcccaagcagcggcgcccctcctcccagcggcggcagcccagccggctccccaacctctaccgaggagggcacctctgagtccgccacccccgagagcggccctggcacctccaccgagcccagcgagggcagcgcacccggcagccctgccggcagccccacctccacagaggagggaaccagcaccgagcccagcgaaggcagcgccccaggcaccagcaccgagcctagtgagggcggctctggcggcggcagcgcccaggagattaaacggatcaacaagatcagaagaagacttgtgaaagacagcaacaccaagaaggccggcaagacaggccccatgaaaaccctgctggttagagtgatgacacccgatctgagagagcggctggaaaacctgagaaagaagcctgaaaatatcccccagcccatcagcaatacatctagagccaacctgaataagctgctgaccgattacaccgaaatgaagaaggcgatcctgcatgtgtactgggaagagttccagaaggaccctgtgggcctgatgagccgggtggcccagcctgccagcaagaagatcgatcagaacaagctgaaacctgagatggacgagaagggcaacctgaccaccgccggctttgcctgctctcagtgtggccagcccctgttcgtgtacaagctggagcaggtgtctgagaagggcaaggcttacaccaactacttcggacggtgcaatgtggccgagcacgaaaagctgatcctgctggcccagctgaagcccgagaaggatagcgacgaagccgtgacatatagcctgggaaagtttgggcagagggccctggatttctacagcattcatgtgaccaaggagtccacccaccccgtgaagcccctggcccagatcgccggaaacagatacgcctccggacctgtgggaaaggccctgagcgacgcatgtatgggcacaatcgcctccttcctgtctaagtaccaggacatcatcatcgaacaccagaaggtggtgaagggcaaccagaagagactggagagcctgcgggagctggccggcaaggaaaacctggaataccctagcgtgaccctgccacctcagcctcacaccaaggagggcgttgatgcctacaacgaagtgatcgcccgggtgcgaatgtgggtgaacctgaacctgtggcagaagctgaagctaagcagagatgatgccaagcctctgctgagactgaagggattcccttcctttcctctggtcgagagacaggccaacgaagtggactggtgggacatggtgtgtaacgtgaagaagctgatcaacgagaaaaaggaggatggcaaggtgttttggcagaatctggctggctacaagagacaggaagccctgagaccatacctgagcagcgaggaagatcggaagaagggaaagaaattcgctcggtaccagctgggcgacctgctgctgcacctggaaaagaagcacggcgaggactggggaaaggtgtacgacgaggcctgggagcggattgacaagaaagtggaaggcctgagcaagcacatcaagctggaagaggaacggagaagcgaggacgcccagagcaaggccgccctgaccgactggctgcgggctaaggccagcttcgtgatcgagggcctgaaggaggccgacaaggacgagttctgcagatgcgagctgaagctgcagaagtggtacggggacctgcggggaaagcccttcgccatcgaagccgagaacagcatcctggacatcagcggcttcagcaagcagtacaactgtgccttcatctggcagaaggacggcgtgaagaagctgaacctgtacctgatcatcaactacttcaagggcggcaagctgcggttcaagaagatcaaacctgaagccttcgaagccaacagattctacaccgtgatcaacaaaaagagcggcgagatcgtgcccatggaggtgaacttcaacttcgacgaccccaacctgatcatcctgcctctggcctttggcaagagacagggcagagaattcatctggaacgacctgctgtccctggaaaccggcagcctgaagctggccaacggaagagtgatcgagaagacactgtacaacagaagaacccggcaggatgagcctgccctgttcgtggccctgaccttcgagcggcgggaggtcctggactcctccaatatcaaaccaatgaacctgatcggcgtggcaagaggcgaaaacatccccgccgtgatcgccctgaccgaccccgagggctgcccactgagccggtttaaggatagcctgggaaacccaacccacatcctgagaatcggcgagagctataaggagaagcagcggaccatccaggccaagaaggaggtggagcagcggagagccggcggctacagccggaagtacgccagcaaagccaagaatctggcagacgatatggtgagaaacaccgctagagatctgctgtactacgccgtgacccaggatgccatgctgatcttcgccaacctgagccggggcttcggccggcagggcaagcggaccttcatggccgagagacagtacacacggatggaggactggctgaccgccaagctggcctacgagggcctgagcaagacctacctgtccaagacactggcccagtacacctccaagacatgcagcaactgtgggtttaccatcaccagcgccgactacgacagggtgctggagaagctgaagaagacagcaacaggctggatgaccacaattaacggcaaggagctgaaggtggagggccagattacctactacaacagatacaagagacagaacgtagtcaaggacctgtccgtcgagctggatagactgagcgaagaatctgtgaacaacgacatctcctcctggacaaagggcagaagcggagaagctctgagcctcctgaagaaaagattctcccatagacccgtgcaggagaagttcgtgtgcctgaactgcggcttcgagacacacgcagccgagcaagccgccctgaacatcgccagatcctggctgttcctgcggagccaggagtacaagaaataccagacaaacaagacaaccggcaacaccgataagagagccttcgtcgagacctggcagtccttttaccggaagaagcttaaggaggtgtggaaacctgccgtgcggtctggcggatctggcggaggctccacaagcagagtgctgaccttcagagacgtggccgtggagttcagccccgaggagtgggagtgcctggacagcgcccagcagagactgtacagagacgtgatgctggagaactacggcaacctgttcagcctgggcctggccatcttcaagcccgacctgatcacctacctggagcagagaaaggagccctggaacgccagaagacagaagaccgtggccaagcaccccgccggcagcctgcacttcaccagccccaagaaaaagagaaaagtctaagctgccttctgcggggcttgccttctggccatgcccttcttctctcccttgcacctgtacctcttggtctttgaataaagcctgagtaggaaggctagcaaaaaaaaaaaaaaaaaaaaaaaaaaaaaaaaaaaaaaaaaaaaaaaaaaaaaaaaaaaaaaaaaaaaaaaaaaaaaaaa

SEQ ID NO: 6875 - RNA, 5797 nt, synthetic construct
  source 1..5797: mol_type = other RNA
aggaaataagagagaaaagaagagtaagaagaaatataagagccaccatggcccctaagaagaagcgtaaagtgagccggatggaacgcctcgtctacgaggtgcggcagaagtgcagaaacatcgaggacatctgcatctcctgcggatctctgaacgtgaccctggagcacccactgttcatcggcggcatgtgccagaactgtaaaaactgttttctggagtgtgcctatcaatacgacgatgacggctaccagagctactgcaccatctgttgcggcggaagagaggtgctgatgtgtggaaataacaactgctgccggtgcttctgcgtggaatgcgtggacctgctggtgggccccggcgccgcccaggccgctattaaggaagatccttggaactgctacatgtgcggccacaagggcacatacggcctgctgagacggagagaggactggcctagcagactgcagatgttcttcgccaataaccacgaccaggagttcgacccccctaaggtgtaccctcccgtccccgccgagaagagaaagcccatccgggtcctgagcctgttcgatggcatcgccaccggtctgctggtgctgaaggacctgggcatccaggtggataggtacattgcctccgaggtgtgcgaggactccatcaccgtgggaatggtgcgtcatcagggcaagatcatgtacgtgggcgacgtgcggagcgtgacacagaagcatatccaggagtggggccctttcgacctggtgatcggcggcagcccttgcaatgacctgagcatcgtgaacccagcccggaagggcctgtacgagggaaccggcagactgttcttcgagttttacagactgctgcacgacgcccggcctaaggaaggcgacgaccggcccttcttttggctgttcgagaatgtggtggccatgggagtcagcgacaagcgggatattagccggttcctggagagcaaccccgtgatgatcgatgccaaggaagtgagcgccgcccaccgggccagatacttctggggcaatctgcctggcatgaacagacccctggccagcaccgtgaacgacaagctggagctgcaggagtgcctggagcacggccggatcgccaagttcagcaaggtgagaaccatcaccacccgaagcaacagcatcaaacaaggcaaggaccagcactttcctgtgttcatgaacgagaaggaggacatcctgtggtgtaccgagatggagagagtgttcgggttcccagtccactacacagatgtcagcaacatgtctagactggccagacagagactgctgggaagaagctggtccgtccctgtgatcagacacctgttcgcccctctgaaggagtacttcgcctgcgtgagcagcggcaacagcaacgccaacagccggggccccagcttctctagcggcctggtgccactgtccctgagagggagccacatgggccccatggagatctacaaaaccgtgagcgcctggaagcggcagcctgtgcgcgtgctgagcctgtttcggaatatcgataaagtcctgaaaagcctgggattcctggagagcggctctggctccggcggtggcaccctgaagtacgtggaggatgtgacaaacgtggtcagacgggatgtggagaagtggggccccttcgatctggtgtacggcagcacccaacccctgggcagctcttgtgaccggtgccctggctggtacatgtttcagttccaccggatcctgcagtacgccctgccgagacaggagtcccagcggccattcttttggattttcatggacaacttgctgctgaccgaggatgaccaggaaactaccactcggttcctgcagaccgaagccgtgaccctgcaggacgtgagaggccgggactaccagaacgccatgcgggtgtggtccaacatccctggactgaaaagcaagcacgcacctctgacccctaaagaagaggagtacctgcaggcccaggtgcggagcagaagcaagctggacgcccctaaggtggatctgctggtgaagaattgcctcctgcccctgagagagtacttcaagtatttcagccagaatagtctgcccctgggcggcccaagcagcggcgcccctcctcccagcggcggcagcccagccggctccccaacctctaccgaggagggcacctctgagtccgccacccccgagagcggccctggcacctccaccgagcccagcgagggcagcgcacccggcagccctgccggcagccccacctccacagaggagggaaccagcaccgagcccagcgaaggcagcgccccaggcaccagcaccgagcctagtgagggcggctctggcggcggcagcgcccaggagattaaacggatcaacaagatcagaagaagacttgtgaaagacagcaacaccaagaaggccggcaagacaggccccatgaaaaccctgctggttagagtgatgacacccgatctgagagagcggctggaaaacctgagaaagaagcctgaaaatatcccccagcccatcagcaatacatctagagccaacctgaataagctgctgaccgattacaccgaaatgaagaaggcgatcctgcatgtgtactgggaagagttccagaaggaccctgtgggcctgatgagccgggtggcccagcctgccagcaagaagatcgatcagaacaagctgaaacctgagatggacgagaagggcaacctgaccaccgccggctttgcctgctctcagtgtggccagcccctgttcgtgtacaagctggagcaggtgtctgagaagggcaaggcttacaccaactacttcggacggtgcaatgtggccgagcacgaaaagctgatcctgctggcccagctgaagcccgagaaggatagcgacgaagccgtgacatatagcctgggaaagtttgggcagagggccctggatttctacagcattcatgtgaccaaggagtccacccaccccgtgaagcccctggcccagatcgccggaaacagatacgcctccggacctgtgggaaaggccctgagcgacgcatgtatgggcacaatcgcctccttcctgtctaagtaccaggacatcatcatcgaacaccagaaggtggtgaagggcaaccagaagagactggagagcctgcgggagctggccggcaaggaaaacctggaataccctagcgtgaccctgccacctcagcctcacaccaaggagggcgttgatgcctacaacgaagtgatcgcccgggtgcgaatgtgggtgaacctgaacctgtggcagaagctgaagctaagcagagatgatgccaagcctctgctgagactgaagggattcccttcctttcctctggtcgagagacaggccaacgaagtggactggtgggacatggtgtgtaacgtgaagaagctgatcaacgagaaaaaggaggatggcaaggtgttttggcagaatctggctggctacaagagacaggaagccctgagaccatacctgagcagcgaggaagatcggaagaagggaaagaaattcgctcggtaccagctgggcgacctgctgctgcacctggaaaagaagcacggcgaggactggggaaaggtgtacgacgaggcctgggagcggattgacaagaaagtggaaggcctgagcaagcacatcaagctggaagaggaacggagaagcgaggacgcccagagcaaggccgccctgaccgactggctgcgggctaaggccagcttcgtgatcgagggcctgaaggaggccgacaaggacgagttctgcagatgcgagctgaagctgcagaagtggtacggggacctgcggggaaagcccttcgccatcgaagccgagaacagcatcctggacatcagcggcttcagcaagcagtacaactgtgccttcatctggcagaaggacggcgtgaagaagctgaacctgtacctgatcatcaactacttcaagggcggcaagctgcggttcaagaagatcaaacctgaagccttcgaagccaacagattctacaccgtgatcaacaaaaagagcggcgagatcgtgcccatggaggtgaacttcaacttcgacgaccccaacctgatcatcctgcctctggcctttggcaagagacagggcagagaattcatctggaacgacctgctgtccctggaaaccggcagcctgaagctggccaacggaagagtgatcgagaagacactgtacaacagaagaacccggcaggatgagcctgccctgttcgtggccctgaccttcgagcggcgggaggtcctggactcctccaatatcaaaccaatgaacctgatcggcgtggcaagaggcgaaaacatccccgccgtgatcgccctgaccgaccccgagggctgcccactgagccggtttaaggatagcctgggaaacccaacccacatcctgagaatcggcgagagctataaggagaagcagcggaccatccaggccaagaaggaggtggagcagcggagagccggcggctacagccggaagtacgccagcaaagccaagaatctggcagacgatatggtgagaaacaccgctagagatctgctgtactacgccgtgacccaggatgccatgctgatcttcgccaacctgagccggggcttcggccggcagggcaagcggaccttcatggccgagagacagtacacacggatggaggactggctgaccgccaagctggcctacgagggcctgagcaagacctacctgtccaagacactggcccagtacacctccaagacatgcagcaactgtgggtttaccatcaccagcgccgactacgacagggtgctggagaagctgaagaagacagcaacaggctggatgaccacaattaacggcaaggagctgaaggtggagggccagattacctactacaacagatacaagagacagaacgtagtcaaggacctgtccgtcgagctggatagactgagcgaagaatctgtgaacaacgacatctcctcctggacaaagggcagaagcggagaagctctgagcctcctgaagaaaagattctcccatagacccgtgcaggagaagttcgtgtgcctgaactgcggcttcgagacacacgcagccgagcaagccgccctgaacatcgccagatcctggctgttcctgcggagccaggagtacaagaaataccagacaaacaagacaaccggcaacaccgataagagagccttcgtcgagacctggcagtccttttaccggaagaagcttaaggaggtgtggaaacctgccgtgcggtctggcggatctggcggaggctccacaagcgcccaggagaccgtgaccttcaaggacgtggccgtggacttcacccaggaggagtggggccagctggaccccgtgcagaggaccctgtacagggacgtgatgctggagacctacggccacctgctgagcgtgggcaaccagatcgccaagcccgaggtgatcagcctgctggagcagggcgaggagccctggagcatggacagggtgtaccccccccagaggacctgccccgagtggatgaggaccagccccaagaaaaagagaaaagtctaagctgccttctgcggggcttgccttctggccatgcccttcttctctcccttgcacctgtacctcttggtctttgaataaagcctgagtaggaaggctagcaaaaaaaaaaaaaaaaaaaaaaaaaaaaaaaaaaaaaaaaaaaaaaaaaaaaaaaaaaaaaaaaaaaaaaaaaaaaaaaa

SEQ ID NO: 6876 - RNA, 5797 nt, synthetic construct
  source 1..5797: mol_type = other RNA
aggaaataagagagaaaagaagagtaagaagaaatataagagccaccatggcccctaagaagaagcgtaaagtgagccggatggaacgcctcgtctacgaggtgcggcagaagtgcagaaacatcgaggacatctgcatctcctgcggatctctgaacgtgaccctggagcacccactgttcatcggcggcatgtgccagaactgtaaaaactgttttctggagtgtgcctatcaatacgacgatgacggctaccagagctactgcaccatctgttgcggcggaagagaggtgctgatgtgtggaaataacaactgctgccggtgcttctgcgtggaatgcgtggacctgctggtgggccccggcgccgcccaggccgctattaaggaagatccttggaactgctacatgtgcggccacaagggcacatacggcctgctgagacggagagaggactggcctagcagactgcagatgttcttcgccaataaccacgaccaggagttcgacccccctaaggtgtaccctcccgtccccgccgagaagagaaagcccatccgggtcctgagcctgttcgatggcatcgccaccggtctgctggtgctgaaggacctgggcatccaggtggataggtacattgcctccgaggtgtgcgaggactccatcaccgtgggaatggtgcgtcatcagggcaagatcatgtacgtgggcgacgtgcggagcgtgacacagaagcatatccaggagtggggccctttcgacctggtgatcggcggcagcccttgcaatgacctgagcatcgtgaacccagcccggaagggcctgtacgagggaaccggcagactgttcttcgagttttacagactgctgcacgacgcccggcctaaggaaggcgacgaccggcccttcttttggctgttcgagaatgtggtggccatgggagtcagcgacaagcgggatattagccggttcctggagagcaaccccgtgatgatcgatgccaaggaagtgagcgccgcccaccgggccagatacttctggggcaatctgcctggcatgaacagacccctggccagcaccgtgaacgacaagctggagctgcaggagtgcctggagcacggccggatcgccaagttcagcaaggtgagaaccatcaccacccgaagcaacagcatcaaacaaggcaaggaccagcactttcctgtgttcatgaacgagaaggaggacatcctgtggtgtaccgagatggagagagtgttcgggttcccagtccactacacagatgtcagcaacatgtctagactggccagacagagactgctgggaagaagctggtccgtccctgtgatcagacacctgttcgcccctctgaaggagtacttcgcctgcgtgagcagcggcaacagcaacgccaacagccggggccccagcttctctagcggcctggtgccactgtccctgagagggagccacatgggccccatggagatctacaaaaccgtgagcgcctggaagcggcagcctgtgcgcgtgctgagcctgtttcggaatatcgataaagtcctgaaaagcctgggattcctggagagcggctctggctccggcggtggcaccctgaagtacgtggaggatgtgacaaacgtggtcagacgggatgtggagaagtggggccccttcgatctggtgtacggcagcacccaacccctgggcagctcttgtgaccggtgccctggctggtacatgtttcagttccaccggatcctgcagtacgccctgccgagacaggagtcccagcggccattcttttggattttcatggacaacttgctgctgaccgaggatgaccaggaaactaccactcggttcctgcagaccgaagccgtgaccctgcaggacgtgagaggccgggactaccagaacgccatgcgggtgtggtccaacatccctggactgaaaagcaagcacgcacctctgacccctaaagaagaggagtacctgcaggcccaggtgcggagcagaagcaagctggacgcccctaaggtggatctgctggtgaagaattgcctcctgcccctgagagagtacttcaagtatttcagccagaatagtctgcccctgggcggcccaagcagcggcgcccctcctcccagcggcggcagcccagccggctccccaacctctaccgaggagggcacctctgagtccgccacccccgagagcggccctggcacctccaccgagcccagcgagggcagcgcacccggcagccctgccggcagccccacctccacagaggagggaaccagcaccgagcccagcgaaggcagcgccccaggcaccagcaccgagcctagtgagggcggctctggcggcggcagcgcccaggagattaaacggatcaacaagatcagaagaagacttgtgaaagacagcaacaccaagaaggccggcaagacaggccccatgaaaaccctgctggttagagtgatgacacccgatctgagagagcggctggaaaacctgagaaagaagcctgaaaatatcccccagcccatcagcaatacatctagagccaacctgaataagctgctgaccgattacaccgaaatgaagaaggcgatcctgcatgtgtactgggaagagttccagaaggaccctgtgggcctgatgagccgggtggcccagcctgccagcaagaagatcgatcagaacaagctgaaacctgagatggacgagaagggcaacctgaccaccgccggctttgcctgctctcagtgtggccagcccctgttcgtgtacaagctggagcaggtgtctgagaagggcaaggcttacaccaactacttcggacggtgcaatgtggccgagcacgaaaagctgatcctgctggcccagctgaagcccgagaaggatagcgacgaagccgtgacatatagcctgggaaagtttgggcagagggccctggatttctacagcattcatgtgaccaaggagtccacccaccccgtgaagcccctggcccagatcgccggaaacagatacgcctccggacctgtgggaaaggccctgagcgacgcatgtatgggcacaatcgcctccttcctgtctaagtaccaggacatcatcatcgaacaccagaaggtggtgaagggcaaccagaagagactggagagcctgcgggagctggccggcaaggaaaacctggaataccctagcgtgaccctgccacctcagcctcacaccaaggagggcgttgatgcctacaacgaagtgatcgcccgggtgcgaatgtgggtgaacctgaacctgtggcagaagctgaagctaagcagagatgatgccaagcctctgctgagactgaagggattcccttcctttcctctggtcgagagacaggccaacgaagtggactggtgggacatggtgtgtaacgtgaagaagctgatcaacgagaaaaaggaggatggcaaggtgttttggcagaatctggctggctacaagagacaggaagccctgagaccatacctgagcagcgaggaagatcggaagaagggaaagaaattcgctcggtaccagctgggcgacctgctgctgcacctggaaaagaagcacggcgaggactggggaaaggtgtacgacgaggcctgggagcggattgacaagaaagtggaaggcctgagcaagcacatcaagctggaagaggaacggagaagcgaggacgcccagagcaaggccgccctgaccgactggctgcgggctaaggccagcttcgtgatcgagggcctgaaggaggccgacaaggacgagttctgcagatgcgagctgaagctgcagaagtggtacggggacctgcggggaaagcccttcgccatcgaagccgagaacagcatcctggacatcagcggcttcagcaagcagtacaactgtgccttcatctggcagaaggacggcgtgaagaagctgaacctgtacctgatcatcaactacttcaagggcggcaagctgcggttcaagaagatcaaacctgaagccttcgaagccaacagattctacaccgtgatcaacaaaaagagcggcgagatcgtgcccatggaggtgaacttcaacttcgacgaccccaacctgatcatcctgcctctggcctttggcaagagacagggcagagaattcatctggaacgacctgctgtccctggaaaccggcagcctgaagctggccaacggaagagtgatcgagaagacactgtacaacagaagaacccggcaggatgagcctgccctgttcgtggccctgaccttcgagcggcgggaggtcctggactcctccaatatcaaaccaatgaacctgatcggcgtggcaagaggcgaaaacatccccgccgtgatcgccctgaccgaccccgagggctgcccactgagccggtttaaggatagcctgggaaacccaacccacatcctgagaatcggcgagagctataaggagaagcagcggaccatccaggccaagaaggaggtggagcagcggagagccggcggctacagccggaagtacgccagcaaagccaagaatctggcagacgatatggtgagaaacaccgctagagatctgctgtactacgccgtgacccaggatgccatgctgatcttcgccaacctgagccggggcttcggccggcagggcaagcggaccttcatggccgagagacagtacacacggatggaggactggctgaccgccaagctggcctacgagggcctgagcaagacctacctgtccaagacactggcccagtacacctccaagacatgcagcaactgtgggtttaccatcaccagcgccgactacgacagggtgctggagaagctgaagaagacagcaacaggctggatgaccacaattaacggcaaggagctgaaggtggagggccagattacctactacaacagatacaagagacagaacgtagtcaaggacctgtccgtcgagctggatagactgagcgaagaatctgtgaacaacgacatctcctcctggacaaagggcagaagcggagaagctctgagcctcctgaagaaaagattctcccatagacccgtgcaggagaagttcgtgtgcctgaactgcggcttcgagacacacgcagccgagcaagccgccctgaacatcgccagatcctggctgttcctgcggagccaggagtacaagaaataccagacaaacaagacaaccggcaacaccgataagagagccttcgtcgagacctggcagtccttttaccggaagaagcttaaggaggtgtggaaacctgccgtgcggtctggcggatctggcggaggctccacaagcatggccgccgtgagccccaccaccaggtgccaggagagcgtgaccttcgaggacgtggccgtggtgttcaccgacgaggagtggagccacctggtgcccatccagagggacctgtacaaggaggtgatgctggagaactacaacagcatcgtgagcctgggcctgcccgtgccccagcccgacgtgatcttccagctgaagaggggcgacaagccctgggtggtggacctgcacggcagcgagaccagccccaagaaaaagagaaaagtctaagctgccttctgcggggcttgccttctggccatgcccttcttctctcccttgcacctgtacctcttggtctttgaataaagcctgagtaggaaggctagcaaaaaaaaaaaaaaaaaaaaaaaaaaaaaaaaaaaaaaaaaaaaaaaaaaaaaaaaaaaaaaaaaaaaaaaaaaaaaaaa

SEQ ID NO: 6877 - RNA, 5797 nt, synthetic construct
  source 1..5797: mol_type = other RNA
aggaaataagagagaaaagaagagtaagaagaaatataagagccaccatggcccctaagaagaagcgtaaagtgagccggatggaacgcctcgtctacgaggtgcggcagaagtgcagaaacatcgaggacatctgcatctcctgcggatctctgaacgtgaccctggagcacccactgttcatcggcggcatgtgccagaactgtaaaaactgttttctggagtgtgcctatcaatacgacgatgacggctaccagagctactgcaccatctgttgcggcggaagagaggtgctgatgtgtggaaataacaactgctgccggtgcttctgcgtggaatgcgtggacctgctggtgggccccggcgccgcccaggccgctattaaggaagatccttggaactgctacatgtgcggccacaagggcacatacggcctgctgagacggagagaggactggcctagcagactgcagatgttcttcgccaataaccacgaccaggagttcgacccccctaaggtgtaccctcccgtccccgccgagaagagaaagcccatccgggtcctgagcctgttcgatggcatcgccaccggtctgctggtgctgaaggacctgggcatccaggtggataggtacattgcctccgaggtgtgcgaggactccatcaccgtgggaatggtgcgtcatcagggcaagatcatgtacgtgggcgacgtgcggagcgtgacacagaagcatatccaggagtggggccctttcgacctggtgatcggcggcagcccttgcaatgacctgagcatcgtgaacccagcccggaagggcctgtacgagggaaccggcagactgttcttcgagttttacagactgctgcacgacgcccggcctaaggaaggcgacgaccggcccttcttttggctgttcgagaatgtggtggccatgggagtcagcgacaagcgggatattagccggttcctggagagcaaccccgtgatgatcgatgccaaggaagtgagcgccgcccaccgggccagatacttctggggcaatctgcctggcatgaacagacccctggccagcaccgtgaacgacaagctggagctgcaggagtgcctggagcacggccggatcgccaagttcagcaaggtgagaaccatcaccacccgaagcaacagcatcaaacaaggcaaggaccagcactttcctgtgttcatgaacgagaaggaggacatcctgtggtgtaccgagatggagagagtgttcgggttcccagtccactacacagatgtcagcaacatgtctagactggccagacagagactgctgggaagaagctggtccgtccctgtgatcagacacctgttcgcccctctgaaggagtacttcgcctgcgtgagcagcggcaacagcaacgccaacagccggggccccagcttctctagcggcctggtgccactgtccctgagagggagccacatgggccccatggagatctacaaaaccgtgagcgcctggaagcggcagcctgtgcgcgtgctgagcctgtttcggaatatcgataaagtcctgaaaagcctgggattcctggagagcggctctggctccggcggtggcaccctgaagtacgtggaggatgtgacaaacgtggtcagacgggatgtggagaagtggggccccttcgatctggtgtacggcagcacccaacccctgggcagctcttgtgaccggtgccctggctggtacatgtttcagttccaccggatcctgcagtacgccctgccgagacaggagtcccagcggccattcttttggattttcatggacaacttgctgctgaccgaggatgaccaggaaactaccactcggttcctgcagaccgaagccgtgaccctgcaggacgtgagaggccgggactaccagaacgccatgcgggtgtggtccaacatccctggactgaaaagcaagcacgcacctctgacccctaaagaagaggagtacctgcaggcccaggtgcggagcagaagcaagctggacgcccctaaggtggatctgctggtgaagaattgcctcctgcccctgagagagtacttcaagtatttcagccagaatagtctgcccctgggcggcccaagcagcggcgcccctcctcccagcggcggcagcccagccggctccccaacctctaccgaggagggcacctctgagtccgccacccccgagagcggccctggcacctccaccgagcccagcgagggcagcgcacccggcagccctgccggcagccccacctccacagaggagggaaccagcaccgagcccagcgaaggcagcgccccaggcaccagcaccgagcctagtgagggcggctctggcggcggcagcgcccaggagattaaacggatcaacaagatcagaagaagacttgtgaaagacagcaacaccaagaaggccggcaagacaggccccatgaaaaccctgctggttagagtgatgacacccgatctgagagagcggctggaaaacctgagaaagaagcctgaaaatatcccccagcccatcagcaatacatctagagccaacctgaataagctgctgaccgattacaccgaaatgaagaaggcgatcctgcatgtgtactgggaagagttccagaaggaccctgtgggcctgatgagccgggtggcccagcctgccagcaagaagatcgatcagaacaagctgaaacctgagatggacgagaagggcaacctgaccaccgccggctttgcctgctctcagtgtggccagcccctgttcgtgtacaagctggagcaggtgtctgagaagggcaaggcttacaccaactacttcggacggtgcaatgtggccgagcacgaaaagctgatcctgctggcccagctgaagcccgagaaggatagcgacgaagccgtgacatatagcctgggaaagtttgggcagagggccctggatttctacagcattcatgtgaccaaggagtccacccaccccgtgaagcccctggcccagatcgccggaaacagatacgcctccggacctgtgggaaaggccctgagcgacgcatgtatgggcacaatcgcctccttcctgtctaagtaccaggacatcatcatcgaacaccagaaggtggtgaagggcaaccagaagagactggagagcctgcgggagctggccggcaaggaaaacctggaataccctagcgtgaccctgccacctcagcctcacaccaaggagggcgttgatgcctacaacgaagtgatcgcccgggtgcgaatgtgggtgaacctgaacctgtggcagaagctgaagctaagcagagatgatgccaagcctctgctgagactgaagggattcccttcctttcctctggtcgagagacaggccaacgaagtggactggtgggacatggtgtgtaacgtgaagaagctgatcaacgagaaaaaggaggatggcaaggtgttttggcagaatctggctggctacaagagacaggaagccctgagaccatacctgagcagcgaggaagatcggaagaagggaaagaaattcgctcggtaccagctgggcgacctgctgctgcacctggaaaagaagcacggcgaggactggggaaaggtgtacgacgaggcctgggagcggattgacaagaaagtggaaggcctgagcaagcacatcaagctggaagaggaacggagaagcgaggacgcccagagcaaggccgccctgaccgactggctgcgggctaaggccagcttcgtgatcgagggcctgaaggaggccgacaaggacgagttctgcagatgcgagctgaagctgcagaagtggtacggggacctgcggggaaagcccttcgccatcgaagccgagaacagcatcctggacatcagcggcttcagcaagcagtacaactgtgccttcatctggcagaaggacggcgtgaagaagctgaacctgtacctgatcatcaactacttcaagggcggcaagctgcggttcaagaagatcaaacctgaagccttcgaagccaacagattctacaccgtgatcaacaaaaagagcggcgagatcgtgcccatggaggtgaacttcaacttcgacgaccccaacctgatcatcctgcctctggcctttggcaagagacagggcagagaattcatctggaacgacctgctgtccctggaaaccggcagcctgaagctggccaacggaagagtgatcgagaagacactgtacaacagaagaacccggcaggatgagcctgccctgttcgtggccctgaccttcgagcggcgggaggtcctggactcctccaatatcaaaccaatgaacctgatcggcgtggcaagaggcgaaaacatccccgccgtgatcgccctgaccgaccccgagggctgcccactgagccggtttaaggatagcctgggaaacccaacccacatcctgagaatcggcgagagctataaggagaagcagcggaccatccaggccaagaaggaggtggagcagcggagagccggcggctacagccggaagtacgccagcaaagccaagaatctggcagacgatatggtgagaaacaccgctagagatctgctgtactacgccgtgacccaggatgccatgctgatcttcgccaacctgagccggggcttcggccggcagggcaagcggaccttcatggccgagagacagtacacacggatggaggactggctgaccgccaagctggcctacgagggcctgagcaagacctacctgtccaagacactggcccagtacacctccaagacatgcagcaactgtgggtttaccatcaccagcgccgactacgacagggtgctggagaagctgaagaagacagcaacaggctggatgaccacaattaacggcaaggagctgaaggtggagggccagattacctactacaacagatacaagagacagaacgtagtcaaggacctgtccgtcgagctggatagactgagcgaagaatctgtgaacaacgacatctcctcctggacaaagggcagaagcggagaagctctgagcctcctgaagaaaagattctcccatagacccgtgcaggagaagttcgtgtgcctgaactgcggcttcgagacacacgcagccgagcaagccgccctgaacatcgccagatcctggctgttcctgcggagccaggagtacaagaaataccagacaaacaagacaaccggcaacaccgataagagagccttcgtcgagacctggcagtccttttaccggaagaagcttaaggaggtgtggaaacctgccgtgcggtctggcggatctggcggaggctccacaagcttcgagagcgtggtgttcgaggacgtggccgtggacttcacccccgaggagtgggccctgctggaccccgcccagaggaacctgtacagggacgtgatgctggagaccttcaggaacctggccagcgtgggcgagaactggaagtgccacagcatcgaggaccagcacaagaaccagggcacccacctgaggtggagggtggtggagatccccagcgagaacaacgagagcaaccagtgcggcaccagccccaagaaaaagagaaaagtctaagctgccttctgcggggcttgccttctggccatgcccttcttctctcccttgcacctgtacctcttggtctttgaataaagcctgagtaggaaggctagcaaaaaaaaaaaaaaaaaaaaaaaaaaaaaaaaaaaaaaaaaaaaaaaaaaaaaaaaaaaaaaaaaaaaaaaaaaaaaaaa

SEQ ID NO: 6878 - RNA, 5797 nt, synthetic construct
  source 1..5797: mol_type = other RNA
aggaaataagagagaaaagaagagtaagaagaaatataagagccaccatggcccctaagaagaagcgtaaagtgagccggatggaacgcctcgtctacgaggtgcggcagaagtgcagaaacatcgaggacatctgcatctcctgcggatctctgaacgtgaccctggagcacccactgttcatcggcggcatgtgccagaactgtaaaaactgttttctggagtgtgcctatcaatacgacgatgacggctaccagagctactgcaccatctgttgcggcggaagagaggtgctgatgtgtggaaataacaactgctgccggtgcttctgcgtggaatgcgtggacctgctggtgggccccggcgccgcccaggccgctattaaggaagatccttggaactgctacatgtgcggccacaagggcacatacggcctgctgagacggagagaggactggcctagcagactgcagatgttcttcgccaataaccacgaccaggagttcgacccccctaaggtgtaccctcccgtccccgccgagaagagaaagcccatccgggtcctgagcctgttcgatggcatcgccaccggtctgctggtgctgaaggacctgggcatccaggtggataggtacattgcctccgaggtgtgcgaggactccatcaccgtgggaatggtgcgtcatcagggcaagatcatgtacgtgggcgacgtgcggagcgtgacacagaagcatatccaggagtggggccctttcgacctggtgatcggcggcagcccttgcaatgacctgagcatcgtgaacccagcccggaagggcctgtacgagggaaccggcagactgttcttcgagttttacagactgctgcacgacgcccggcctaaggaaggcgacgaccggcccttcttttggctgttcgagaatgtggtggccatgggagtcagcgacaagcgggatattagccggttcctggagagcaaccccgtgatgatcgatgccaaggaagtgagcgccgcccaccgggccagatacttctggggcaatctgcctggcatgaacagacccctggccagcaccgtgaacgacaagctggagctgcaggagtgcctggagcacggccggatcgccaagttcagcaaggtgagaaccatcaccacccgaagcaacagcatcaaacaaggcaaggaccagcactttcctgtgttcatgaacgagaaggaggacatcctgtggtgtaccgagatggagagagtgttcgggttcccagtccactacacagatgtcagcaacatgtctagactggccagacagagactgctgggaagaagctggtccgtccctgtgatcagacacctgttcgcccctctgaaggagtacttcgcctgcgtgagcagcggcaacagcaacgccaacagccggggccccagcttctctagcggcctggtgccactgtccctgagagggagccacatgggccccatggagatctacaaaaccgtgagcgcctggaagcggcagcctgtgcgcgtgctgagcctgtttcggaatatcgataaagtcctgaaaagcctgggattcctggagagcggctctggctccggcggtggcaccctgaagtacgtggaggatgtgacaaacgtggtcagacgggatgtggagaagtggggccccttcgatctggtgtacggcagcacccaacccctgggcagctcttgtgaccggtgccctggctggtacatgtttcagttccaccggatcctgcagtacgccctgccgagacaggagtcccagcggccattcttttggattttcatggacaacttgctgctgaccgaggatgaccaggaaactaccactcggttcctgcagaccgaagccgtgaccctgcaggacgtgagaggccgggactaccagaacgccatgcgggtgtggtccaacatccctggactgaaaagcaagcacgcacctctgacccctaaagaagaggagtacctgcaggcccaggtgcggagcagaagcaagctggacgcccctaaggtggatctgctggtgaagaattgcctcctgcccctgagagagtacttcaagtatttcagccagaatagtctgcccctgggcggcccaagcagcggcgcccctcctcccagcggcggcagcccagccggctccccaacctctaccgaggagggcacctctgagtccgccacccccgagagcggccctggcacctccaccgagcccagcgagggcagcgcacccggcagccctgccggcagccccacctccacagaggagggaaccagcaccgagcccagcgaaggcagcgccccaggcaccagcaccgagcctagtgagggcggctctggcggcggcagcgcccaggagattaaacggatcaacaagatcagaagaagacttgtgaaagacagcaacaccaagaaggccggcaagacaggccccatgaaaaccctgctggttagagtgatgacacccgatctgagagagcggctggaaaacctgagaaagaagcctgaaaatatcccccagcccatcagcaatacatctagagccaacctgaataagctgctgaccgattacaccgaaatgaagaaggcgatcctgcatgtgtactgggaagagttccagaaggaccctgtgggcctgatgagccgggtggcccagcctgccagcaagaagatcgatcagaacaagctgaaacctgagatggacgagaagggcaacctgaccaccgccggctttgcctgctctcagtgtggccagcccctgttcgtgtacaagctggagcaggtgtctgagaagggcaaggcttacaccaactacttcggacggtgcaatgtggccgagcacgaaaagctgatcctgctggcccagctgaagcccgagaaggatagcgacgaagccgtgacatatagcctgggaaagtttgggcagagggccctggatttctacagcattcatgtgaccaaggagtccacccaccccgtgaagcccctggcccagatcgccggaaacagatacgcctccggacctgtgggaaaggccctgagcgacgcatgtatgggcacaatcgcctccttcctgtctaagtaccaggacatcatcatcgaacaccagaaggtggtgaagggcaaccagaagagactggagagcctgcgggagctggccggcaaggaaaacctggaataccctagcgtgaccctgccacctcagcctcacaccaaggagggcgttgatgcctacaacgaagtgatcgcccgggtgcgaatgtgggtgaacctgaacctgtggcagaagctgaagctaagcagagatgatgccaagcctctgctgagactgaagggattcccttcctttcctctggtcgagagacaggccaacgaagtggactggtgggacatggtgtgtaacgtgaagaagctgatcaacgagaaaaaggaggatggcaaggtgttttggcagaatctggctggctacaagagacaggaagccctgagaccatacctgagcagcgaggaagatcggaagaagggaaagaaattcgctcggtaccagctgggcgacctgctgctgcacctggaaaagaagcacggcgaggactggggaaaggtgtacgacgaggcctgggagcggattgacaagaaagtggaaggcctgagcaagcacatcaagctggaagaggaacggagaagcgaggacgcccagagcaaggccgccctgaccgactggctgcgggctaaggccagcttcgtgatcgagggcctgaaggaggccgacaaggacgagttctgcagatgcgagctgaagctgcagaagtggtacggggacctgcggggaaagcccttcgccatcgaagccgagaacagcatcctggacatcagcggcttcagcaagcagtacaactgtgccttcatctggcagaaggacggcgtgaagaagctgaacctgtacctgatcatcaactacttcaagggcggcaagctgcggttcaagaagatcaaacctgaagccttcgaagccaacagattctacaccgtgatcaacaaaaagagcggcgagatcgtgcccatggaggtgaacttcaacttcgacgaccccaacctgatcatcctgcctctggcctttggcaagagacagggcagagaattcatctggaacgacctgctgtccctggaaaccggcagcctgaagctggccaacggaagagtgatcgagaagacactgtacaacagaagaacccggcaggatgagcctgccctgttcgtggccctgaccttcgagcggcgggaggtcctggactcctccaatatcaaaccaatgaacctgatcggcgtggcaagaggcgaaaacatccccgccgtgatcgccctgaccgaccccgagggctgcccactgagccggtttaaggatagcctgggaaacccaacccacatcctgagaatcggcgagagctataaggagaagcagcggaccatccaggccaagaaggaggtggagcagcggagagccggcggctacagccggaagtacgccagcaaagccaagaatctggcagacgatatggtgagaaacaccgctagagatctgctgtactacgccgtgacccaggatgccatgctgatcttcgccaacctgagccggggcttcggccggcagggcaagcggaccttcatggccgagagacagtacacacggatggaggactggctgaccgccaagctggcctacgagggcctgagcaagacctacctgtccaagacactggcccagtacacctccaagacatgcagcaactgtgggtttaccatcaccagcgccgactacgacagggtgctggagaagctgaagaagacagcaacaggctggatgaccacaattaacggcaaggagctgaaggtggagggccagattacctactacaacagatacaagagacagaacgtagtcaaggacctgtccgtcgagctggatagactgagcgaagaatctgtgaacaacgacatctcctcctggacaaagggcagaagcggagaagctctgagcctcctgaagaaaagattctcccatagacccgtgcaggagaagttcgtgtgcctgaactgcggcttcgagacacacgcagccgagcaagccgccctgaacatcgccagatcctggctgttcctgcggagccaggagtacaagaaataccagacaaacaagacaaccggcaacaccgataagagagccttcgtcgagacctggcagtccttttaccggaagaagcttaaggaggtgtggaaacctgccgtgcggtctggcggatctggcggaggctccacaagcaggcccagggccctgaagttcgccgacgtggccgtgtacttcagccccgaggagtggggctgcctgaggcccgcccagaggctgctgtacagggaggtgatgagggagacctacggcctgctgggcgccctgggctgcgccggccccacccccgccctgatcagctggctggagaggaacaccgacgactgggagcccgccgccctggacccccaggagtacaggaggtgggccaccttccagaccagccccaagaaaaagagaaaagtctaagctgccttctgcggggcttgccttctggccatgcccttcttctctcccttgcacctgtacctcttggtctttgaataaagcctgagtaggaaggctagcaaaaaaaaaaaaaaaaaaaaaaaaaaaaaaaaaaaaaaaaaaaaaaaaaaaaaaaaaaaaaaaaaaaaaaaaaaaaaaaa

SEQ ID NO: 6879 - RNA, 5797 nt, synthetic construct
  source 1..5797: mol_type = other RNA
aggaaataagagagaaaagaagagtaagaagaaatataagagccaccatggcccctaagaagaagcgtaaagtgagccggatggaacgcctcgtctacgaggtgcggcagaagtgcagaaacatcgaggacatctgcatctcctgcggatctctgaacgtgaccctggagcacccactgttcatcggcggcatgtgccagaactgtaaaaactgttttctggagtgtgcctatcaatacgacgatgacggctaccagagctactgcaccatctgttgcggcggaagagaggtgctgatgtgtggaaataacaactgctgccggtgcttctgcgtggaatgcgtggacctgctggtgggccccggcgccgcccaggccgctattaaggaagatccttggaactgctacatgtgcggccacaagggcacatacggcctgctgagacggagagaggactggcctagcagactgcagatgttcttcgccaataaccacgaccaggagttcgacccccctaaggtgtaccctcccgtccccgccgagaagagaaagcccatccgggtcctgagcctgttcgatggcatcgccaccggtctgctggtgctgaaggacctgggcatccaggtggataggtacattgcctccgaggtgtgcgaggactccatcaccgtgggaatggtgcgtcatcagggcaagatcatgtacgtgggcgacgtgcggagcgtgacacagaagcatatccaggagtggggccctttcgacctggtgatcggcggcagcccttgcaatgacctgagcatcgtgaacccagcccggaagggcctgtacgagggaaccggcagactgttcttcgagttttacagactgctgcacgacgcccggcctaaggaaggcgacgaccggcccttcttttggctgttcgagaatgtggtggccatgggagtcagcgacaagcgggatattagccggttcctggagagcaaccccgtgatgatcgatgccaaggaagtgagcgccgcccaccgggccagatacttctggggcaatctgcctggcatgaacagacccctggccagcaccgtgaacgacaagctggagctgcaggagtgcctggagcacggccggatcgccaagttcagcaaggtgagaaccatcaccacccgaagcaacagcatcaaacaaggcaaggaccagcactttcctgtgttcatgaacgagaaggaggacatcctgtggtgtaccgagatggagagagtgttcgggttcccagtccactacacagatgtcagcaacatgtctagactggccagacagagactgctgggaagaagctggtccgtccctgtgatcagacacctgttcgcccctctgaaggagtacttcgcctgcgtgagcagcggcaacagcaacgccaacagccggggccccagcttctctagcggcctggtgccactgtccctgagagggagccacatgggccccatggagatctacaaaaccgtgagcgcctggaagcggcagcctgtgcgcgtgctgagcctgtttcggaatatcgataaagtcctgaaaagcctgggattcctggagagcggctctggctccggcggtggcaccctgaagtacgtggaggatgtgacaaacgtggtcagacgggatgtggagaagtggggccccttcgatctggtgtacggcagcacccaacccctgggcagctcttgtgaccggtgccctggctggtacatgtttcagttccaccggatcctgcagtacgccctgccgagacaggagtcccagcggccattcttttggattttcatggacaacttgctgctgaccgaggatgaccaggaaactaccactcggttcctgcagaccgaagccgtgaccctgcaggacgtgagaggccgggactaccagaacgccatgcgggtgtggtccaacatccctggactgaaaagcaagcacgcacctctgacccctaaagaagaggagtacctgcaggcccaggtgcggagcagaagcaagctggacgcccctaaggtggatctgctggtgaagaattgcctcctgcccctgagagagtacttcaagtatttcagccagaatagtctgcccctgggcggcccaagcagcggcgcccctcctcccagcggcggcagcccagccggctccccaacctctaccgaggagggcacctctgagtccgccacccccgagagcggccctggcacctccaccgagcccagcgagggcagcgcacccggcagccctgccggcagccccacctccacagaggagggaaccagcaccgagcccagcgaaggcagcgccccaggcaccagcaccgagcctagtgagggcggctctggcggcggcagcgcccaggagattaaacggatcaacaagatcagaagaagacttgtgaaagacagcaacaccaagaaggccggcaagacaggccccatgaaaaccctgctggttagagtgatgacacccgatctgagagagcggctggaaaacctgagaaagaagcctgaaaatatcccccagcccatcagcaatacatctagagccaacctgaataagctgctgaccgattacaccgaaatgaagaaggcgatcctgcatgtgtactgggaagagttccagaaggaccctgtgggcctgatgagccgggtggcccagcctgccagcaagaagatcgatcagaacaagctgaaacctgagatggacgagaagggcaacctgaccaccgccggctttgcctgctctcagtgtggccagcccctgttcgtgtacaagctggagcaggtgtctgagaagggcaaggcttacaccaactacttcggacggtgcaatgtggccgagcacgaaaagctgatcctgctggcccagctgaagcccgagaaggatagcgacgaagccgtgacatatagcctgggaaagtttgggcagagggccctggatttctacagcattcatgtgaccaaggagtccacccaccccgtgaagcccctggcccagatcgccggaaacagatacgcctccggacctgtgggaaaggccctgagcgacgcatgtatgggcacaatcgcctccttcctgtctaagtaccaggacatcatcatcgaacaccagaaggtggtgaagggcaaccagaagagactggagagcctgcgggagctggccggcaaggaaaacctggaataccctagcgtgaccctgccacctcagcctcacaccaaggagggcgttgatgcctacaacgaagtgatcgcccgggtgcgaatgtgggtgaacctgaacctgtggcagaagctgaagctaagcagagatgatgccaagcctctgctgagactgaagggattcccttcctttcctctggtcgagagacaggccaacgaagtggactggtgggacatggtgtgtaacgtgaagaagctgatcaacgagaaaaaggaggatggcaaggtgttttggcagaatctggctggctacaagagacaggaagccctgagaccatacctgagcagcgaggaagatcggaagaagggaaagaaattcgctcggtaccagctgggcgacctgctgctgcacctggaaaagaagcacggcgaggactggggaaaggtgtacgacgaggcctgggagcggattgacaagaaagtggaaggcctgagcaagcacatcaagctggaagaggaacggagaagcgaggacgcccagagcaaggccgccctgaccgactggctgcgggctaaggccagcttcgtgatcgagggcctgaaggaggccgacaaggacgagttctgcagatgcgagctgaagctgcagaagtggtacggggacctgcggggaaagcccttcgccatcgaagccgagaacagcatcctggacatcagcggcttcagcaagcagtacaactgtgccttcatctggcagaaggacggcgtgaagaagctgaacctgtacctgatcatcaactacttcaagggcggcaagctgcggttcaagaagatcaaacctgaagccttcgaagccaacagattctacaccgtgatcaacaaaaagagcggcgagatcgtgcccatggaggtgaacttcaacttcgacgaccccaacctgatcatcctgcctctggcctttggcaagagacagggcagagaattcatctggaacgacctgctgtccctggaaaccggcagcctgaagctggccaacggaagagtgatcgagaagacactgtacaacagaagaacccggcaggatgagcctgccctgttcgtggccctgaccttcgagcggcgggaggtcctggactcctccaatatcaaaccaatgaacctgatcggcgtggcaagaggcgaaaacatccccgccgtgatcgccctgaccgaccccgagggctgcccactgagccggtttaaggatagcctgggaaacccaacccacatcctgagaatcggcgagagctataaggagaagcagcggaccatccaggccaagaaggaggtggagcagcggagagccggcggctacagccggaagtacgccagcaaagccaagaatctggcagacgatatggtgagaaacaccgctagagatctgctgtactacgccgtgacccaggatgccatgctgatcttcgccaacctgagccggggcttcggccggcagggcaagcggaccttcatggccgagagacagtacacacggatggaggactggctgaccgccaagctggcctacgagggcctgagcaagacctacctgtccaagacactggcccagtacacctccaagacatgcagcaactgtgggtttaccatcaccagcgccgactacgacagggtgctggagaagctgaagaagacagcaacaggctggatgaccacaattaacggcaaggagctgaaggtggagggccagattacctactacaacagatacaagagacagaacgtagtcaaggacctgtccgtcgagctggatagactgagcgaagaatctgtgaacaacgacatctcctcctggacaaagggcagaagcggagaagctctgagcctcctgaagaaaagattctcccatagacccgtgcaggagaagttcgtgtgcctgaactgcggcttcgagacacacgcagccgagcaagccgccctgaacatcgccagatcctggctgttcctgcggagccaggagtacaagaaataccagacaaacaagacaaccggcaacaccgataagagagccttcgtcgagacctggcagtccttttaccggaagaagcttaaggaggtgtggaaacctgccgtgcggtctggcggatctggcggaggctccacaagcatccacctgaccgcctggccccagaagagcgtgaccttcgaggacgtggccgtgtacttcacccaggccgagtgggacggcctgagccccgcccagaggaccctgtacagggacgtgatgctggagaactacggcaacgtggccagcctgggcttccccctgctgaagcccgccgtgatcagccagctggagggcggcggcgacctgggcggccccagccccctggccgccggcaccggcctgaccagccccaagaaaaagagaaaagtctaagctgccttctgcggggcttgccttctggccatgcccttcttctctcccttgcacctgtacctcttggtctttgaataaagcctgagtaggaaggctagcaaaaaaaaaaaaaaaaaaaaaaaaaaaaaaaaaaaaaaaaaaaaaaaaaaaaaaaaaaaaaaaaaaaaaaaaaaaaaaaa

SEQ ID NO: 6880 - RNA, 5797 nt, synthetic construct
  source 1..5797: mol_type = other RNA
aggaaataagagagaaaagaagagtaagaagaaatataagagccaccatggcccctaagaagaagcgtaaagtgagccggatggaacgcctcgtctacgaggtgcggcagaagtgcagaaacatcgaggacatctgcatctcctgcggatctctgaacgtgaccctggagcacccactgttcatcggcggcatgtgccagaactgtaaaaactgttttctggagtgtgcctatcaatacgacgatgacggctaccagagctactgcaccatctgttgcggcggaagagaggtgctgatgtgtggaaataacaactgctgccggtgcttctgcgtggaatgcgtggacctgctggtgggccccggcgccgcccaggccgctattaaggaagatccttggaactgctacatgtgcggccacaagggcacatacggcctgctgagacggagagaggactggcctagcagactgcagatgttcttcgccaataaccacgaccaggagttcgacccccctaaggtgtaccctcccgtccccgccgagaagagaaagcccatccgggtcctgagcctgttcgatggcatcgccaccggtctgctggtgctgaaggacctgggcatccaggtggataggtacattgcctccgaggtgtgcgaggactccatcaccgtgggaatggtgcgtcatcagggcaagatcatgtacgtgggcgacgtgcggagcgtgacacagaagcatatccaggagtggggccctttcgacctggtgatcggcggcagcccttgcaatgacctgagcatcgtgaacccagcccggaagggcctgtacgagggaaccggcagactgttcttcgagttttacagactgctgcacgacgcccggcctaaggaaggcgacgaccggcccttcttttggctgttcgagaatgtggtggccatgggagtcagcgacaagcgggatattagccggttcctggagagcaaccccgtgatgatcgatgccaaggaagtgagcgccgcccaccgggccagatacttctggggcaatctgcctggcatgaacagacccctggccagcaccgtgaacgacaagctggagctgcaggagtgcctggagcacggccggatcgccaagttcagcaaggtgagaaccatcaccacccgaagcaacagcatcaaacaaggcaaggaccagcactttcctgtgttcatgaacgagaaggaggacatcctgtggtgtaccgagatggagagagtgttcgggttcccagtccactacacagatgtcagcaacatgtctagactggccagacagagactgctgggaagaagctggtccgtccctgtgatcagacacctgttcgcccctctgaaggagtacttcgcctgcgtgagcagcggcaacagcaacgccaacagccggggccccagcttctctagcggcctggtgccactgtccctgagagggagccacatgggccccatggagatctacaaaaccgtgagcgcctggaagcggcagcctgtgcgcgtgctgagcctgtttcggaatatcgataaagtcctgaaaagcctgggattcctggagagcggctctggctccggcggtggcaccctgaagtacgtggaggatgtgacaaacgtggtcagacgggatgtggagaagtggggccccttcgatctggtgtacggcagcacccaacccctgggcagctcttgtgaccggtgccctggctggtacatgtttcagttccaccggatcctgcagtacgccctgccgagacaggagtcccagcggccattcttttggattttcatggacaacttgctgctgaccgaggatgaccaggaaactaccactcggttcctgcagaccgaagccgtgaccctgcaggacgtgagaggccgggactaccagaacgccatgcgggtgtggtccaacatccctggactgaaaagcaagcacgcacctctgacccctaaagaagaggagtacctgcaggcccaggtgcggagcagaagcaagctggacgcccctaaggtggatctgctggtgaagaattgcctcctgcccctgagagagtacttcaagtatttcagccagaatagtctgcccctgggcggcccaagcagcggcgcccctcctcccagcggcggcagcccagccggctccccaacctctaccgaggagggcacctctgagtccgccacccccgagagcggccctggcacctccaccgagcccagcgagggcagcgcacccggcagccctgccggcagccccacctccacagaggagggaaccagcaccgagcccagcgaaggcagcgccccaggcaccagcaccgagcctagtgagggcggctctggcggcggcagcgcccaggagattaaacggatcaacaagatcagaagaagacttgtgaaagacagcaacaccaagaaggccggcaagacaggccccatgaaaaccctgctggttagagtgatgacacccgatctgagagagcggctggaaaacctgagaaagaagcctgaaaatatcccccagcccatcagcaatacatctagagccaacctgaataagctgctgaccgattacaccgaaatgaagaaggcgatcctgcatgtgtactgggaagagttccagaaggaccctgtgggcctgatgagccgggtggcccagcctgccagcaagaagatcgatcagaacaagctgaaacctgagatggacgagaagggcaacctgaccaccgccggctttgcctgctctcagtgtggccagcccctgttcgtgtacaagctggagcaggtgtctgagaagggcaaggcttacaccaactacttcggacggtgcaatgtggccgagcacgaaaagctgatcctgctggcccagctgaagcccgagaaggatagcgacgaagccgtgacatatagcctgggaaagtttgggcagagggccctggatttctacagcattcatgtgaccaaggagtccacccaccccgtgaagcccctggcccagatcgccggaaacagatacgcctccggacctgtgggaaaggccctgagcgacgcatgtatgggcacaatcgcctccttcctgtctaagtaccaggacatcatcatcgaacaccagaaggtggtgaagggcaaccagaagagactggagagcctgcgggagctggccggcaaggaaaacctggaataccctagcgtgaccctgccacctcagcctcacaccaaggagggcgttgatgcctacaacgaagtgatcgcccgggtgcgaatgtgggtgaacctgaacctgtggcagaagctgaagctaagcagagatgatgccaagcctctgctgagactgaagggattcccttcctttcctctggtcgagagacaggccaacgaagtggactggtgggacatggtgtgtaacgtgaagaagctgatcaacgagaaaaaggaggatggcaaggtgttttggcagaatctggctggctacaagagacaggaagccctgagaccatacctgagcagcgaggaagatcggaagaagggaaagaaattcgctcggtaccagctgggcgacctgctgctgcacctggaaaagaagcacggcgaggactggggaaaggtgtacgacgaggcctgggagcggattgacaagaaagtggaaggcctgagcaagcacatcaagctggaagaggaacggagaagcgaggacgcccagagcaaggccgccctgaccgactggctgcgggctaaggccagcttcgtgatcgagggcctgaaggaggccgacaaggacgagttctgcagatgcgagctgaagctgcagaagtggtacggggacctgcggggaaagcccttcgccatcgaagccgagaacagcatcctggacatcagcggcttcagcaagcagtacaactgtgccttcatctggcagaaggacggcgtgaagaagctgaacctgtacctgatcatcaactacttcaagggcggcaagctgcggttcaagaagatcaaacctgaagccttcgaagccaacagattctacaccgtgatcaacaaaaagagcggcgagatcgtgcccatggaggtgaacttcaacttcgacgaccccaacctgatcatcctgcctctggcctttggcaagagacagggcagagaattcatctggaacgacctgctgtccctggaaaccggcagcctgaagctggccaacggaagagtgatcgagaagacactgtacaacagaagaacccggcaggatgagcctgccctgttcgtggccctgaccttcgagcggcgggaggtcctggactcctccaatatcaaaccaatgaacctgatcggcgtggcaagaggcgaaaacatccccgccgtgatcgccctgaccgaccccgagggctgcccactgagccggtttaaggatagcctgggaaacccaacccacatcctgagaatcggcgagagctataaggagaagcagcggaccatccaggccaagaaggaggtggagcagcggagagccggcggctacagccggaagtacgccagcaaagccaagaatctggcagacgatatggtgagaaacaccgctagagatctgctgtactacgccgtgacccaggatgccatgctgatcttcgccaacctgagccggggcttcggccggcagggcaagcggaccttcatggccgagagacagtacacacggatggaggactggctgaccgccaagctggcctacgagggcctgagcaagacctacctgtccaagacactggcccagtacacctccaagacatgcagcaactgtgggtttaccatcaccagcgccgactacgacagggtgctggagaagctgaagaagacagcaacaggctggatgaccacaattaacggcaaggagctgaaggtggagggccagattacctactacaacagatacaagagacagaacgtagtcaaggacctgtccgtcgagctggatagactgagcgaagaatctgtgaacaacgacatctcctcctggacaaagggcagaagcggagaagctctgagcctcctgaagaaaagattctcccatagacccgtgcaggagaagttcgtgtgcctgaactgcggcttcgagacacacgcagccgagcaagccgccctgaacatcgccagatcctggctgttcctgcggagccaggagtacaagaaataccagacaaacaagacaaccggcaacaccgataagagagccttcgtcgagacctggcagtccttttaccggaagaagcttaaggaggtgtggaaacctgccgtgcggtctggcggatctggcggaggctccacaagcgcccaggtgctggtgaccttccaggacgtggccgtggacttcacccaggaggagtggaggctgctggaccccggccagaaggagctgtacaaggaggtgatgctggagaacgccgagaacatgctgttcctgggcctgcccgtgcccagggaggactggttcttccacttccacgagggcggcgacccctggatgctggagggcaagggccccagcatcagcaggctggacgaggagaggcacaccagccccaagaaaaagagaaaagtctaagctgccttctgcggggcttgccttctggccatgcccttcttctctcccttgcacctgtacctcttggtctttgaataaagcctgagtaggaaggctagcaaaaaaaaaaaaaaaaaaaaaaaaaaaaaaaaaaaaaaaaaaaaaaaaaaaaaaaaaaaaaaaaaaaaaaaaaaaaaaaa

SEQ ID NO: 6881 - RNA, 5797 nt, synthetic construct
  source 1..5797: mol_type = other RNA
aggaaataagagagaaaagaagagtaagaagaaatataagagccaccatggcccctaagaagaagcgtaaagtgagccggatggaacgcctcgtctacgaggtgcggcagaagtgcagaaacatcgaggacatctgcatctcctgcggatctctgaacgtgaccctggagcacccactgttcatcggcggcatgtgccagaactgtaaaaactgttttctggagtgtgcctatcaatacgacgatgacggctaccagagctactgcaccatctgttgcggcggaagagaggtgctgatgtgtggaaataacaactgctgccggtgcttctgcgtggaatgcgtggacctgctggtgggccccggcgccgcccaggccgctattaaggaagatccttggaactgctacatgtgcggccacaagggcacatacggcctgctgagacggagagaggactggcctagcagactgcagatgttcttcgccaataaccacgaccaggagttcgacccccctaaggtgtaccctcccgtccccgccgagaagagaaagcccatccgggtcctgagcctgttcgatggcatcgccaccggtctgctggtgctgaaggacctgggcatccaggtggataggtacattgcctccgaggtgtgcgaggactccatcaccgtgggaatggtgcgtcatcagggcaagatcatgtacgtgggcgacgtgcggagcgtgacacagaagcatatccaggagtggggccctttcgacctggtgatcggcggcagcccttgcaatgacctgagcatcgtgaacccagcccggaagggcctgtacgagggaaccggcagactgttcttcgagttttacagactgctgcacgacgcccggcctaaggaaggcgacgaccggcccttcttttggctgttcgagaatgtggtggccatgggagtcagcgacaagcgggatattagccggttcctggagagcaaccccgtgatgatcgatgccaaggaagtgagcgccgcccaccgggccagatacttctggggcaatctgcctggcatgaacagacccctggccagcaccgtgaacgacaagctggagctgcaggagtgcctggagcacggccggatcgccaagttcagcaaggtgagaaccatcaccacccgaagcaacagcatcaaacaaggcaaggaccagcactttcctgtgttcatgaacgagaaggaggacatcctgtggtgtaccgagatggagagagtgttcgggttcccagtccactacacagatgtcagcaacatgtctagactggccagacagagactgctgggaagaagctggtccgtccctgtgatcagacacctgttcgcccctctgaaggagtacttcgcctgcgtgagcagcggcaacagcaacgccaacagccggggccccagcttctctagcggcctggtgccactgtccctgagagggagccacatgggccccatggagatctacaaaaccgtgagcgcctggaagcggcagcctgtgcgcgtgctgagcctgtttcggaatatcgataaagtcctgaaaagcctgggattcctggagagcggctctggctccggcggtggcaccctgaagtacgtggaggatgtgacaaacgtggtcagacgggatgtggagaagtggggccccttcgatctggtgtacggcagcacccaacccctgggcagctcttgtgaccggtgccctggctggtacatgtttcagttccaccggatcctgcagtacgccctgccgagacaggagtcccagcggccattcttttggattttcatggacaacttgctgctgaccgaggatgaccaggaaactaccactcggttcctgcagaccgaagccgtgaccctgcaggacgtgagaggccgggactaccagaacgccatgcgggtgtggtccaacatccctggactgaaaagcaagcacgcacctctgacccctaaagaagaggagtacctgcaggcccaggtgcggagcagaagcaagctggacgcccctaaggtggatctgctggtgaagaattgcctcctgcccctgagagagtacttcaagtatttcagccagaatagtctgcccctgggcggcccaagcagcggcgcccctcctcccagcggcggcagcccagccggctccccaacctctaccgaggagggcacctctgagtccgccacccccgagagcggccctggcacctccaccgagcccagcgagggcagcgcacccggcagccctgccggcagccccacctccacagaggagggaaccagcaccgagcccagcgaaggcagcgccccaggcaccagcaccgagcctagtgagggcggctctggcggcggcagcgcccaggagattaaacggatcaacaagatcagaagaagacttgtgaaagacagcaacaccaagaaggccggcaagacaggccccatgaaaaccctgctggttagagtgatgacacccgatctgagagagcggctggaaaacctgagaaagaagcctgaaaatatcccccagcccatcagcaatacatctagagccaacctgaataagctgctgaccgattacaccgaaatgaagaaggcgatcctgcatgtgtactgggaagagttccagaaggaccctgtgggcctgatgagccgggtggcccagcctgccagcaagaagatcgatcagaacaagctgaaacctgagatggacgagaagggcaacctgaccaccgccggctttgcctgctctcagtgtggccagcccctgttcgtgtacaagctggagcaggtgtctgagaagggcaaggcttacaccaactacttcggacggtgcaatgtggccgagcacgaaaagctgatcctgctggcccagctgaagcccgagaaggatagcgacgaagccgtgacatatagcctgggaaagtttgggcagagggccctggatttctacagcattcatgtgaccaaggagtccacccaccccgtgaagcccctggcccagatcgccggaaacagatacgcctccggacctgtgggaaaggccctgagcgacgcatgtatgggcacaatcgcctccttcctgtctaagtaccaggacatcatcatcgaacaccagaaggtggtgaagggcaaccagaagagactggagagcctgcgggagctggccggcaaggaaaacctggaataccctagcgtgaccctgccacctcagcctcacaccaaggagggcgttgatgcctacaacgaagtgatcgcccgggtgcgaatgtgggtgaacctgaacctgtggcagaagctgaagctaagcagagatgatgccaagcctctgctgagactgaagggattcccttcctttcctctggtcgagagacaggccaacgaagtggactggtgggacatggtgtgtaacgtgaagaagctgatcaacgagaaaaaggaggatggcaaggtgttttggcagaatctggctggctacaagagacaggaagccctgagaccatacctgagcagcgaggaagatcggaagaagggaaagaaattcgctcggtaccagctgggcgacctgctgctgcacctggaaaagaagcacggcgaggactggggaaaggtgtacgacgaggcctgggagcggattgacaagaaagtggaaggcctgagcaagcacatcaagctggaagaggaacggagaagcgaggacgcccagagcaaggccgccctgaccgactggctgcgggctaaggccagcttcgtgatcgagggcctgaaggaggccgacaaggacgagttctgcagatgcgagctgaagctgcagaagtggtacggggacctgcggggaaagcccttcgccatcgaagccgagaacagcatcctggacatcagcggcttcagcaagcagtacaactgtgccttcatctggcagaaggacggcgtgaagaagctgaacctgtacctgatcatcaactacttcaagggcggcaagctgcggttcaagaagatcaaacctgaagccttcgaagccaacagattctacaccgtgatcaacaaaaagagcggcgagatcgtgcccatggaggtgaacttcaacttcgacgaccccaacctgatcatcctgcctctggcctttggcaagagacagggcagagaattcatctggaacgacctgctgtccctggaaaccggcagcctgaagctggccaacggaagagtgatcgagaagacactgtacaacagaagaacccggcaggatgagcctgccctgttcgtggccctgaccttcgagcggcgggaggtcctggactcctccaatatcaaaccaatgaacctgatcggcgtggcaagaggcgaaaacatccccgccgtgatcgccctgaccgaccccgagggctgcccactgagccggtttaaggatagcctgggaaacccaacccacatcctgagaatcggcgagagctataaggagaagcagcggaccatccaggccaagaaggaggtggagcagcggagagccggcggctacagccggaagtacgccagcaaagccaagaatctggcagacgatatggtgagaaacaccgctagagatctgctgtactacgccgtgacccaggatgccatgctgatcttcgccaacctgagccggggcttcggccggcagggcaagcggaccttcatggccgagagacagtacacacggatggaggactggctgaccgccaagctggcctacgagggcctgagcaagacctacctgtccaagacactggcccagtacacctccaagacatgcagcaactgtgggtttaccatcaccagcgccgactacgacagggtgctggagaagctgaagaagacagcaacaggctggatgaccacaattaacggcaaggagctgaaggtggagggccagattacctactacaacagatacaagagacagaacgtagtcaaggacctgtccgtcgagctggatagactgagcgaagaatctgtgaacaacgacatctcctcctggacaaagggcagaagcggagaagctctgagcctcctgaagaaaagattctcccatagacccgtgcaggagaagttcgtgtgcctgaactgcggcttcgagacacacgcagccgagcaagccgccctgaacatcgccagatcctggctgttcctgcggagccaggagtacaagaaataccagacaaacaagacaaccggcaacaccgataagagagccttcgtcgagacctggcagtccttttaccggaagaagcttaaggaggtgtggaaacctgccgtgcggtctggcggatctggcggaggctccacaagcagcgaggacctggtgaccttcagggacgtggccgtggacttcagccaggaggagtgggagcagctgaacagcgcccagaggggcctgtacagggacgtgatgctggagaactacaggagcctggtgagcctgggcgtgagcgtgagcaagcccgacgtgatcagcctgctggagcagggcaaggagccctgggtggtgaaggagggcaccaggggcacctacagcgactggaagtacgccttcaccagccccaagaaaaagagaaaagtctaagctgccttctgcggggcttgccttctggccatgcccttcttctctcccttgcacctgtacctcttggtctttgaataaagcctgagtaggaaggctagcaaaaaaaaaaaaaaaaaaaaaaaaaaaaaaaaaaaaaaaaaaaaaaaaaaaaaaaaaaaaaaaaaaaaaaaaaaaaaaaa

SEQ ID NO: 6882 - RNA, 5797 nt, synthetic construct
  source 1..5797: mol_type = other RNA
aggaaataagagagaaaagaagagtaagaagaaatataagagccaccatggcccctaagaagaagcgtaaagtgagccggatggaacgcctcgtctacgaggtgcggcagaagtgcagaaacatcgaggacatctgcatctcctgcggatctctgaacgtgaccctggagcacccactgttcatcggcggcatgtgccagaactgtaaaaactgttttctggagtgtgcctatcaatacgacgatgacggctaccagagctactgcaccatctgttgcggcggaagagaggtgctgatgtgtggaaataacaactgctgccggtgcttctgcgtggaatgcgtggacctgctggtgggccccggcgccgcccaggccgctattaaggaagatccttggaactgctacatgtgcggccacaagggcacatacggcctgctgagacggagagaggactggcctagcagactgcagatgttcttcgccaataaccacgaccaggagttcgacccccctaaggtgtaccctcccgtccccgccgagaagagaaagcccatccgggtcctgagcctgttcgatggcatcgccaccggtctgctggtgctgaaggacctgggcatccaggtggataggtacattgcctccgaggtgtgcgaggactccatcaccgtgggaatggtgcgtcatcagggcaagatcatgtacgtgggcgacgtgcggagcgtgacacagaagcatatccaggagtggggccctttcgacctggtgatcggcggcagcccttgcaatgacctgagcatcgtgaacccagcccggaagggcctgtacgagggaaccggcagactgttcttcgagttttacagactgctgcacgacgcccggcctaaggaaggcgacgaccggcccttcttttggctgttcgagaatgtggtggccatgggagtcagcgacaagcgggatattagccggttcctggagagcaaccccgtgatgatcgatgccaaggaagtgagcgccgcccaccgggccagatacttctggggcaatctgcctggcatgaacagacccctggccagcaccgtgaacgacaagctggagctgcaggagtgcctggagcacggccggatcgccaagttcagcaaggtgagaaccatcaccacccgaagcaacagcatcaaacaaggcaaggaccagcactttcctgtgttcatgaacgagaaggaggacatcctgtggtgtaccgagatggagagagtgttcgggttcccagtccactacacagatgtcagcaacatgtctagactggccagacagagactgctgggaagaagctggtccgtccctgtgatcagacacctgttcgcccctctgaaggagtacttcgcctgcgtgagcagcggcaacagcaacgccaacagccggggccccagcttctctagcggcctggtgccactgtccctgagagggagccacatgggccccatggagatctacaaaaccgtgagcgcctggaagcggcagcctgtgcgcgtgctgagcctgtttcggaatatcgataaagtcctgaaaagcctgggattcctggagagcggctctggctccggcggtggcaccctgaagtacgtggaggatgtgacaaacgtggtcagacgggatgtggagaagtggggccccttcgatctggtgtacggcagcacccaacccctgggcagctcttgtgaccggtgccctggctggtacatgtttcagttccaccggatcctgcagtacgccctgccgagacaggagtcccagcggccattcttttggattttcatggacaacttgctgctgaccgaggatgaccaggaaactaccactcggttcctgcagaccgaagccgtgaccctgcaggacgtgagaggccgggactaccagaacgccatgcgggtgtggtccaacatccctggactgaaaagcaagcacgcacctctgacccctaaagaagaggagtacctgcaggcccaggtgcggagcagaagcaagctggacgcccctaaggtggatctgctggtgaagaattgcctcctgcccctgagagagtacttcaagtatttcagccagaatagtctgcccctgggcggcccaagcagcggcgcccctcctcccagcggcggcagcccagccggctccccaacctctaccgaggagggcacctctgagtccgccacccccgagagcggccctggcacctccaccgagcccagcgagggcagcgcacccggcagccctgccggcagccccacctccacagaggagggaaccagcaccgagcccagcgaaggcagcgccccaggcaccagcaccgagcctagtgagggcggctctggcggcggcagcgcccaggagattaaacggatcaacaagatcagaagaagacttgtgaaagacagcaacaccaagaaggccggcaagacaggccccatgaaaaccctgctggttagagtgatgacacccgatctgagagagcggctggaaaacctgagaaagaagcctgaaaatatcccccagcccatcagcaatacatctagagccaacctgaataagctgctgaccgattacaccgaaatgaagaaggcgatcctgcatgtgtactgggaagagttccagaaggaccctgtgggcctgatgagccgggtggcccagcctgccagcaagaagatcgatcagaacaagctgaaacctgagatggacgagaagggcaacctgaccaccgccggctttgcctgctctcagtgtggccagcccctgttcgtgtacaagctggagcaggtgtctgagaagggcaaggcttacaccaactacttcggacggtgcaatgtggccgagcacgaaaagctgatcctgctggcccagctgaagcccgagaaggatagcgacgaagccgtgacatatagcctgggaaagtttgggcagagggccctggatttctacagcattcatgtgaccaaggagtccacccaccccgtgaagcccctggcccagatcgccggaaacagatacgcctccggacctgtgggaaaggccctgagcgacgcatgtatgggcacaatcgcctccttcctgtctaagtaccaggacatcatcatcgaacaccagaaggtggtgaagggcaaccagaagagactggagagcctgcgggagctggccggcaaggaaaacctggaataccctagcgtgaccctgccacctcagcctcacaccaaggagggcgttgatgcctacaacgaagtgatcgcccgggtgcgaatgtgggtgaacctgaacctgtggcagaagctgaagctaagcagagatgatgccaagcctctgctgagactgaagggattcccttcctttcctctggtcgagagacaggccaacgaagtggactggtgggacatggtgtgtaacgtgaagaagctgatcaacgagaaaaaggaggatggcaaggtgttttggcagaatctggctggctacaagagacaggaagccctgagaccatacctgagcagcgaggaagatcggaagaagggaaagaaattcgctcggtaccagctgggcgacctgctgctgcacctggaaaagaagcacggcgaggactggggaaaggtgtacgacgaggcctgggagcggattgacaagaaagtggaaggcctgagcaagcacatcaagctggaagaggaacggagaagcgaggacgcccagagcaaggccgccctgaccgactggctgcgggctaaggccagcttcgtgatcgagggcctgaaggaggccgacaaggacgagttctgcagatgcgagctgaagctgcagaagtggtacggggacctgcggggaaagcccttcgccatcgaagccgagaacagcatcctggacatcagcggcttcagcaagcagtacaactgtgccttcatctggcagaaggacggcgtgaagaagctgaacctgtacctgatcatcaactacttcaagggcggcaagctgcggttcaagaagatcaaacctgaagccttcgaagccaacagattctacaccgtgatcaacaaaaagagcggcgagatcgtgcccatggaggtgaacttcaacttcgacgaccccaacctgatcatcctgcctctggcctttggcaagagacagggcagagaattcatctggaacgacctgctgtccctggaaaccggcagcctgaagctggccaacggaagagtgatcgagaagacactgtacaacagaagaacccggcaggatgagcctgccctgttcgtggccctgaccttcgagcggcgggaggtcctggactcctccaatatcaaaccaatgaacctgatcggcgtggcaagaggcgaaaacatccccgccgtgatcgccctgaccgaccccgagggctgcccactgagccggtttaaggatagcctgggaaacccaacccacatcctgagaatcggcgagagctataaggagaagcagcggaccatccaggccaagaaggaggtggagcagcggagagccggcggctacagccggaagtacgccagcaaagccaagaatctggcagacgatatggtgagaaacaccgctagagatctgctgtactacgccgtgacccaggatgccatgctgatcttcgccaacctgagccggggcttcggccggcagggcaagcggaccttcatggccgagagacagtacacacggatggaggactggctgaccgccaagctggcctacgagggcctgagcaagacctacctgtccaagacactggcccagtacacctccaagacatgcagcaactgtgggtttaccatcaccagcgccgactacgacagggtgctggagaagctgaagaagacagcaacaggctggatgaccacaattaacggcaaggagctgaaggtggagggccagattacctactacaacagatacaagagacagaacgtagtcaaggacctgtccgtcgagctggatagactgagcgaagaatctgtgaacaacgacatctcctcctggacaaagggcagaagcggagaagctctgagcctcctgaagaaaagattctcccatagacccgtgcaggagaagttcgtgtgcctgaactgcggcttcgagacacacgcagccgagcaagccgccctgaacatcgccagatcctggctgttcctgcggagccaggagtacaagaaataccagacaaacaagacaaccggcaacaccgataagagagccttcgtcgagacctggcagtccttttaccggaagaagcttaaggaggtgtggaaacctgccgtgcggtctggcggatctggcggaggctccacaagctgctggggcctgctgagcttcaaggacatcagcatggagttcacctgggacgagtggcagctgctggacagcacccagaagtacctgtacagggacgtgatcctggagaactaccacaacctgatcagcgtgggctaccacggcaccaagcccgacctgatcttcaagctggagcagggcgaggacccctggatcatcaacgccaagatcagcaggcagagcaggcccgacggctgggaggagaccagccccaagaaaaagagaaaagtctaagctgccttctgcggggcttgccttctggccatgcccttcttctctcccttgcacctgtacctcttggtctttgaataaagcctgagtaggaaggctagcaaaaaaaaaaaaaaaaaaaaaaaaaaaaaaaaaaaaaaaaaaaaaaaaaaaaaaaaaaaaaaaaaaaaaaaaaaaaaaaa

SEQ ID NO: 6883 - RNA, 5797 nt, synthetic construct
  source 1..5797: mol_type = other RNA
aggaaataagagagaaaagaagagtaagaagaaatataagagccaccatggcccctaagaagaagcgtaaagtgagccggatggaacgcctcgtctacgaggtgcggcagaagtgcagaaacatcgaggacatctgcatctcctgcggatctctgaacgtgaccctggagcacccactgttcatcggcggcatgtgccagaactgtaaaaactgttttctggagtgtgcctatcaatacgacgatgacggctaccagagctactgcaccatctgttgcggcggaagagaggtgctgatgtgtggaaataacaactgctgccggtgcttctgcgtggaatgcgtggacctgctggtgggccccggcgccgcccaggccgctattaaggaagatccttggaactgctacatgtgcggccacaagggcacatacggcctgctgagacggagagaggactggcctagcagactgcagatgttcttcgccaataaccacgaccaggagttcgacccccctaaggtgtaccctcccgtccccgccgagaagagaaagcccatccgggtcctgagcctgttcgatggcatcgccaccggtctgctggtgctgaaggacctgggcatccaggtggataggtacattgcctccgaggtgtgcgaggactccatcaccgtgggaatggtgcgtcatcagggcaagatcatgtacgtgggcgacgtgcggagcgtgacacagaagcatatccaggagtggggccctttcgacctggtgatcggcggcagcccttgcaatgacctgagcatcgtgaacccagcccggaagggcctgtacgagggaaccggcagactgttcttcgagttttacagactgctgcacgacgcccggcctaaggaaggcgacgaccggcccttcttttggctgttcgagaatgtggtggccatgggagtcagcgacaagcgggatattagccggttcctggagagcaaccccgtgatgatcgatgccaaggaagtgagcgccgcccaccgggccagatacttctggggcaatctgcctggcatgaacagacccctggccagcaccgtgaacgacaagctggagctgcaggagtgcctggagcacggccggatcgccaagttcagcaaggtgagaaccatcaccacccgaagcaacagcatcaaacaaggcaaggaccagcactttcctgtgttcatgaacgagaaggaggacatcctgtggtgtaccgagatggagagagtgttcgggttcccagtccactacacagatgtcagcaacatgtctagactggccagacagagactgctgggaagaagctggtccgtccctgtgatcagacacctgttcgcccctctgaaggagtacttcgcctgcgtgagcagcggcaacagcaacgccaacagccggggccccagcttctctagcggcctggtgccactgtccctgagagggagccacatgggccccatggagatctacaaaaccgtgagcgcctggaagcggcagcctgtgcgcgtgctgagcctgtttcggaatatcgataaagtcctgaaaagcctgggattcctggagagcggctctggctccggcggtggcaccctgaagtacgtggaggatgtgacaaacgtggtcagacgggatgtggagaagtggggccccttcgatctggtgtacggcagcacccaacccctgggcagctcttgtgaccggtgccctggctggtacatgtttcagttccaccggatcctgcagtacgccctgccgagacaggagtcccagcggccattcttttggattttcatggacaacttgctgctgaccgaggatgaccaggaaactaccactcggttcctgcagaccgaagccgtgaccctgcaggacgtgagaggccgggactaccagaacgccatgcgggtgtggtccaacatccctggactgaaaagcaagcacgcacctctgacccctaaagaagaggagtacctgcaggcccaggtgcggagcagaagcaagctggacgcccctaaggtggatctgctggtgaagaattgcctcctgcccctgagagagtacttcaagtatttcagccagaatagtctgcccctgggcggcccaagcagcggcgcccctcctcccagcggcggcagcccagccggctccccaacctctaccgaggagggcacctctgagtccgccacccccgagagcggccctggcacctccaccgagcccagcgagggcagcgcacccggcagccctgccggcagccccacctccacagaggagggaaccagcaccgagcccagcgaaggcagcgccccaggcaccagcaccgagcctagtgagggcggctctggcggcggcagcgcccaggagattaaacggatcaacaagatcagaagaagacttgtgaaagacagcaacaccaagaaggccggcaagacaggccccatgaaaaccctgctggttagagtgatgacacccgatctgagagagcggctggaaaacctgagaaagaagcctgaaaatatcccccagcccatcagcaatacatctagagccaacctgaataagctgctgaccgattacaccgaaatgaagaaggcgatcctgcatgtgtactgggaagagttccagaaggaccctgtgggcctgatgagccgggtggcccagcctgccagcaagaagatcgatcagaacaagctgaaacctgagatggacgagaagggcaacctgaccaccgccggctttgcctgctctcagtgtggccagcccctgttcgtgtacaagctggagcaggtgtctgagaagggcaaggcttacaccaactacttcggacggtgcaatgtggccgagcacgaaaagctgatcctgctggcccagctgaagcccgagaaggatagcgacgaagccgtgacatatagcctgggaaagtttgggcagagggccctggatttctacagcattcatgtgaccaaggagtccacccaccccgtgaagcccctggcccagatcgccggaaacagatacgcctccggacctgtgggaaaggccctgagcgacgcatgtatgggcacaatcgcctccttcctgtctaagtaccaggacatcatcatcgaacaccagaaggtggtgaagggcaaccagaagagactggagagcctgcgggagctggccggcaaggaaaacctggaataccctagcgtgaccctgccacctcagcctcacaccaaggagggcgttgatgcctacaacgaagtgatcgcccgggtgcgaatgtgggtgaacctgaacctgtggcagaagctgaagctaagcagagatgatgccaagcctctgctgagactgaagggattcccttcctttcctctggtcgagagacaggccaacgaagtggactggtgggacatggtgtgtaacgtgaagaagctgatcaacgagaaaaaggaggatggcaaggtgttttggcagaatctggctggctacaagagacaggaagccctgagaccatacctgagcagcgaggaagatcggaagaagggaaagaaattcgctcggtaccagctgggcgacctgctgctgcacctggaaaagaagcacggcgaggactggggaaaggtgtacgacgaggcctgggagcggattgacaagaaagtggaaggcctgagcaagcacatcaagctggaagaggaacggagaagcgaggacgcccagagcaaggccgccctgaccgactggctgcgggctaaggccagcttcgtgatcgagggcctgaaggaggccgacaaggacgagttctgcagatgcgagctgaagctgcagaagtggtacggggacctgcggggaaagcccttcgccatcgaagccgagaacagcatcctggacatcagcggcttcagcaagcagtacaactgtgccttcatctggcagaaggacggcgtgaagaagctgaacctgtacctgatcatcaactacttcaagggcggcaagctgcggttcaagaagatcaaacctgaagccttcgaagccaacagattctacaccgtgatcaacaaaaagagcggcgagatcgtgcccatggaggtgaacttcaacttcgacgaccccaacctgatcatcctgcctctggcctttggcaagagacagggcagagaattcatctggaacgacctgctgtccctggaaaccggcagcctgaagctggccaacggaagagtgatcgagaagacactgtacaacagaagaacccggcaggatgagcctgccctgttcgtggccctgaccttcgagcggcgggaggtcctggactcctccaatatcaaaccaatgaacctgatcggcgtggcaagaggcgaaaacatccccgccgtgatcgccctgaccgaccccgagggctgcccactgagccggtttaaggatagcctgggaaacccaacccacatcctgagaatcggcgagagctataaggagaagcagcggaccatccaggccaagaaggaggtggagcagcggagagccggcggctacagccggaagtacgccagcaaagccaagaatctggcagacgatatggtgagaaacaccgctagagatctgctgtactacgccgtgacccaggatgccatgctgatcttcgccaacctgagccggggcttcggccggcagggcaagcggaccttcatggccgagagacagtacacacggatggaggactggctgaccgccaagctggcctacgagggcctgagcaagacctacctgtccaagacactggcccagtacacctccaagacatgcagcaactgtgggtttaccatcaccagcgccgactacgacagggtgctggagaagctgaagaagacagcaacaggctggatgaccacaattaacggcaaggagctgaaggtggagggccagattacctactacaacagatacaagagacagaacgtagtcaaggacctgtccgtcgagctggatagactgagcgaagaatctgtgaacaacgacatctcctcctggacaaagggcagaagcggagaagctctgagcctcctgaagaaaagattctcccatagacccgtgcaggagaagttcgtgtgcctgaactgcggcttcgagacacacgcagccgagcaagccgccctgaacatcgccagatcctggctgttcctgcggagccaggagtacaagaaataccagacaaacaagacaaccggcaacaccgataagagagccttcgtcgagacctggcagtccttttaccggaagaagcttaaggaggtgtggaaacctgccgtgcggtctggcggatctggcggaggctccacaagccagatgaggctgaggttcgaggacatcagcgtgagcttcagccaggaggagtgggcctacctggacgaggagcagaaggagctgtacagggaggtgatgagggacaactaccagaccctgatcagcctgggcgtgggcttcagcagcgtgacccccgacatcatcagcaggatcgagcagggcgaggagccctacgtgagggacgagcccggcagcgaggagagggagaccggcaggagcagcaccagccccaagaaaaagagaaaagtctaagctgccttctgcggggcttgccttctggccatgcccttcttctctcccttgcacctgtacctcttggtctttgaataaagcctgagtaggaaggctagcaaaaaaaaaaaaaaaaaaaaaaaaaaaaaaaaaaaaaaaaaaaaaaaaaaaaaaaaaaaaaaaaaaaaaaaaaaaaaaaa

SEQ ID NO: 6884 - RNA, 5797 nt, synthetic construct
  source 1..5797: mol_type = other RNA
aggaaataagagagaaaagaagagtaagaagaaatataagagccaccatggcccctaagaagaagcgtaaagtgagccggatggaacgcctcgtctacgaggtgcggcagaagtgcagaaacatcgaggacatctgcatctcctgcggatctctgaacgtgaccctggagcacccactgttcatcggcggcatgtgccagaactgtaaaaactgttttctggagtgtgcctatcaatacgacgatgacggctaccagagctactgcaccatctgttgcggcggaagagaggtgctgatgtgtggaaataacaactgctgccggtgcttctgcgtggaatgcgtggacctgctggtgggccccggcgccgcccaggccgctattaaggaagatccttggaactgctacatgtgcggccacaagggcacatacggcctgctgagacggagagaggactggcctagcagactgcagatgttcttcgccaataaccacgaccaggagttcgacccccctaaggtgtaccctcccgtccccgccgagaagagaaagcccatccgggtcctgagcctgttcgatggcatcgccaccggtctgctggtgctgaaggacctgggcatccaggtggataggtacattgcctccgaggtgtgcgaggactccatcaccgtgggaatggtgcgtcatcagggcaagatcatgtacgtgggcgacgtgcggagcgtgacacagaagcatatccaggagtggggccctttcgacctggtgatcggcggcagcccttgcaatgacctgagcatcgtgaacccagcccggaagggcctgtacgagggaaccggcagactgttcttcgagttttacagactgctgcacgacgcccggcctaaggaaggcgacgaccggcccttcttttggctgttcgagaatgtggtggccatgggagtcagcgacaagcgggatattagccggttcctggagagcaaccccgtgatgatcgatgccaaggaagtgagcgccgcccaccgggccagatacttctggggcaatctgcctggcatgaacagacccctggccagcaccgtgaacgacaagctggagctgcaggagtgcctggagcacggccggatcgccaagttcagcaaggtgagaaccatcaccacccgaagcaacagcatcaaacaaggcaaggaccagcactttcctgtgttcatgaacgagaaggaggacatcctgtggtgtaccgagatggagagagtgttcgggttcccagtccactacacagatgtcagcaacatgtctagactggccagacagagactgctgggaagaagctggtccgtccctgtgatcagacacctgttcgcccctctgaaggagtacttcgcctgcgtgagcagcggcaacagcaacgccaacagccggggccccagcttctctagcggcctggtgccactgtccctgagagggagccacatgggccccatggagatctacaaaaccgtgagcgcctggaagcggcagcctgtgcgcgtgctgagcctgtttcggaatatcgataaagtcctgaaaagcctgggattcctggagagcggctctggctccggcggtggcaccctgaagtacgtggaggatgtgacaaacgtggtcagacgggatgtggagaagtggggccccttcgatctggtgtacggcagcacccaacccctgggcagctcttgtgaccggtgccctggctggtacatgtttcagttccaccggatcctgcagtacgccctgccgagacaggagtcccagcggccattcttttggattttcatggacaacttgctgctgaccgaggatgaccaggaaactaccactcggttcctgcagaccgaagccgtgaccctgcaggacgtgagaggccgggactaccagaacgccatgcgggtgtggtccaacatccctggactgaaaagcaagcacgcacctctgacccctaaagaagaggagtacctgcaggcccaggtgcggagcagaagcaagctggacgcccctaaggtggatctgctggtgaagaattgcctcctgcccctgagagagtacttcaagtatttcagccagaatagtctgcccctgggcggcccaagcagcggcgcccctcctcccagcggcggcagcccagccggctccccaacctctaccgaggagggcacctctgagtccgccacccccgagagcggccctggcacctccaccgagcccagcgagggcagcgcacccggcagccctgccggcagccccacctccacagaggagggaaccagcaccgagcccagcgaaggcagcgccccaggcaccagcaccgagcctagtgagggcggctctggcggcggcagcgcccaggagattaaacggatcaacaagatcagaagaagacttgtgaaagacagcaacaccaagaaggccggcaagacaggccccatgaaaaccctgctggttagagtgatgacacccgatctgagagagcggctggaaaacctgagaaagaagcctgaaaatatcccccagcccatcagcaatacatctagagccaacctgaataagctgctgaccgattacaccgaaatgaagaaggcgatcctgcatgtgtactgggaagagttccagaaggaccctgtgggcctgatgagccgggtggcccagcctgccagcaagaagatcgatcagaacaagctgaaacctgagatggacgagaagggcaacctgaccaccgccggctttgcctgctctcagtgtggccagcccctgttcgtgtacaagctggagcaggtgtctgagaagggcaaggcttacaccaactacttcggacggtgcaatgtggccgagcacgaaaagctgatcctgctggcccagctgaagcccgagaaggatagcgacgaagccgtgacatatagcctgggaaagtttgggcagagggccctggatttctacagcattcatgtgaccaaggagtccacccaccccgtgaagcccctggcccagatcgccggaaacagatacgcctccggacctgtgggaaaggccctgagcgacgcatgtatgggcacaatcgcctccttcctgtctaagtaccaggacatcatcatcgaacaccagaaggtggtgaagggcaaccagaagagactggagagcctgcgggagctggccggcaaggaaaacctggaataccctagcgtgaccctgccacctcagcctcacaccaaggagggcgttgatgcctacaacgaagtgatcgcccgggtgcgaatgtgggtgaacctgaacctgtggcagaagctgaagctaagcagagatgatgccaagcctctgctgagactgaagggattcccttcctttcctctggtcgagagacaggccaacgaagtggactggtgggacatggtgtgtaacgtgaagaagctgatcaacgagaaaaaggaggatggcaaggtgttttggcagaatctggctggctacaagagacaggaagccctgagaccatacctgagcagcgaggaagatcggaagaagggaaagaaattcgctcggtaccagctgggcgacctgctgctgcacctggaaaagaagcacggcgaggactggggaaaggtgtacgacgaggcctgggagcggattgacaagaaagtggaaggcctgagcaagcacatcaagctggaagaggaacggagaagcgaggacgcccagagcaaggccgccctgaccgactggctgcgggctaaggccagcttcgtgatcgagggcctgaaggaggccgacaaggacgagttctgcagatgcgagctgaagctgcagaagtggtacggggacctgcggggaaagcccttcgccatcgaagccgagaacagcatcctggacatcagcggcttcagcaagcagtacaactgtgccttcatctggcagaaggacggcgtgaagaagctgaacctgtacctgatcatcaactacttcaagggcggcaagctgcggttcaagaagatcaaacctgaagccttcgaagccaacagattctacaccgtgatcaacaaaaagagcggcgagatcgtgcccatggaggtgaacttcaacttcgacgaccccaacctgatcatcctgcctctggcctttggcaagagacagggcagagaattcatctggaacgacctgctgtccctggaaaccggcagcctgaagctggccaacggaagagtgatcgagaagacactgtacaacagaagaacccggcaggatgagcctgccctgttcgtggccctgaccttcgagcggcgggaggtcctggactcctccaatatcaaaccaatgaacctgatcggcgtggcaagaggcgaaaacatccccgccgtgatcgccctgaccgaccccgagggctgcccactgagccggtttaaggatagcctgggaaacccaacccacatcctgagaatcggcgagagctataaggagaagcagcggaccatccaggccaagaaggaggtggagcagcggagagccggcggctacagccggaagtacgccagcaaagccaagaatctggcagacgatatggtgagaaacaccgctagagatctgctgtactacgccgtgacccaggatgccatgctgatcttcgccaacctgagccggggcttcggccggcagggcaagcggaccttcatggccgagagacagtacacacggatggaggactggctgaccgccaagctggcctacgagggcctgagcaagacctacctgtccaagacactggcccagtacacctccaagacatgcagcaactgtgggtttaccatcaccagcgccgactacgacagggtgctggagaagctgaagaagacagcaacaggctggatgaccacaattaacggcaaggagctgaaggtggagggccagattacctactacaacagatacaagagacagaacgtagtcaaggacctgtccgtcgagctggatagactgagcgaagaatctgtgaacaacgacatctcctcctggacaaagggcagaagcggagaagctctgagcctcctgaagaaaagattctcccatagacccgtgcaggagaagttcgtgtgcctgaactgcggcttcgagacacacgcagccgagcaagccgccctgaacatcgccagatcctggctgttcctgcggagccaggagtacaagaaataccagacaaacaagacaaccggcaacaccgataagagagccttcgtcgagacctggcagtccttttaccggaagaagcttaaggaggtgtggaaacctgccgtgcggtctggcggatctggcggaggctccacaagcgtgaccttcgaggacgtggccgtgaacttcagcagggaggagtgggccctgctggaccccccccagaggaagctgtacagggacgtgatgtgggagaccctgaggcacctggccgccgtggacgaccagcagagcgaggacgagttcaggaacttccagaagagggtgaggagcgaggaggtggagaaggccagccagtacaccctgtggtaccagcacggcgagatggacagcaggacccccaccagccccaagaaaaagagaaaagtctaagctgccttctgcggggcttgccttctggccatgcccttcttctctcccttgcacctgtacctcttggtctttgaataaagcctgagtaggaaggctagcaaaaaaaaaaaaaaaaaaaaaaaaaaaaaaaaaaaaaaaaaaaaaaaaaaaaaaaaaaaaaaaaaaaaaaaaaaaaaaaa

SEQ ID NO: 6885 - RNA, 5797 nt, synthetic construct
  source 1..5797: mol_type = other RNA
aggaaataagagagaaaagaagagtaagaagaaatataagagccaccatggcccctaagaagaagcgtaaagtgagccggatggaacgcctcgtctacgaggtgcggcagaagtgcagaaacatcgaggacatctgcatctcctgcggatctctgaacgtgaccctggagcacccactgttcatcggcggcatgtgccagaactgtaaaaactgttttctggagtgtgcctatcaatacgacgatgacggctaccagagctactgcaccatctgttgcggcggaagagaggtgctgatgtgtggaaataacaactgctgccggtgcttctgcgtggaatgcgtggacctgctggtgggccccggcgccgcccaggccgctattaaggaagatccttggaactgctacatgtgcggccacaagggcacatacggcctgctgagacggagagaggactggcctagcagactgcagatgttcttcgccaataaccacgaccaggagttcgacccccctaaggtgtaccctcccgtccccgccgagaagagaaagcccatccgggtcctgagcctgttcgatggcatcgccaccggtctgctggtgctgaaggacctgggcatccaggtggataggtacattgcctccgaggtgtgcgaggactccatcaccgtgggaatggtgcgtcatcagggcaagatcatgtacgtgggcgacgtgcggagcgtgacacagaagcatatccaggagtggggccctttcgacctggtgatcggcggcagcccttgcaatgacctgagcatcgtgaacccagcccggaagggcctgtacgagggaaccggcagactgttcttcgagttttacagactgctgcacgacgcccggcctaaggaaggcgacgaccggcccttcttttggctgttcgagaatgtggtggccatgggagtcagcgacaagcgggatattagccggttcctggagagcaaccccgtgatgatcgatgccaaggaagtgagcgccgcccaccgggccagatacttctggggcaatctgcctggcatgaacagacccctggccagcaccgtgaacgacaagctggagctgcaggagtgcctggagcacggccggatcgccaagttcagcaaggtgagaaccatcaccacccgaagcaacagcatcaaacaaggcaaggaccagcactttcctgtgttcatgaacgagaaggaggacatcctgtggtgtaccgagatggagagagtgttcgggttcccagtccactacacagatgtcagcaacatgtctagactggccagacagagactgctgggaagaagctggtccgtccctgtgatcagacacctgttcgcccctctgaaggagtacttcgcctgcgtgagcagcggcaacagcaacgccaacagccggggccccagcttctctagcggcctggtgccactgtccctgagagggagccacatgggccccatggagatctacaaaaccgtgagcgcctggaagcggcagcctgtgcgcgtgctgagcctgtttcggaatatcgataaagtcctgaaaagcctgggattcctggagagcggctctggctccggcggtggcaccctgaagtacgtggaggatgtgacaaacgtggtcagacgggatgtggagaagtggggccccttcgatctggtgtacggcagcacccaacccctgggcagctcttgtgaccggtgccctggctggtacatgtttcagttccaccggatcctgcagtacgccctgccgagacaggagtcccagcggccattcttttggattttcatggacaacttgctgctgaccgaggatgaccaggaaactaccactcggttcctgcagaccgaagccgtgaccctgcaggacgtgagaggccgggactaccagaacgccatgcgggtgtggtccaacatccctggactgaaaagcaagcacgcacctctgacccctaaagaagaggagtacctgcaggcccaggtgcggagcagaagcaagctggacgcccctaaggtggatctgctggtgaagaattgcctcctgcccctgagagagtacttcaagtatttcagccagaatagtctgcccctgggcggcccaagcagcggcgcccctcctcccagcggcggcagcccagccggctccccaacctctaccgaggagggcacctctgagtccgccacccccgagagcggccctggcacctccaccgagcccagcgagggcagcgcacccggcagccctgccggcagccccacctccacagaggagggaaccagcaccgagcccagcgaaggcagcgccccaggcaccagcaccgagcctagtgagggcggctctggcggcggcagcgcccaggagattaaacggatcaacaagatcagaagaagacttgtgaaagacagcaacaccaagaaggccggcaagacaggccccatgaaaaccctgctggttagagtgatgacacccgatctgagagagcggctggaaaacctgagaaagaagcctgaaaatatcccccagcccatcagcaatacatctagagccaacctgaataagctgctgaccgattacaccgaaatgaagaaggcgatcctgcatgtgtactgggaagagttccagaaggaccctgtgggcctgatgagccgggtggcccagcctgccagcaagaagatcgatcagaacaagctgaaacctgagatggacgagaagggcaacctgaccaccgccggctttgcctgctctcagtgtggccagcccctgttcgtgtacaagctggagcaggtgtctgagaagggcaaggcttacaccaactacttcggacggtgcaatgtggccgagcacgaaaagctgatcctgctggcccagctgaagcccgagaaggatagcgacgaagccgtgacatatagcctgggaaagtttgggcagagggccctggatttctacagcattcatgtgaccaaggagtccacccaccccgtgaagcccctggcccagatcgccggaaacagatacgcctccggacctgtgggaaaggccctgagcgacgcatgtatgggcacaatcgcctccttcctgtctaagtaccaggacatcatcatcgaacaccagaaggtggtgaagggcaaccagaagagactggagagcctgcgggagctggccggcaaggaaaacctggaataccctagcgtgaccctgccacctcagcctcacaccaaggagggcgttgatgcctacaacgaagtgatcgcccgggtgcgaatgtgggtgaacctgaacctgtggcagaagctgaagctaagcagagatgatgccaagcctctgctgagactgaagggattcccttcctttcctctggtcgagagacaggccaacgaagtggactggtgggacatggtgtgtaacgtgaagaagctgatcaacgagaaaaaggaggatggcaaggtgttttggcagaatctggctggctacaagagacaggaagccctgagaccatacctgagcagcgaggaagatcggaagaagggaaagaaattcgctcggtaccagctgggcgacctgctgctgcacctggaaaagaagcacggcgaggactggggaaaggtgtacgacgaggcctgggagcggattgacaagaaagtggaaggcctgagcaagcacatcaagctggaagaggaacggagaagcgaggacgcccagagcaaggccgccctgaccgactggctgcgggctaaggccagcttcgtgatcgagggcctgaaggaggccgacaaggacgagttctgcagatgcgagctgaagctgcagaagtggtacggggacctgcggggaaagcccttcgccatcgaagccgagaacagcatcctggacatcagcggcttcagcaagcagtacaactgtgccttcatctggcagaaggacggcgtgaagaagctgaacctgtacctgatcatcaactacttcaagggcggcaagctgcggttcaagaagatcaaacctgaagccttcgaagccaacagattctacaccgtgatcaacaaaaagagcggcgagatcgtgcccatggaggtgaacttcaacttcgacgaccccaacctgatcatcctgcctctggcctttggcaagagacagggcagagaattcatctggaacgacctgctgtccctggaaaccggcagcctgaagctggccaacggaagagtgatcgagaagacactgtacaacagaagaacccggcaggatgagcctgccctgttcgtggccctgaccttcgagcggcgggaggtcctggactcctccaatatcaaaccaatgaacctgatcggcgtggcaagaggcgaaaacatccccgccgtgatcgccctgaccgaccccgagggctgcccactgagccggtttaaggatagcctgggaaacccaacccacatcctgagaatcggcgagagctataaggagaagcagcggaccatccaggccaagaaggaggtggagcagcggagagccggcggctacagccggaagtacgccagcaaagccaagaatctggcagacgatatggtgagaaacaccgctagagatctgctgtactacgccgtgacccaggatgccatgctgatcttcgccaacctgagccggggcttcggccggcagggcaagcggaccttcatggccgagagacagtacacacggatggaggactggctgaccgccaagctggcctacgagggcctgagcaagacctacctgtccaagacactggcccagtacacctccaagacatgcagcaactgtgggtttaccatcaccagcgccgactacgacagggtgctggagaagctgaagaagacagcaacaggctggatgaccacaattaacggcaaggagctgaaggtggagggccagattacctactacaacagatacaagagacagaacgtagtcaaggacctgtccgtcgagctggatagactgagcgaagaatctgtgaacaacgacatctcctcctggacaaagggcagaagcggagaagctctgagcctcctgaagaaaagattctcccatagacccgtgcaggagaagttcgtgtgcctgaactgcggcttcgagacacacgcagccgagcaagccgccctgaacatcgccagatcctggctgttcctgcggagccaggagtacaagaaataccagacaaacaagacaaccggcaacaccgataagagagccttcgtcgagacctggcagtccttttaccggaagaagcttaaggaggtgtggaaacctgccgtgcggtctggcggatctggcggaggctccacaagcgcccagggcctgatggccttcgaggacgtggccgtgtacttcagcagggaggagtggggcctgctggacgccgcccagagggccctgtacaggagggtgatgctggagaacttcaccctgctggccagcctgggcctgagcgtgagcaggccccacgtggtgatccagctggagtgcggcaaggagccctgggtgctgaacggcaccgacgtgaccctggccaggaacgcccagaggaggcccaccagccccaagaaaaagagaaaagtctaagctgccttctgcggggcttgccttctggccatgcccttcttctctcccttgcacctgtacctcttggtctttgaataaagcctgagtaggaaggctagcaaaaaaaaaaaaaaaaaaaaaaaaaaaaaaaaaaaaaaaaaaaaaaaaaaaaaaaaaaaaaaaaaaaaaaaaaaaaaaaa

SEQ ID NO: 6886 - RNA, 5797 nt, synthetic construct
  source 1..5797: mol_type = other RNA
aggaaataagagagaaaagaagagtaagaagaaatataagagccaccatggcccctaagaagaagcgtaaagtgagccggatggaacgcctcgtctacgaggtgcggcagaagtgcagaaacatcgaggacatctgcatctcctgcggatctctgaacgtgaccctggagcacccactgttcatcggcggcatgtgccagaactgtaaaaactgttttctggagtgtgcctatcaatacgacgatgacggctaccagagctactgcaccatctgttgcggcggaagagaggtgctgatgtgtggaaataacaactgctgccggtgcttctgcgtggaatgcgtggacctgctggtgggccccggcgccgcccaggccgctattaaggaagatccttggaactgctacatgtgcggccacaagggcacatacggcctgctgagacggagagaggactggcctagcagactgcagatgttcttcgccaataaccacgaccaggagttcgacccccctaaggtgtaccctcccgtccccgccgagaagagaaagcccatccgggtcctgagcctgttcgatggcatcgccaccggtctgctggtgctgaaggacctgggcatccaggtggataggtacattgcctccgaggtgtgcgaggactccatcaccgtgggaatggtgcgtcatcagggcaagatcatgtacgtgggcgacgtgcggagcgtgacacagaagcatatccaggagtggggccctttcgacctggtgatcggcggcagcccttgcaatgacctgagcatcgtgaacccagcccggaagggcctgtacgagggaaccggcagactgttcttcgagttttacagactgctgcacgacgcccggcctaaggaaggcgacgaccggcccttcttttggctgttcgagaatgtggtggccatgggagtcagcgacaagcgggatattagccggttcctggagagcaaccccgtgatgatcgatgccaaggaagtgagcgccgcccaccgggccagatacttctggggcaatctgcctggcatgaacagacccctggccagcaccgtgaacgacaagctggagctgcaggagtgcctggagcacggccggatcgccaagttcagcaaggtgagaaccatcaccacccgaagcaacagcatcaaacaaggcaaggaccagcactttcctgtgttcatgaacgagaaggaggacatcctgtggtgtaccgagatggagagagtgttcgggttcccagtccactacacagatgtcagcaacatgtctagactggccagacagagactgctgggaagaagctggtccgtccctgtgatcagacacctgttcgcccctctgaaggagtacttcgcctgcgtgagcagcggcaacagcaacgccaacagccggggccccagcttctctagcggcctggtgccactgtccctgagagggagccacatgggccccatggagatctacaaaaccgtgagcgcctggaagcggcagcctgtgcgcgtgctgagcctgtttcggaatatcgataaagtcctgaaaagcctgggattcctggagagcggctctggctccggcggtggcaccctgaagtacgtggaggatgtgacaaacgtggtcagacgggatgtggagaagtggggccccttcgatctggtgtacggcagcacccaacccctgggcagctcttgtgaccggtgccctggctggtacatgtttcagttccaccggatcctgcagtacgccctgccgagacaggagtcccagcggccattcttttggattttcatggacaacttgctgctgaccgaggatgaccaggaaactaccactcggttcctgcagaccgaagccgtgaccctgcaggacgtgagaggccgggactaccagaacgccatgcgggtgtggtccaacatccctggactgaaaagcaagcacgcacctctgacccctaaagaagaggagtacctgcaggcccaggtgcggagcagaagcaagctggacgcccctaaggtggatctgctggtgaagaattgcctcctgcccctgagagagtacttcaagtatttcagccagaatagtctgcccctgggcggcccaagcagcggcgcccctcctcccagcggcggcagcccagccggctccccaacctctaccgaggagggcacctctgagtccgccacccccgagagcggccctggcacctccaccgagcccagcgagggcagcgcacccggcagccctgccggcagccccacctccacagaggagggaaccagcaccgagcccagcgaaggcagcgccccaggcaccagcaccgagcctagtgagggcggctctggcggcggcagcgcccaggagattaaacggatcaacaagatcagaagaagacttgtgaaagacagcaacaccaagaaggccggcaagacaggccccatgaaaaccctgctggttagagtgatgacacccgatctgagagagcggctggaaaacctgagaaagaagcctgaaaatatcccccagcccatcagcaatacatctagagccaacctgaataagctgctgaccgattacaccgaaatgaagaaggcgatcctgcatgtgtactgggaagagttccagaaggaccctgtgggcctgatgagccgggtggcccagcctgccagcaagaagatcgatcagaacaagctgaaacctgagatggacgagaagggcaacctgaccaccgccggctttgcctgctctcagtgtggccagcccctgttcgtgtacaagctggagcaggtgtctgagaagggcaaggcttacaccaactacttcggacggtgcaatgtggccgagcacgaaaagctgatcctgctggcccagctgaagcccgagaaggatagcgacgaagccgtgacatatagcctgggaaagtttgggcagagggccctggatttctacagcattcatgtgaccaaggagtccacccaccccgtgaagcccctggcccagatcgccggaaacagatacgcctccggacctgtgggaaaggccctgagcgacgcatgtatgggcacaatcgcctccttcctgtctaagtaccaggacatcatcatcgaacaccagaaggtggtgaagggcaaccagaagagactggagagcctgcgggagctggccggcaaggaaaacctggaataccctagcgtgaccctgccacctcagcctcacaccaaggagggcgttgatgcctacaacgaagtgatcgcccgggtgcgaatgtgggtgaacctgaacctgtggcagaagctgaagctaagcagagatgatgccaagcctctgctgagactgaagggattcccttcctttcctctggtcgagagacaggccaacgaagtggactggtgggacatggtgtgtaacgtgaagaagctgatcaacgagaaaaaggaggatggcaaggtgttttggcagaatctggctggctacaagagacaggaagccctgagaccatacctgagcagcgaggaagatcggaagaagggaaagaaattcgctcggtaccagctgggcgacctgctgctgcacctggaaaagaagcacggcgaggactggggaaaggtgtacgacgaggcctgggagcggattgacaagaaagtggaaggcctgagcaagcacatcaagctggaagaggaacggagaagcgaggacgcccagagcaaggccgccctgaccgactggctgcgggctaaggccagcttcgtgatcgagggcctgaaggaggccgacaaggacgagttctgcagatgcgagctgaagctgcagaagtggtacggggacctgcggggaaagcccttcgccatcgaagccgagaacagcatcctggacatcagcggcttcagcaagcagtacaactgtgccttcatctggcagaaggacggcgtgaagaagctgaacctgtacctgatcatcaactacttcaagggcggcaagctgcggttcaagaagatcaaacctgaagccttcgaagccaacagattctacaccgtgatcaacaaaaagagcggcgagatcgtgcccatggaggtgaacttcaacttcgacgaccccaacctgatcatcctgcctctggcctttggcaagagacagggcagagaattcatctggaacgacctgctgtccctggaaaccggcagcctgaagctggccaacggaagagtgatcgagaagacactgtacaacagaagaacccggcaggatgagcctgccctgttcgtggccctgaccttcgagcggcgggaggtcctggactcctccaatatcaaaccaatgaacctgatcggcgtggcaagaggcgaaaacatccccgccgtgatcgccctgaccgaccccgagggctgcccactgagccggtttaaggatagcctgggaaacccaacccacatcctgagaatcggcgagagctataaggagaagcagcggaccatccaggccaagaaggaggtggagcagcggagagccggcggctacagccggaagtacgccagcaaagccaagaatctggcagacgatatggtgagaaacaccgctagagatctgctgtactacgccgtgacccaggatgccatgctgatcttcgccaacctgagccggggcttcggccggcagggcaagcggaccttcatggccgagagacagtacacacggatggaggactggctgaccgccaagctggcctacgagggcctgagcaagacctacctgtccaagacactggcccagtacacctccaagacatgcagcaactgtgggtttaccatcaccagcgccgactacgacagggtgctggagaagctgaagaagacagcaacaggctggatgaccacaattaacggcaaggagctgaaggtggagggccagattacctactacaacagatacaagagacagaacgtagtcaaggacctgtccgtcgagctggatagactgagcgaagaatctgtgaacaacgacatctcctcctggacaaagggcagaagcggagaagctctgagcctcctgaagaaaagattctcccatagacccgtgcaggagaagttcgtgtgcctgaactgcggcttcgagacacacgcagccgagcaagccgccctgaacatcgccagatcctggctgttcctgcggagccaggagtacaagaaataccagacaaacaagacaaccggcaacaccgataagagagccttcgtcgagacctggcagtccttttaccggaagaagcttaaggaggtgtggaaacctgccgtgcggtctggcggatctggcggaggctccacaagccccgagaccgtggtgagcttcgaggacgtggccgtgaggttcagccccgacgagtggcacctgctggacgacggccagaggaggctgtacagggacgtgctgagggagaactacagccacgtgaggagcctgggcttccccgtgcccgacctggccgtgatcttcaggatggagaggggcgaggagccctggccccccggcctgcccgccggcaccaagagcgacgaccaggaggaggagaggaccagccccaagaaaaagagaaaagtctaagctgccttctgcggggcttgccttctggccatgcccttcttctctcccttgcacctgtacctcttggtctttgaataaagcctgagtaggaaggctagcaaaaaaaaaaaaaaaaaaaaaaaaaaaaaaaaaaaaaaaaaaaaaaaaaaaaaaaaaaaaaaaaaaaaaaaaaaaaaaaa

SEQ ID NO: 6887 - RNA, 5797 nt, synthetic construct
  source 1..5797: mol_type = other RNA
aggaaataagagagaaaagaagagtaagaagaaatataagagccaccatggcccctaagaagaagcgtaaagtgagccggatggaacgcctcgtctacgaggtgcggcagaagtgcagaaacatcgaggacatctgcatctcctgcggatctctgaacgtgaccctggagcacccactgttcatcggcggcatgtgccagaactgtaaaaactgttttctggagtgtgcctatcaatacgacgatgacggctaccagagctactgcaccatctgttgcggcggaagagaggtgctgatgtgtggaaataacaactgctgccggtgcttctgcgtggaatgcgtggacctgctggtgggccccggcgccgcccaggccgctattaaggaagatccttggaactgctacatgtgcggccacaagggcacatacggcctgctgagacggagagaggactggcctagcagactgcagatgttcttcgccaataaccacgaccaggagttcgacccccctaaggtgtaccctcccgtccccgccgagaagagaaagcccatccgggtcctgagcctgttcgatggcatcgccaccggtctgctggtgctgaaggacctgggcatccaggtggataggtacattgcctccgaggtgtgcgaggactccatcaccgtgggaatggtgcgtcatcagggcaagatcatgtacgtgggcgacgtgcggagcgtgacacagaagcatatccaggagtggggccctttcgacctggtgatcggcggcagcccttgcaatgacctgagcatcgtgaacccagcccggaagggcctgtacgagggaaccggcagactgttcttcgagttttacagactgctgcacgacgcccggcctaaggaaggcgacgaccggcccttcttttggctgttcgagaatgtggtggccatgggagtcagcgacaagcgggatattagccggttcctggagagcaaccccgtgatgatcgatgccaaggaagtgagcgccgcccaccgggccagatacttctggggcaatctgcctggcatgaacagacccctggccagcaccgtgaacgacaagctggagctgcaggagtgcctggagcacggccggatcgccaagttcagcaaggtgagaaccatcaccacccgaagcaacagcatcaaacaaggcaaggaccagcactttcctgtgttcatgaacgagaaggaggacatcctgtggtgtaccgagatggagagagtgttcgggttcccagtccactacacagatgtcagcaacatgtctagactggccagacagagactgctgggaagaagctggtccgtccctgtgatcagacacctgttcgcccctctgaaggagtacttcgcctgcgtgagcagcggcaacagcaacgccaacagccggggccccagcttctctagcggcctggtgccactgtccctgagagggagccacatgggccccatggagatctacaaaaccgtgagcgcctggaagcggcagcctgtgcgcgtgctgagcctgtttcggaatatcgataaagtcctgaaaagcctgggattcctggagagcggctctggctccggcggtggcaccctgaagtacgtggaggatgtgacaaacgtggtcagacgggatgtggagaagtggggccccttcgatctggtgtacggcagcacccaacccctgggcagctcttgtgaccggtgccctggctggtacatgtttcagttccaccggatcctgcagtacgccctgccgagacaggagtcccagcggccattcttttggattttcatggacaacttgctgctgaccgaggatgaccaggaaactaccactcggttcctgcagaccgaagccgtgaccctgcaggacgtgagaggccgggactaccagaacgccatgcgggtgtggtccaacatccctggactgaaaagcaagcacgcacctctgacccctaaagaagaggagtacctgcaggcccaggtgcggagcagaagcaagctggacgcccctaaggtggatctgctggtgaagaattgcctcctgcccctgagagagtacttcaagtatttcagccagaatagtctgcccctgggcggcccaagcagcggcgcccctcctcccagcggcggcagcccagccggctccccaacctctaccgaggagggcacctctgagtccgccacccccgagagcggccctggcacctccaccgagcccagcgagggcagcgcacccggcagccctgccggcagccccacctccacagaggagggaaccagcaccgagcccagcgaaggcagcgccccaggcaccagcaccgagcctagtgagggcggctctggcggcggcagcgcccaggagattaaacggatcaacaagatcagaagaagacttgtgaaagacagcaacaccaagaaggccggcaagacaggccccatgaaaaccctgctggttagagtgatgacacccgatctgagagagcggctggaaaacctgagaaagaagcctgaaaatatcccccagcccatcagcaatacatctagagccaacctgaataagctgctgaccgattacaccgaaatgaagaaggcgatcctgcatgtgtactgggaagagttccagaaggaccctgtgggcctgatgagccgggtggcccagcctgccagcaagaagatcgatcagaacaagctgaaacctgagatggacgagaagggcaacctgaccaccgccggctttgcctgctctcagtgtggccagcccctgttcgtgtacaagctggagcaggtgtctgagaagggcaaggcttacaccaactacttcggacggtgcaatgtggccgagcacgaaaagctgatcctgctggcccagctgaagcccgagaaggatagcgacgaagccgtgacatatagcctgggaaagtttgggcagagggccctggatttctacagcattcatgtgaccaaggagtccacccaccccgtgaagcccctggcccagatcgccggaaacagatacgcctccggacctgtgggaaaggccctgagcgacgcatgtatgggcacaatcgcctccttcctgtctaagtaccaggacatcatcatcgaacaccagaaggtggtgaagggcaaccagaagagactggagagcctgcgggagctggccggcaaggaaaacctggaataccctagcgtgaccctgccacctcagcctcacaccaaggagggcgttgatgcctacaacgaagtgatcgcccgggtgcgaatgtgggtgaacctgaacctgtggcagaagctgaagctaagcagagatgatgccaagcctctgctgagactgaagggattcccttcctttcctctggtcgagagacaggccaacgaagtggactggtgggacatggtgtgtaacgtgaagaagctgatcaacgagaaaaaggaggatggcaaggtgttttggcagaatctggctggctacaagagacaggaagccctgagaccatacctgagcagcgaggaagatcggaagaagggaaagaaattcgctcggtaccagctgggcgacctgctgctgcacctggaaaagaagcacggcgaggactggggaaaggtgtacgacgaggcctgggagcggattgacaagaaagtggaaggcctgagcaagcacatcaagctggaagaggaacggagaagcgaggacgcccagagcaaggccgccctgaccgactggctgcgggctaaggccagcttcgtgatcgagggcctgaaggaggccgacaaggacgagttctgcagatgcgagctgaagctgcagaagtggtacggggacctgcggggaaagcccttcgccatcgaagccgagaacagcatcctggacatcagcggcttcagcaagcagtacaactgtgccttcatctggcagaaggacggcgtgaagaagctgaacctgtacctgatcatcaactacttcaagggcggcaagctgcggttcaagaagatcaaacctgaagccttcgaagccaacagattctacaccgtgatcaacaaaaagagcggcgagatcgtgcccatggaggtgaacttcaacttcgacgaccccaacctgatcatcctgcctctggcctttggcaagagacagggcagagaattcatctggaacgacctgctgtccctggaaaccggcagcctgaagctggccaacggaagagtgatcgagaagacactgtacaacagaagaacccggcaggatgagcctgccctgttcgtggccctgaccttcgagcggcgggaggtcctggactcctccaatatcaaaccaatgaacctgatcggcgtggcaagaggcgaaaacatccccgccgtgatcgccctgaccgaccccgagggctgcccactgagccggtttaaggatagcctgggaaacccaacccacatcctgagaatcggcgagagctataaggagaagcagcggaccatccaggccaagaaggaggtggagcagcggagagccggcggctacagccggaagtacgccagcaaagccaagaatctggcagacgatatggtgagaaacaccgctagagatctgctgtactacgccgtgacccaggatgccatgctgatcttcgccaacctgagccggggcttcggccggcagggcaagcggaccttcatggccgagagacagtacacacggatggaggactggctgaccgccaagctggcctacgagggcctgagcaagacctacctgtccaagacactggcccagtacacctccaagacatgcagcaactgtgggtttaccatcaccagcgccgactacgacagggtgctggagaagctgaagaagacagcaacaggctggatgaccacaattaacggcaaggagctgaaggtggagggccagattacctactacaacagatacaagagacagaacgtagtcaaggacctgtccgtcgagctggatagactgagcgaagaatctgtgaacaacgacatctcctcctggacaaagggcagaagcggagaagctctgagcctcctgaagaaaagattctcccatagacccgtgcaggagaagttcgtgtgcctgaactgcggcttcgagacacacgcagccgagcaagccgccctgaacatcgccagatcctggctgttcctgcggagccaggagtacaagaaataccagacaaacaagacaaccggcaacaccgataagagagccttcgtcgagacctggcagtccttttaccggaagaagcttaaggaggtgtggaaacctgccgtgcggtctggcggatctggcggaggctccacaagcaggcccagggccgtgaagttcggcgacgtggccctgtacttcagcagggaggagtggggctgcctgaggcccgcccagagggccctgtacagggacgtgatgcaggagacctacggccacctgggcgccctgggctgcgccggccccaagcccgccctgatcagctggctggagaggaacaccgacgactgggagaccgccgccctggacccccaggagtgccccaagggcgtggccgtgcagaccagccccaagaaaaagagaaaagtctaagctgccttctgcggggcttgccttctggccatgcccttcttctctcccttgcacctgtacctcttggtctttgaataaagcctgagtaggaaggctagcaaaaaaaaaaaaaaaaaaaaaaaaaaaaaaaaaaaaaaaaaaaaaaaaaaaaaaaaaaaaaaaaaaaaaaaaaaaaaaaa

SEQ ID NO: 6888 - RNA, 5797 nt, synthetic construct
  source 1..5797: mol_type = other RNA
aggaaataagagagaaaagaagagtaagaagaaatataagagccaccatggcccctaagaagaagcgtaaagtgagccggatggaacgcctcgtctacgaggtgcggcagaagtgcagaaacatcgaggacatctgcatctcctgcggatctctgaacgtgaccctggagcacccactgttcatcggcggcatgtgccagaactgtaaaaactgttttctggagtgtgcctatcaatacgacgatgacggctaccagagctactgcaccatctgttgcggcggaagagaggtgctgatgtgtggaaataacaactgctgccggtgcttctgcgtggaatgcgtggacctgctggtgggccccggcgccgcccaggccgctattaaggaagatccttggaactgctacatgtgcggccacaagggcacatacggcctgctgagacggagagaggactggcctagcagactgcagatgttcttcgccaataaccacgaccaggagttcgacccccctaaggtgtaccctcccgtccccgccgagaagagaaagcccatccgggtcctgagcctgttcgatggcatcgccaccggtctgctggtgctgaaggacctgggcatccaggtggataggtacattgcctccgaggtgtgcgaggactccatcaccgtgggaatggtgcgtcatcagggcaagatcatgtacgtgggcgacgtgcggagcgtgacacagaagcatatccaggagtggggccctttcgacctggtgatcggcggcagcccttgcaatgacctgagcatcgtgaacccagcccggaagggcctgtacgagggaaccggcagactgttcttcgagttttacagactgctgcacgacgcccggcctaaggaaggcgacgaccggcccttcttttggctgttcgagaatgtggtggccatgggagtcagcgacaagcgggatattagccggttcctggagagcaaccccgtgatgatcgatgccaaggaagtgagcgccgcccaccgggccagatacttctggggcaatctgcctggcatgaacagacccctggccagcaccgtgaacgacaagctggagctgcaggagtgcctggagcacggccggatcgccaagttcagcaaggtgagaaccatcaccacccgaagcaacagcatcaaacaaggcaaggaccagcactttcctgtgttcatgaacgagaaggaggacatcctgtggtgtaccgagatggagagagtgttcgggttcccagtccactacacagatgtcagcaacatgtctagactggccagacagagactgctgggaagaagctggtccgtccctgtgatcagacacctgttcgcccctctgaaggagtacttcgcctgcgtgagcagcggcaacagcaacgccaacagccggggccccagcttctctagcggcctggtgccactgtccctgagagggagccacatgggccccatggagatctacaaaaccgtgagcgcctggaagcggcagcctgtgcgcgtgctgagcctgtttcggaatatcgataaagtcctgaaaagcctgggattcctggagagcggctctggctccggcggtggcaccctgaagtacgtggaggatgtgacaaacgtggtcagacgggatgtggagaagtggggccccttcgatctggtgtacggcagcacccaacccctgggcagctcttgtgaccggtgccctggctggtacatgtttcagttccaccggatcctgcagtacgccctgccgagacaggagtcccagcggccattcttttggattttcatggacaacttgctgctgaccgaggatgaccaggaaactaccactcggttcctgcagaccgaagccgtgaccctgcaggacgtgagaggccgggactaccagaacgccatgcgggtgtggtccaacatccctggactgaaaagcaagcacgcacctctgacccctaaagaagaggagtacctgcaggcccaggtgcggagcagaagcaagctggacgcccctaaggtggatctgctggtgaagaattgcctcctgcccctgagagagtacttcaagtatttcagccagaatagtctgcccctgggcggcccaagcagcggcgcccctcctcccagcggcggcagcccagccggctccccaacctctaccgaggagggcacctctgagtccgccacccccgagagcggccctggcacctccaccgagcccagcgagggcagcgcacccggcagccctgccggcagccccacctccacagaggagggaaccagcaccgagcccagcgaaggcagcgccccaggcaccagcaccgagcctagtgagggcggctctggcggcggcagcgcccaggagattaaacggatcaacaagatcagaagaagacttgtgaaagacagcaacaccaagaaggccggcaagacaggccccatgaaaaccctgctggttagagtgatgacacccgatctgagagagcggctggaaaacctgagaaagaagcctgaaaatatcccccagcccatcagcaatacatctagagccaacctgaataagctgctgaccgattacaccgaaatgaagaaggcgatcctgcatgtgtactgggaagagttccagaaggaccctgtgggcctgatgagccgggtggcccagcctgccagcaagaagatcgatcagaacaagctgaaacctgagatggacgagaagggcaacctgaccaccgccggctttgcctgctctcagtgtggccagcccctgttcgtgtacaagctggagcaggtgtctgagaagggcaaggcttacaccaactacttcggacggtgcaatgtggccgagcacgaaaagctgatcctgctggcccagctgaagcccgagaaggatagcgacgaagccgtgacatatagcctgggaaagtttgggcagagggccctggatttctacagcattcatgtgaccaaggagtccacccaccccgtgaagcccctggcccagatcgccggaaacagatacgcctccggacctgtgggaaaggccctgagcgacgcatgtatgggcacaatcgcctccttcctgtctaagtaccaggacatcatcatcgaacaccagaaggtggtgaagggcaaccagaagagactggagagcctgcgggagctggccggcaaggaaaacctggaataccctagcgtgaccctgccacctcagcctcacaccaaggagggcgttgatgcctacaacgaagtgatcgcccgggtgcgaatgtgggtgaacctgaacctgtggcagaagctgaagctaagcagagatgatgccaagcctctgctgagactgaagggattcccttcctttcctctggtcgagagacaggccaacgaagtggactggtgggacatggtgtgtaacgtgaagaagctgatcaacgagaaaaaggaggatggcaaggtgttttggcagaatctggctggctacaagagacaggaagccctgagaccatacctgagcagcgaggaagatcggaagaagggaaagaaattcgctcggtaccagctgggcgacctgctgctgcacctggaaaagaagcacggcgaggactggggaaaggtgtacgacgaggcctgggagcggattgacaagaaagtggaaggcctgagcaagcacatcaagctggaagaggaacggagaagcgaggacgcccagagcaaggccgccctgaccgactggctgcgggctaaggccagcttcgtgatcgagggcctgaaggaggccgacaaggacgagttctgcagatgcgagctgaagctgcagaagtggtacggggacctgcggggaaagcccttcgccatcgaagccgagaacagcatcctggacatcagcggcttcagcaagcagtacaactgtgccttcatctggcagaaggacggcgtgaagaagctgaacctgtacctgatcatcaactacttcaagggcggcaagctgcggttcaagaagatcaaacctgaagccttcgaagccaacagattctacaccgtgatcaacaaaaagagcggcgagatcgtgcccatggaggtgaacttcaacttcgacgaccccaacctgatcatcctgcctctggcctttggcaagagacagggcagagaattcatctggaacgacctgctgtccctggaaaccggcagcctgaagctggccaacggaagagtgatcgagaagacactgtacaacagaagaacccggcaggatgagcctgccctgttcgtggccctgaccttcgagcggcgggaggtcctggactcctccaatatcaaaccaatgaacctgatcggcgtggcaagaggcgaaaacatccccgccgtgatcgccctgaccgaccccgagggctgcccactgagccggtttaaggatagcctgggaaacccaacccacatcctgagaatcggcgagagctataaggagaagcagcggaccatccaggccaagaaggaggtggagcagcggagagccggcggctacagccggaagtacgccagcaaagccaagaatctggcagacgatatggtgagaaacaccgctagagatctgctgtactacgccgtgacccaggatgccatgctgatcttcgccaacctgagccggggcttcggccggcagggcaagcggaccttcatggccgagagacagtacacacggatggaggactggctgaccgccaagctggcctacgagggcctgagcaagacctacctgtccaagacactggcccagtacacctccaagacatgcagcaactgtgggtttaccatcaccagcgccgactacgacagggtgctggagaagctgaagaagacagcaacaggctggatgaccacaattaacggcaaggagctgaaggtggagggccagattacctactacaacagatacaagagacagaacgtagtcaaggacctgtccgtcgagctggatagactgagcgaagaatctgtgaacaacgacatctcctcctggacaaagggcagaagcggagaagctctgagcctcctgaagaaaagattctcccatagacccgtgcaggagaagttcgtgtgcctgaactgcggcttcgagacacacgcagccgagcaagccgccctgaacatcgccagatcctggctgttcctgcggagccaggagtacaagaaataccagacaaacaagacaaccggcaacaccgataagagagccttcgtcgagacctggcagtccttttaccggaagaagcttaaggaggtgtggaaacctgccgtgcggtctggcggatctggcggaggctccacaagcaagcccggcgccctgagcttcgccgacgtggccgtgtacttcagccccgaggagtggggctgcctgaggcccgcccagagggccctgtacagggacgtgatgagggagacctacggccacctgggcgccctgggcttccccggccccaagcccgccctgatcagctggatggagcaggagagcgaggcctggagcagcgccgcccaggaccccgagaagggcgagagcctgggcggcgccaggaccagccccaagaaaaagagaaaagtctaagctgccttctgcggggcttgccttctggccatgcccttcttctctcccttgcacctgtacctcttggtctttgaataaagcctgagtaggaaggctagcaaaaaaaaaaaaaaaaaaaaaaaaaaaaaaaaaaaaaaaaaaaaaaaaaaaaaaaaaaaaaaaaaaaaaaaaaaaaaaaa

SEQ ID NO: 6889 - RNA, 5797 nt, synthetic construct
  source 1..5797: mol_type = other RNA
aggaaataagagagaaaagaagagtaagaagaaatataagagccaccatggcccctaagaagaagcgtaaagtgagccggatggaacgcctcgtctacgaggtgcggcagaagtgcagaaacatcgaggacatctgcatctcctgcggatctctgaacgtgaccctggagcacccactgttcatcggcggcatgtgccagaactgtaaaaactgttttctggagtgtgcctatcaatacgacgatgacggctaccagagctactgcaccatctgttgcggcggaagagaggtgctgatgtgtggaaataacaactgctgccggtgcttctgcgtggaatgcgtggacctgctggtgggccccggcgccgcccaggccgctattaaggaagatccttggaactgctacatgtgcggccacaagggcacatacggcctgctgagacggagagaggactggcctagcagactgcagatgttcttcgccaataaccacgaccaggagttcgacccccctaaggtgtaccctcccgtccccgccgagaagagaaagcccatccgggtcctgagcctgttcgatggcatcgccaccggtctgctggtgctgaaggacctgggcatccaggtggataggtacattgcctccgaggtgtgcgaggactccatcaccgtgggaatggtgcgtcatcagggcaagatcatgtacgtgggcgacgtgcggagcgtgacacagaagcatatccaggagtggggccctttcgacctggtgatcggcggcagcccttgcaatgacctgagcatcgtgaacccagcccggaagggcctgtacgagggaaccggcagactgttcttcgagttttacagactgctgcacgacgcccggcctaaggaaggcgacgaccggcccttcttttggctgttcgagaatgtggtggccatgggagtcagcgacaagcgggatattagccggttcctggagagcaaccccgtgatgatcgatgccaaggaagtgagcgccgcccaccgggccagatacttctggggcaatctgcctggcatgaacagacccctggccagcaccgtgaacgacaagctggagctgcaggagtgcctggagcacggccggatcgccaagttcagcaaggtgagaaccatcaccacccgaagcaacagcatcaaacaaggcaaggaccagcactttcctgtgttcatgaacgagaaggaggacatcctgtggtgtaccgagatggagagagtgttcgggttcccagtccactacacagatgtcagcaacatgtctagactggccagacagagactgctgggaagaagctggtccgtccctgtgatcagacacctgttcgcccctctgaaggagtacttcgcctgcgtgagcagcggcaacagcaacgccaacagccggggccccagcttctctagcggcctggtgccactgtccctgagagggagccacatgggccccatggagatctacaaaaccgtgagcgcctggaagcggcagcctgtgcgcgtgctgagcctgtttcggaatatcgataaagtcctgaaaagcctgggattcctggagagcggctctggctccggcggtggcaccctgaagtacgtggaggatgtgacaaacgtggtcagacgggatgtggagaagtggggccccttcgatctggtgtacggcagcacccaacccctgggcagctcttgtgaccggtgccctggctggtacatgtttcagttccaccggatcctgcagtacgccctgccgagacaggagtcccagcggccattcttttggattttcatggacaacttgctgctgaccgaggatgaccaggaaactaccactcggttcctgcagaccgaagccgtgaccctgcaggacgtgagaggccgggactaccagaacgccatgcgggtgtggtccaacatccctggactgaaaagcaagcacgcacctctgacccctaaagaagaggagtacctgcaggcccaggtgcggagcagaagcaagctggacgcccctaaggtggatctgctggtgaagaattgcctcctgcccctgagagagtacttcaagtatttcagccagaatagtctgcccctgggcggcccaagcagcggcgcccctcctcccagcggcggcagcccagccggctccccaacctctaccgaggagggcacctctgagtccgccacccccgagagcggccctggcacctccaccgagcccagcgagggcagcgcacccggcagccctgccggcagccccacctccacagaggagggaaccagcaccgagcccagcgaaggcagcgccccaggcaccagcaccgagcctagtgagggcggctctggcggcggcagcgcccaggagattaaacggatcaacaagatcagaagaagacttgtgaaagacagcaacaccaagaaggccggcaagacaggccccatgaaaaccctgctggttagagtgatgacacccgatctgagagagcggctggaaaacctgagaaagaagcctgaaaatatcccccagcccatcagcaatacatctagagccaacctgaataagctgctgaccgattacaccgaaatgaagaaggcgatcctgcatgtgtactgggaagagttccagaaggaccctgtgggcctgatgagccgggtggcccagcctgccagcaagaagatcgatcagaacaagctgaaacctgagatggacgagaagggcaacctgaccaccgccggctttgcctgctctcagtgtggccagcccctgttcgtgtacaagctggagcaggtgtctgagaagggcaaggcttacaccaactacttcggacggtgcaatgtggccgagcacgaaaagctgatcctgctggcccagctgaagcccgagaaggatagcgacgaagccgtgacatatagcctgggaaagtttgggcagagggccctggatttctacagcattcatgtgaccaaggagtccacccaccccgtgaagcccctggcccagatcgccggaaacagatacgcctccggacctgtgggaaaggccctgagcgacgcatgtatgggcacaatcgcctccttcctgtctaagtaccaggacatcatcatcgaacaccagaaggtggtgaagggcaaccagaagagactggagagcctgcgggagctggccggcaaggaaaacctggaataccctagcgtgaccctgccacctcagcctcacaccaaggagggcgttgatgcctacaacgaagtgatcgcccgggtgcgaatgtgggtgaacctgaacctgtggcagaagctgaagctaagcagagatgatgccaagcctctgctgagactgaagggattcccttcctttcctctggtcgagagacaggccaacgaagtggactggtgggacatggtgtgtaacgtgaagaagctgatcaacgagaaaaaggaggatggcaaggtgttttggcagaatctggctggctacaagagacaggaagccctgagaccatacctgagcagcgaggaagatcggaagaagggaaagaaattcgctcggtaccagctgggcgacctgctgctgcacctggaaaagaagcacggcgaggactggggaaaggtgtacgacgaggcctgggagcggattgacaagaaagtggaaggcctgagcaagcacatcaagctggaagaggaacggagaagcgaggacgcccagagcaaggccgccctgaccgactggctgcgggctaaggccagcttcgtgatcgagggcctgaaggaggccgacaaggacgagttctgcagatgcgagctgaagctgcagaagtggtacggggacctgcggggaaagcccttcgccatcgaagccgagaacagcatcctggacatcagcggcttcagcaagcagtacaactgtgccttcatctggcagaaggacggcgtgaagaagctgaacctgtacctgatcatcaactacttcaagggcggcaagctgcggttcaagaagatcaaacctgaagccttcgaagccaacagattctacaccgtgatcaacaaaaagagcggcgagatcgtgcccatggaggtgaacttcaacttcgacgaccccaacctgatcatcctgcctctggcctttggcaagagacagggcagagaattcatctggaacgacctgctgtccctggaaaccggcagcctgaagctggccaacggaagagtgatcgagaagacactgtacaacagaagaacccggcaggatgagcctgccctgttcgtggccctgaccttcgagcggcgggaggtcctggactcctccaatatcaaaccaatgaacctgatcggcgtggcaagaggcgaaaacatccccgccgtgatcgccctgaccgaccccgagggctgcccactgagccggtttaaggatagcctgggaaacccaacccacatcctgagaatcggcgagagctataaggagaagcagcggaccatccaggccaagaaggaggtggagcagcggagagccggcggctacagccggaagtacgccagcaaagccaagaatctggcagacgatatggtgagaaacaccgctagagatctgctgtactacgccgtgacccaggatgccatgctgatcttcgccaacctgagccggggcttcggccggcagggcaagcggaccttcatggccgagagacagtacacacggatggaggactggctgaccgccaagctggcctacgagggcctgagcaagacctacctgtccaagacactggcccagtacacctccaagacatgcagcaactgtgggtttaccatcaccagcgccgactacgacagggtgctggagaagctgaagaagacagcaacaggctggatgaccacaattaacggcaaggagctgaaggtggagggccagattacctactacaacagatacaagagacagaacgtagtcaaggacctgtccgtcgagctggatagactgagcgaagaatctgtgaacaacgacatctcctcctggacaaagggcagaagcggagaagctctgagcctcctgaagaaaagattctcccatagacccgtgcaggagaagttcgtgtgcctgaactgcggcttcgagacacacgcagccgagcaagccgccctgaacatcgccagatcctggctgttcctgcggagccaggagtacaagaaataccagacaaacaagacaaccggcaacaccgataagagagccttcgtcgagacctggcagtccttttaccggaagaagcttaaggaggtgtggaaacctgccgtgcggtctggcggatctggcggaggctccacaagcgagcccggcgccgtgagcttcgccgacgtggccgtgtacttcagccccgaggagtggggctgcctgaggcccgcccagagggtgctgtacagggacgtgatgagggagacctacggccacctgggcgccctgggcttccccggccccaagcccgccctgatcagctggatggagcaggagagcgaggcctggagcagcgccgcccaggaccccgaggagggcgagagcctgggcggcgccctgaccagccccaagaaaaagagaaaagtctaagctgccttctgcggggcttgccttctggccatgcccttcttctctcccttgcacctgtacctcttggtctttgaataaagcctgagtaggaaggctagcaaaaaaaaaaaaaaaaaaaaaaaaaaaaaaaaaaaaaaaaaaaaaaaaaaaaaaaaaaaaaaaaaaaaaaaaaaaaaaaa

SEQ ID NO: 6890 - RNA, 5800 nt, synthetic construct
  source 1..5800: mol_type = other RNA
aggaaataagagagaaaagaagagtaagaagaaatataagagccaccatggcccctaagaagaagcgtaaagtgagccggatggaacgcctcgtctacgaggtgcggcagaagtgcagaaacatcgaggacatctgcatctcctgcggatctctgaacgtgaccctggagcacccactgttcatcggcggcatgtgccagaactgtaaaaactgttttctggagtgtgcctatcaatacgacgatgacggctaccagagctactgcaccatctgttgcggcggaagagaggtgctgatgtgtggaaataacaactgctgccggtgcttctgcgtggaatgcgtggacctgctggtgggccccggcgccgcccaggccgctattaaggaagatccttggaactgctacatgtgcggccacaagggcacatacggcctgctgagacggagagaggactggcctagcagactgcagatgttcttcgccaataaccacgaccaggagttcgacccccctaaggtgtaccctcccgtccccgccgagaagagaaagcccatccgggtcctgagcctgttcgatggcatcgccaccggtctgctggtgctgaaggacctgggcatccaggtggataggtacattgcctccgaggtgtgcgaggactccatcaccgtgggaatggtgcgtcatcagggcaagatcatgtacgtgggcgacgtgcggagcgtgacacagaagcatatccaggagtggggccctttcgacctggtgatcggcggcagcccttgcaatgacctgagcatcgtgaacccagcccggaagggcctgtacgagggaaccggcagactgttcttcgagttttacagactgctgcacgacgcccggcctaaggaaggcgacgaccggcccttcttttggctgttcgagaatgtggtggccatgggagtcagcgacaagcgggatattagccggttcctggagagcaaccccgtgatgatcgatgccaaggaagtgagcgccgcccaccgggccagatacttctggggcaatctgcctggcatgaacagacccctggccagcaccgtgaacgacaagctggagctgcaggagtgcctggagcacggccggatcgccaagttcagcaaggtgagaaccatcaccacccgaagcaacagcatcaaacaaggcaaggaccagcactttcctgtgttcatgaacgagaaggaggacatcctgtggtgtaccgagatggagagagtgttcgggttcccagtccactacacagatgtcagcaacatgtctagactggccagacagagactgctgggaagaagctggtccgtccctgtgatcagacacctgttcgcccctctgaaggagtacttcgcctgcgtgagcagcggcaacagcaacgccaacagccggggccccagcttctctagcggcctggtgccactgtccctgagagggagccacatgggccccatggagatctacaaaaccgtgagcgcctggaagcggcagcctgtgcgcgtgctgagcctgtttcggaatatcgataaagtcctgaaaagcctgggattcctggagagcggctctggctccggcggtggcaccctgaagtacgtggaggatgtgacaaacgtggtcagacgggatgtggagaagtggggccccttcgatctggtgtacggcagcacccaacccctgggcagctcttgtgaccggtgccctggctggtacatgtttcagttccaccggatcctgcagtacgccctgccgagacaggagtcccagcggccattcttttggattttcatggacaacttgctgctgaccgaggatgaccaggaaactaccactcggttcctgcagaccgaagccgtgaccctgcaggacgtgagaggccgggactaccagaacgccatgcgggtgtggtccaacatccctggactgaaaagcaagcacgcacctctgacccctaaagaagaggagtacctgcaggcccaggtgcggagcagaagcaagctggacgcccctaaggtggatctgctggtgaagaattgcctcctgcccctgagagagtacttcaagtatttcagccagaatagtctgcccctgggcggcccaagcagcggcgcccctcctcccagcggcggcagcccagccggctccccaacctctaccgaggagggcacctctgagtccgccacccccgagagcggccctggcacctccaccgagcccagcgagggcagcgcacccggcagccctgccggcagccccacctccacagaggagggaaccagcaccgagcccagcgaaggcagcgccccaggcaccagcaccgagcctagtgagggcggctctggcggcggcagcgcccaggagattaaacggatcaacaagatcagaagaagacttgtgaaagacagcaacaccaagaaggccggcaagacaggccccatgaaaaccctgctggttagagtgatgacacccgatctgagagagcggctggaaaacctgagaaagaagcctgaaaatatcccccagcccatcagcaatacatctagagccaacctgaataagctgctgaccgattacaccgaaatgaagaaggcgatcctgcatgtgtactgggaagagttccagaaggaccctgtgggcctgatgagccgggtggcccagcctgccagcaagaagatcgatcagaacaagctgaaacctgagatggacgagaagggcaacctgaccaccgccggctttgcctgctctcagtgtggccagcccctgttcgtgtacaagctggagcaggtgtctgagaagggcaaggcttacaccaactacttcggacggtgcaatgtggccgagcacgaaaagctgatcctgctggcccagctgaagcccgagaaggatagcgacgaagccgtgacatatagcctgggaaagtttgggcagagggccctggatttctacagcattcatgtgaccaaggagtccacccaccccgtgaagcccctggcccagatcgccggaaacagatacgcctccggacctgtgggaaaggccctgagcgacgcatgtatgggcacaatcgcctccttcctgtctaagtaccaggacatcatcatcgaacaccagaaggtggtgaagggcaaccagaagagactggagagcctgcgggagctggccggcaaggaaaacctggaataccctagcgtgaccctgccacctcagcctcacaccaaggagggcgttgatgcctacaacgaagtgatcgcccgggtgcgaatgtgggtgaacctgaacctgtggcagaagctgaagctaagcagagatgatgccaagcctctgctgagactgaagggattcccttcctttcctctggtcgagagacaggccaacgaagtggactggtgggacatggtgtgtaacgtgaagaagctgatcaacgagaaaaaggaggatggcaaggtgttttggcagaatctggctggctacaagagacaggaagccctgagaccatacctgagcagcgaggaagatcggaagaagggaaagaaattcgctcggtaccagctgggcgacctgctgctgcacctggaaaagaagcacggcgaggactggggaaaggtgtacgacgaggcctgggagcggattgacaagaaagtggaaggcctgagcaagcacatcaagctggaagaggaacggagaagcgaggacgcccagagcaaggccgccctgaccgactggctgcgggctaaggccagcttcgtgatcgagggcctgaaggaggccgacaaggacgagttctgcagatgcgagctgaagctgcagaagtggtacggggacctgcggggaaagcccttcgccatcgaagccgagaacagcatcctggacatcagcggcttcagcaagcagtacaactgtgccttcatctggcagaaggacggcgtgaagaagctgaacctgtacctgatcatcaactacttcaagggcggcaagctgcggttcaagaagatcaaacctgaagccttcgaagccaacagattctacaccgtgatcaacaaaaagagcggcgagatcgtgcccatggaggtgaacttcaacttcgacgaccccaacctgatcatcctgcctctggcctttggcaagagacagggcagagaattcatctggaacgacctgctgtccctggaaaccggcagcctgaagctggccaacggaagagtgatcgagaagacactgtacaacagaagaacccggcaggatgagcctgccctgttcgtggccctgaccttcgagcggcgggaggtcctggactcctccaatatcaaaccaatgaacctgatcggcgtggcaagaggcgaaaacatccccgccgtgatcgccctgaccgaccccgagggctgcccactgagccggtttaaggatagcctgggaaacccaacccacatcctgagaatcggcgagagctataaggagaagcagcggaccatccaggccaagaaggaggtggagcagcggagagccggcggctacagccggaagtacgccagcaaagccaagaatctggcagacgatatggtgagaaacaccgctagagatctgctgtactacgccgtgacccaggatgccatgctgatcttcgccaacctgagccggggcttcggccggcagggcaagcggaccttcatggccgagagacagtacacacggatggaggactggctgaccgccaagctggcctacgagggcctgagcaagacctacctgtccaagacactggcccagtacacctccaagacatgcagcaactgtgggtttaccatcaccagcgccgactacgacagggtgctggagaagctgaagaagacagcaacaggctggatgaccacaattaacggcaaggagctgaaggtggagggccagattacctactacaacagatacaagagacagaacgtagtcaaggacctgtccgtcgagctggatagactgagcgaagaatctgtgaacaacgacatctcctcctggacaaagggcagaagcggagaagctctgagcctcctgaagaaaagattctcccatagacccgtgcaggagaagttcgtgtgcctgaactgcggcttcgagacacacgcagccgagcaagccgccctgaacatcgccagatcctggctgttcctgcggagccaggagtacaagaaataccagacaaacaagacaaccggcaacaccgataagagagccttcgtcgagacctggcagtccttttaccggaagaagcttaaggaggtgtggaaacctgccgtgcggtctggcggatctggcggaggctccacaagcgtgaccttcgaggacgtggccgtgaacttcaccagcggcgagtgggccctgctggacagcagccagaagaagctgtacagggacgtgatgaaggagaccttcctgaacctgatcagcatcgagaagggcctggagcccaacatcgaggagcactacaaggacttctgcaggaacctgaggacccagctggtggagaaggactggggctacgagtacaacaggcagtgggacgacaacctgcagaccaccagccccaagaaaaagagaaaagtctaagctgccttctgcggggcttgccttctggccatgcccttcttctctcccttgcacctgtacctcttggtctttgaataaagcctgagtaggaaggctagcaaaaaaaaaaaaaaaaaaaaaaaaaaaaaaaaaaaaaaaaaaaaaaaaaaaaaaaaaaaaaaaaaaaaaaaaaaaaaaaa

SEQ ID NO: 6891 - RNA, 5797 nt, synthetic construct
  source 1..5797: mol_type = other RNA
aggaaataagagagaaaagaagagtaagaagaaatataagagccaccatggcccctaagaagaagcgtaaagtgagccggatggaacgcctcgtctacgaggtgcggcagaagtgcagaaacatcgaggacatctgcatctcctgcggatctctgaacgtgaccctggagcacccactgttcatcggcggcatgtgccagaactgtaaaaactgttttctggagtgtgcctatcaatacgacgatgacggctaccagagctactgcaccatctgttgcggcggaagagaggtgctgatgtgtggaaataacaactgctgccggtgcttctgcgtggaatgcgtggacctgctggtgggccccggcgccgcccaggccgctattaaggaagatccttggaactgctacatgtgcggccacaagggcacatacggcctgctgagacggagagaggactggcctagcagactgcagatgttcttcgccaataaccacgaccaggagttcgacccccctaaggtgtaccctcccgtccccgccgagaagagaaagcccatccgggtcctgagcctgttcgatggcatcgccaccggtctgctggtgctgaaggacctgggcatccaggtggataggtacattgcctccgaggtgtgcgaggactccatcaccgtgggaatggtgcgtcatcagggcaagatcatgtacgtgggcgacgtgcggagcgtgacacagaagcatatccaggagtggggccctttcgacctggtgatcggcggcagcccttgcaatgacctgagcatcgtgaacccagcccggaagggcctgtacgagggaaccggcagactgttcttcgagttttacagactgctgcacgacgcccggcctaaggaaggcgacgaccggcccttcttttggctgttcgagaatgtggtggccatgggagtcagcgacaagcgggatattagccggttcctggagagcaaccccgtgatgatcgatgccaaggaagtgagcgccgcccaccgggccagatacttctggggcaatctgcctggcatgaacagacccctggccagcaccgtgaacgacaagctggagctgcaggagtgcctggagcacggccggatcgccaagttcagcaaggtgagaaccatcaccacccgaagcaacagcatcaaacaaggcaaggaccagcactttcctgtgttcatgaacgagaaggaggacatcctgtggtgtaccgagatggagagagtgttcgggttcccagtccactacacagatgtcagcaacatgtctagactggccagacagagactgctgggaagaagctggtccgtccctgtgatcagacacctgttcgcccctctgaaggagtacttcgcctgcgtgagcagcggcaacagcaacgccaacagccggggccccagcttctctagcggcctggtgccactgtccctgagagggagccacatgggccccatggagatctacaaaaccgtgagcgcctggaagcggcagcctgtgcgcgtgctgagcctgtttcggaatatcgataaagtcctgaaaagcctgggattcctggagagcggctctggctccggcggtggcaccctgaagtacgtggaggatgtgacaaacgtggtcagacgggatgtggagaagtggggccccttcgatctggtgtacggcagcacccaacccctgggcagctcttgtgaccggtgccctggctggtacatgtttcagttccaccggatcctgcagtacgccctgccgagacaggagtcccagcggccattcttttggattttcatggacaacttgctgctgaccgaggatgaccaggaaactaccactcggttcctgcagaccgaagccgtgaccctgcaggacgtgagaggccgggactaccagaacgccatgcgggtgtggtccaacatccctggactgaaaagcaagcacgcacctctgacccctaaagaagaggagtacctgcaggcccaggtgcggagcagaagcaagctggacgcccctaaggtggatctgctggtgaagaattgcctcctgcccctgagagagtacttcaagtatttcagccagaatagtctgcccctgggcggcccaagcagcggcgcccctcctcccagcggcggcagcccagccggctccccaacctctaccgaggagggcacctctgagtccgccacccccgagagcggccctggcacctccaccgagcccagcgagggcagcgcacccggcagccctgccggcagccccacctccacagaggagggaaccagcaccgagcccagcgaaggcagcgccccaggcaccagcaccgagcctagtgagggcggctctggcggcggcagcgcccaggagattaaacggatcaacaagatcagaagaagacttgtgaaagacagcaacaccaagaaggccggcaagacaggccccatgaaaaccctgctggttagagtgatgacacccgatctgagagagcggctggaaaacctgagaaagaagcctgaaaatatcccccagcccatcagcaatacatctagagccaacctgaataagctgctgaccgattacaccgaaatgaagaaggcgatcctgcatgtgtactgggaagagttccagaaggaccctgtgggcctgatgagccgggtggcccagcctgccagcaagaagatcgatcagaacaagctgaaacctgagatggacgagaagggcaacctgaccaccgccggctttgcctgctctcagtgtggccagcccctgttcgtgtacaagctggagcaggtgtctgagaagggcaaggcttacaccaactacttcggacggtgcaatgtggccgagcacgaaaagctgatcctgctggcccagctgaagcccgagaaggatagcgacgaagccgtgacatatagcctgggaaagtttgggcagagggccctggatttctacagcattcatgtgaccaaggagtccacccaccccgtgaagcccctggcccagatcgccggaaacagatacgcctccggacctgtgggaaaggccctgagcgacgcatgtatgggcacaatcgcctccttcctgtctaagtaccaggacatcatcatcgaacaccagaaggtggtgaagggcaaccagaagagactggagagcctgcgggagctggccggcaaggaaaacctggaataccctagcgtgaccctgccacctcagcctcacaccaaggagggcgttgatgcctacaacgaagtgatcgcccgggtgcgaatgtgggtgaacctgaacctgtggcagaagctgaagctaagcagagatgatgccaagcctctgctgagactgaagggattcccttcctttcctctggtcgagagacaggccaacgaagtggactggtgggacatggtgtgtaacgtgaagaagctgatcaacgagaaaaaggaggatggcaaggtgttttggcagaatctggctggctacaagagacaggaagccctgagaccatacctgagcagcgaggaagatcggaagaagggaaagaaattcgctcggtaccagctgggcgacctgctgctgcacctggaaaagaagcacggcgaggactggggaaaggtgtacgacgaggcctgggagcggattgacaagaaagtggaaggcctgagcaagcacatcaagctggaagaggaacggagaagcgaggacgcccagagcaaggccgccctgaccgactggctgcgggctaaggccagcttcgtgatcgagggcctgaaggaggccgacaaggacgagttctgcagatgcgagctgaagctgcagaagtggtacggggacctgcggggaaagcccttcgccatcgaagccgagaacagcatcctggacatcagcggcttcagcaagcagtacaactgtgccttcatctggcagaaggacggcgtgaagaagctgaacctgtacctgatcatcaactacttcaagggcggcaagctgcggttcaagaagatcaaacctgaagccttcgaagccaacagattctacaccgtgatcaacaaaaagagcggcgagatcgtgcccatggaggtgaacttcaacttcgacgaccccaacctgatcatcctgcctctggcctttggcaagagacagggcagagaattcatctggaacgacctgctgtccctggaaaccggcagcctgaagctggccaacggaagagtgatcgagaagacactgtacaacagaagaacccggcaggatgagcctgccctgttcgtggccctgaccttcgagcggcgggaggtcctggactcctccaatatcaaaccaatgaacctgatcggcgtggcaagaggcgaaaacatccccgccgtgatcgccctgaccgaccccgagggctgcccactgagccggtttaaggatagcctgggaaacccaacccacatcctgagaatcggcgagagctataaggagaagcagcggaccatccaggccaagaaggaggtggagcagcggagagccggcggctacagccggaagtacgccagcaaagccaagaatctggcagacgatatggtgagaaacaccgctagagatctgctgtactacgccgtgacccaggatgccatgctgatcttcgccaacctgagccggggcttcggccggcagggcaagcggaccttcatggccgagagacagtacacacggatggaggactggctgaccgccaagctggcctacgagggcctgagcaagacctacctgtccaagacactggcccagtacacctccaagacatgcagcaactgtgggtttaccatcaccagcgccgactacgacagggtgctggagaagctgaagaagacagcaacaggctggatgaccacaattaacggcaaggagctgaaggtggagggccagattacctactacaacagatacaagagacagaacgtagtcaaggacctgtccgtcgagctggatagactgagcgaagaatctgtgaacaacgacatctcctcctggacaaagggcagaagcggagaagctctgagcctcctgaagaaaagattctcccatagacccgtgcaggagaagttcgtgtgcctgaactgcggcttcgagacacacgcagccgagcaagccgccctgaacatcgccagatcctggctgttcctgcggagccaggagtacaagaaataccagacaaacaagacaaccggcaacaccgataagagagccttcgtcgagacctggcagtccttttaccggaagaagcttaaggaggtgtggaaacctgccgtgcggtctggcggatctggcggaggctccacaagcatgatgggcctggtgaccttcgaggacgtggccgtggacttcacccaggaggagtggcagtacctgaaccccccccagaggatcctgtacaggggcgtgatgatggagacctacaggaacctggtgttcgtggccggccagcaggccaccaagcccgacctgatcctgaagatggaggtggaggagccctacctggccgaggacaagatccccatctggagctgccccgaggaggcctgccagaccagccccaagaaaaagagaaaagtctaagctgccttctgcggggcttgccttctggccatgcccttcttctctcccttgcacctgtacctcttggtctttgaataaagcctgagtaggaaggctagcaaaaaaaaaaaaaaaaaaaaaaaaaaaaaaaaaaaaaaaaaaaaaaaaaaaaaaaaaaaaaaaaaaaaaaaaaaaaaaaa

SEQ ID NO: 6892 - RNA, 5797 nt, synthetic construct
  source 1..5797: mol_type = other RNA
aggaaataagagagaaaagaagagtaagaagaaatataagagccaccatggcccctaagaagaagcgtaaagtgagccggatggaacgcctcgtctacgaggtgcggcagaagtgcagaaacatcgaggacatctgcatctcctgcggatctctgaacgtgaccctggagcacccactgttcatcggcggcatgtgccagaactgtaaaaactgttttctggagtgtgcctatcaatacgacgatgacggctaccagagctactgcaccatctgttgcggcggaagagaggtgctgatgtgtggaaataacaactgctgccggtgcttctgcgtggaatgcgtggacctgctggtgggccccggcgccgcccaggccgctattaaggaagatccttggaactgctacatgtgcggccacaagggcacatacggcctgctgagacggagagaggactggcctagcagactgcagatgttcttcgccaataaccacgaccaggagttcgacccccctaaggtgtaccctcccgtccccgccgagaagagaaagcccatccgggtcctgagcctgttcgatggcatcgccaccggtctgctggtgctgaaggacctgggcatccaggtggataggtacattgcctccgaggtgtgcgaggactccatcaccgtgggaatggtgcgtcatcagggcaagatcatgtacgtgggcgacgtgcggagcgtgacacagaagcatatccaggagtggggccctttcgacctggtgatcggcggcagcccttgcaatgacctgagcatcgtgaacccagcccggaagggcctgtacgagggaaccggcagactgttcttcgagttttacagactgctgcacgacgcccggcctaaggaaggcgacgaccggcccttcttttggctgttcgagaatgtggtggccatgggagtcagcgacaagcgggatattagccggttcctggagagcaaccccgtgatgatcgatgccaaggaagtgagcgccgcccaccgggccagatacttctggggcaatctgcctggcatgaacagacccctggccagcaccgtgaacgacaagctggagctgcaggagtgcctggagcacggccggatcgccaagttcagcaaggtgagaaccatcaccacccgaagcaacagcatcaaacaaggcaaggaccagcactttcctgtgttcatgaacgagaaggaggacatcctgtggtgtaccgagatggagagagtgttcgggttcccagtccactacacagatgtcagcaacatgtctagactggccagacagagactgctgggaagaagctggtccgtccctgtgatcagacacctgttcgcccctctgaaggagtacttcgcctgcgtgagcagcggcaacagcaacgccaacagccggggccccagcttctctagcggcctggtgccactgtccctgagagggagccacatgggccccatggagatctacaaaaccgtgagcgcctggaagcggcagcctgtgcgcgtgctgagcctgtttcggaatatcgataaagtcctgaaaagcctgggattcctggagagcggctctggctccggcggtggcaccctgaagtacgtggaggatgtgacaaacgtggtcagacgggatgtggagaagtggggccccttcgatctggtgtacggcagcacccaacccctgggcagctcttgtgaccggtgccctggctggtacatgtttcagttccaccggatcctgcagtacgccctgccgagacaggagtcccagcggccattcttttggattttcatggacaacttgctgctgaccgaggatgaccaggaaactaccactcggttcctgcagaccgaagccgtgaccctgcaggacgtgagaggccgggactaccagaacgccatgcgggtgtggtccaacatccctggactgaaaagcaagcacgcacctctgacccctaaagaagaggagtacctgcaggcccaggtgcggagcagaagcaagctggacgcccctaaggtggatctgctggtgaagaattgcctcctgcccctgagagagtacttcaagtatttcagccagaatagtctgcccctgggcggcccaagcagcggcgcccctcctcccagcggcggcagcccagccggctccccaacctctaccgaggagggcacctctgagtccgccacccccgagagcggccctggcacctccaccgagcccagcgagggcagcgcacccggcagccctgccggcagccccacctccacagaggagggaaccagcaccgagcccagcgaaggcagcgccccaggcaccagcaccgagcctagtgagggcggctctggcggcggcagcgcccaggagattaaacggatcaacaagatcagaagaagacttgtgaaagacagcaacaccaagaaggccggcaagacaggccccatgaaaaccctgctggttagagtgatgacacccgatctgagagagcggctggaaaacctgagaaagaagcctgaaaatatcccccagcccatcagcaatacatctagagccaacctgaataagctgctgaccgattacaccgaaatgaagaaggcgatcctgcatgtgtactgggaagagttccagaaggaccctgtgggcctgatgagccgggtggcccagcctgccagcaagaagatcgatcagaacaagctgaaacctgagatggacgagaagggcaacctgaccaccgccggctttgcctgctctcagtgtggccagcccctgttcgtgtacaagctggagcaggtgtctgagaagggcaaggcttacaccaactacttcggacggtgcaatgtggccgagcacgaaaagctgatcctgctggcccagctgaagcccgagaaggatagcgacgaagccgtgacatatagcctgggaaagtttgggcagagggccctggatttctacagcattcatgtgaccaaggagtccacccaccccgtgaagcccctggcccagatcgccggaaacagatacgcctccggacctgtgggaaaggccctgagcgacgcatgtatgggcacaatcgcctccttcctgtctaagtaccaggacatcatcatcgaacaccagaaggtggtgaagggcaaccagaagagactggagagcctgcgggagctggccggcaaggaaaacctggaataccctagcgtgaccctgccacctcagcctcacaccaaggagggcgttgatgcctacaacgaagtgatcgcccgggtgcgaatgtgggtgaacctgaacctgtggcagaagctgaagctaagcagagatgatgccaagcctctgctgagactgaagggattcccttcctttcctctggtcgagagacaggccaacgaagtggactggtgggacatggtgtgtaacgtgaagaagctgatcaacgagaaaaaggaggatggcaaggtgttttggcagaatctggctggctacaagagacaggaagccctgagaccatacctgagcagcgaggaagatcggaagaagggaaagaaattcgctcggtaccagctgggcgacctgctgctgcacctggaaaagaagcacggcgaggactggggaaaggtgtacgacgaggcctgggagcggattgacaagaaagtggaaggcctgagcaagcacatcaagctggaagaggaacggagaagcgaggacgcccagagcaaggccgccctgaccgactggctgcgggctaaggccagcttcgtgatcgagggcctgaaggaggccgacaaggacgagttctgcagatgcgagctgaagctgcagaagtggtacggggacctgcggggaaagcccttcgccatcgaagccgagaacagcatcctggacatcagcggcttcagcaagcagtacaactgtgccttcatctggcagaaggacggcgtgaagaagctgaacctgtacctgatcatcaactacttcaagggcggcaagctgcggttcaagaagatcaaacctgaagccttcgaagccaacagattctacaccgtgatcaacaaaaagagcggcgagatcgtgcccatggaggtgaacttcaacttcgacgaccccaacctgatcatcctgcctctggcctttggcaagagacagggcagagaattcatctggaacgacctgctgtccctggaaaccggcagcctgaagctggccaacggaagagtgatcgagaagacactgtacaacagaagaacccggcaggatgagcctgccctgttcgtggccctgaccttcgagcggcgggaggtcctggactcctccaatatcaaaccaatgaacctgatcggcgtggcaagaggcgaaaacatccccgccgtgatcgccctgaccgaccccgagggctgcccactgagccggtttaaggatagcctgggaaacccaacccacatcctgagaatcggcgagagctataaggagaagcagcggaccatccaggccaagaaggaggtggagcagcggagagccggcggctacagccggaagtacgccagcaaagccaagaatctggcagacgatatggtgagaaacaccgctagagatctgctgtactacgccgtgacccaggatgccatgctgatcttcgccaacctgagccggggcttcggccggcagggcaagcggaccttcatggccgagagacagtacacacggatggaggactggctgaccgccaagctggcctacgagggcctgagcaagacctacctgtccaagacactggcccagtacacctccaagacatgcagcaactgtgggtttaccatcaccagcgccgactacgacagggtgctggagaagctgaagaagacagcaacaggctggatgaccacaattaacggcaaggagctgaaggtggagggccagattacctactacaacagatacaagagacagaacgtagtcaaggacctgtccgtcgagctggatagactgagcgaagaatctgtgaacaacgacatctcctcctggacaaagggcagaagcggagaagctctgagcctcctgaagaaaagattctcccatagacccgtgcaggagaagttcgtgtgcctgaactgcggcttcgagacacacgcagccgagcaagccgccctgaacatcgccagatcctggctgttcctgcggagccaggagtacaagaaataccagacaaacaagacaaccggcaacaccgataagagagccttcgtcgagacctggcagtccttttaccggaagaagcttaaggaggtgtggaaacctgccgtgcggtctggcggatctggcggaggctccacaagcagccaggagcccgtgaccttcgaggacgtggccgtgtacttcacccagaaccagtgggccaacctggacttcacccagagggccctgtacagggaggtgatgctggagaactacgccaacgtggccagcctggccttccccttccccaagcccgacctggtgagccagctggagaggggcgaggccccctggggccccgacccctgggaggccgaggtgctgaggggcgtgtgccccggcggcaccagccccaagaaaaagagaaaagtctaagctgccttctgcggggcttgccttctggccatgcccttcttctctcccttgcacctgtacctcttggtctttgaataaagcctgagtaggaaggctagcaaaaaaaaaaaaaaaaaaaaaaaaaaaaaaaaaaaaaaaaaaaaaaaaaaaaaaaaaaaaaaaaaaaaaaaaaaaaaaaa

SEQ ID NO: 6893 - RNA, 5797 nt, synthetic construct
  source 1..5797: mol_type = other RNA
aggaaataagagagaaaagaagagtaagaagaaatataagagccaccatggcccctaagaagaagcgtaaagtgagccggatggaacgcctcgtctacgaggtgcggcagaagtgcagaaacatcgaggacatctgcatctcctgcggatctctgaacgtgaccctggagcacccactgttcatcggcggcatgtgccagaactgtaaaaactgttttctggagtgtgcctatcaatacgacgatgacggctaccagagctactgcaccatctgttgcggcggaagagaggtgctgatgtgtggaaataacaactgctgccggtgcttctgcgtggaatgcgtggacctgctggtgggccccggcgccgcccaggccgctattaaggaagatccttggaactgctacatgtgcggccacaagggcacatacggcctgctgagacggagagaggactggcctagcagactgcagatgttcttcgccaataaccacgaccaggagttcgacccccctaaggtgtaccctcccgtccccgccgagaagagaaagcccatccgggtcctgagcctgttcgatggcatcgccaccggtctgctggtgctgaaggacctgggcatccaggtggataggtacattgcctccgaggtgtgcgaggactccatcaccgtgggaatggtgcgtcatcagggcaagatcatgtacgtgggcgacgtgcggagcgtgacacagaagcatatccaggagtggggccctttcgacctggtgatcggcggcagcccttgcaatgacctgagcatcgtgaacccagcccggaagggcctgtacgagggaaccggcagactgttcttcgagttttacagactgctgcacgacgcccggcctaaggaaggcgacgaccggcccttcttttggctgttcgagaatgtggtggccatgggagtcagcgacaagcgggatattagccggttcctggagagcaaccccgtgatgatcgatgccaaggaagtgagcgccgcccaccgggccagatacttctggggcaatctgcctggcatgaacagacccctggccagcaccgtgaacgacaagctggagctgcaggagtgcctggagcacggccggatcgccaagttcagcaaggtgagaaccatcaccacccgaagcaacagcatcaaacaaggcaaggaccagcactttcctgtgttcatgaacgagaaggaggacatcctgtggtgtaccgagatggagagagtgttcgggttcccagtccactacacagatgtcagcaacatgtctagactggccagacagagactgctgggaagaagctggtccgtccctgtgatcagacacctgttcgcccctctgaaggagtacttcgcctgcgtgagcagcggcaacagcaacgccaacagccggggccccagcttctctagcggcctggtgccactgtccctgagagggagccacatgggccccatggagatctacaaaaccgtgagcgcctggaagcggcagcctgtgcgcgtgctgagcctgtttcggaatatcgataaagtcctgaaaagcctgggattcctggagagcggctctggctccggcggtggcaccctgaagtacgtggaggatgtgacaaacgtggtcagacgggatgtggagaagtggggccccttcgatctggtgtacggcagcacccaacccctgggcagctcttgtgaccggtgccctggctggtacatgtttcagttccaccggatcctgcagtacgccctgccgagacaggagtcccagcggccattcttttggattttcatggacaacttgctgctgaccgaggatgaccaggaaactaccactcggttcctgcagaccgaagccgtgaccctgcaggacgtgagaggccgggactaccagaacgccatgcgggtgtggtccaacatccctggactgaaaagcaagcacgcacctctgacccctaaagaagaggagtacctgcaggcccaggtgcggagcagaagcaagctggacgcccctaaggtggatctgctggtgaagaattgcctcctgcccctgagagagtacttcaagtatttcagccagaatagtctgcccctgggcggcccaagcagcggcgcccctcctcccagcggcggcagcccagccggctccccaacctctaccgaggagggcacctctgagtccgccacccccgagagcggccctggcacctccaccgagcccagcgagggcagcgcacccggcagccctgccggcagccccacctccacagaggagggaaccagcaccgagcccagcgaaggcagcgccccaggcaccagcaccgagcctagtgagggcggctctggcggcggcagcgcccaggagattaaacggatcaacaagatcagaagaagacttgtgaaagacagcaacaccaagaaggccggcaagacaggccccatgaaaaccctgctggttagagtgatgacacccgatctgagagagcggctggaaaacctgagaaagaagcctgaaaatatcccccagcccatcagcaatacatctagagccaacctgaataagctgctgaccgattacaccgaaatgaagaaggcgatcctgcatgtgtactgggaagagttccagaaggaccctgtgggcctgatgagccgggtggcccagcctgccagcaagaagatcgatcagaacaagctgaaacctgagatggacgagaagggcaacctgaccaccgccggctttgcctgctctcagtgtggccagcccctgttcgtgtacaagctggagcaggtgtctgagaagggcaaggcttacaccaactacttcggacggtgcaatgtggccgagcacgaaaagctgatcctgctggcccagctgaagcccgagaaggatagcgacgaagccgtgacatatagcctgggaaagtttgggcagagggccctggatttctacagcattcatgtgaccaaggagtccacccaccccgtgaagcccctggcccagatcgccggaaacagatacgcctccggacctgtgggaaaggccctgagcgacgcatgtatgggcacaatcgcctccttcctgtctaagtaccaggacatcatcatcgaacaccagaaggtggtgaagggcaaccagaagagactggagagcctgcgggagctggccggcaaggaaaacctggaataccctagcgtgaccctgccacctcagcctcacaccaaggagggcgttgatgcctacaacgaagtgatcgcccgggtgcgaatgtgggtgaacctgaacctgtggcagaagctgaagctaagcagagatgatgccaagcctctgctgagactgaagggattcccttcctttcctctggtcgagagacaggccaacgaagtggactggtgggacatggtgtgtaacgtgaagaagctgatcaacgagaaaaaggaggatggcaaggtgttttggcagaatctggctggctacaagagacaggaagccctgagaccatacctgagcagcgaggaagatcggaagaagggaaagaaattcgctcggtaccagctgggcgacctgctgctgcacctggaaaagaagcacggcgaggactggggaaaggtgtacgacgaggcctgggagcggattgacaagaaagtggaaggcctgagcaagcacatcaagctggaagaggaacggagaagcgaggacgcccagagcaaggccgccctgaccgactggctgcgggctaaggccagcttcgtgatcgagggcctgaaggaggccgacaaggacgagttctgcagatgcgagctgaagctgcagaagtggtacggggacctgcggggaaagcccttcgccatcgaagccgagaacagcatcctggacatcagcggcttcagcaagcagtacaactgtgccttcatctggcagaaggacggcgtgaagaagctgaacctgtacctgatcatcaactacttcaagggcggcaagctgcggttcaagaagatcaaacctgaagccttcgaagccaacagattctacaccgtgatcaacaaaaagagcggcgagatcgtgcccatggaggtgaacttcaacttcgacgaccccaacctgatcatcctgcctctggcctttggcaagagacagggcagagaattcatctggaacgacctgctgtccctggaaaccggcagcctgaagctggccaacggaagagtgatcgagaagacactgtacaacagaagaacccggcaggatgagcctgccctgttcgtggccctgaccttcgagcggcgggaggtcctggactcctccaatatcaaaccaatgaacctgatcggcgtggcaagaggcgaaaacatccccgccgtgatcgccctgaccgaccccgagggctgcccactgagccggtttaaggatagcctgggaaacccaacccacatcctgagaatcggcgagagctataaggagaagcagcggaccatccaggccaagaaggaggtggagcagcggagagccggcggctacagccggaagtacgccagcaaagccaagaatctggcagacgatatggtgagaaacaccgctagagatctgctgtactacgccgtgacccaggatgccatgctgatcttcgccaacctgagccggggcttcggccggcagggcaagcggaccttcatggccgagagacagtacacacggatggaggactggctgaccgccaagctggcctacgagggcctgagcaagacctacctgtccaagacactggcccagtacacctccaagacatgcagcaactgtgggtttaccatcaccagcgccgactacgacagggtgctggagaagctgaagaagacagcaacaggctggatgaccacaattaacggcaaggagctgaaggtggagggccagattacctactacaacagatacaagagacagaacgtagtcaaggacctgtccgtcgagctggatagactgagcgaagaatctgtgaacaacgacatctcctcctggacaaagggcagaagcggagaagctctgagcctcctgaagaaaagattctcccatagacccgtgcaggagaagttcgtgtgcctgaactgcggcttcgagacacacgcagccgagcaagccgccctgaacatcgccagatcctggctgttcctgcggagccaggagtacaagaaataccagacaaacaagacaaccggcaacaccgataagagagccttcgtcgagacctggcagtccttttaccggaagaagcttaaggaggtgtggaaacctgccgtgcggtctggcggatctggcggaggctccacaagcatggccgccgccgccgccctgagggcccacgcccagagcagcgtgaccttcgaggacgtggccgtgaacttcagcatggaggagtggagcctgctgaacgaggcccagaggtgcctgtacagggacgtgatgctggagaccctgaccctgatcagcagcctgggctgctggcacggcggcgaggacgaggccgcccccagcaagcagagcacctgcatctacatctacaaggagcagggcggcaccagccccaagaaaaagagaaaagtctaagctgccttctgcggggcttgccttctggccatgcccttcttctctcccttgcacctgtacctcttggtctttgaataaagcctgagtaggaaggctagcaaaaaaaaaaaaaaaaaaaaaaaaaaaaaaaaaaaaaaaaaaaaaaaaaaaaaaaaaaaaaaaaaaaaaaaaaaaaaaaa

SEQ ID NO: 6894 - RNA, 5797 nt, synthetic construct
  source 1..5797: mol_type = other RNA
aggaaataagagagaaaagaagagtaagaagaaatataagagccaccatggcccctaagaagaagcgtaaagtgagccggatggaacgcctcgtctacgaggtgcggcagaagtgcagaaacatcgaggacatctgcatctcctgcggatctctgaacgtgaccctggagcacccactgttcatcggcggcatgtgccagaactgtaaaaactgttttctggagtgtgcctatcaatacgacgatgacggctaccagagctactgcaccatctgttgcggcggaagagaggtgctgatgtgtggaaataacaactgctgccggtgcttctgcgtggaatgcgtggacctgctggtgggccccggcgccgcccaggccgctattaaggaagatccttggaactgctacatgtgcggccacaagggcacatacggcctgctgagacggagagaggactggcctagcagactgcagatgttcttcgccaataaccacgaccaggagttcgacccccctaaggtgtaccctcccgtccccgccgagaagagaaagcccatccgggtcctgagcctgttcgatggcatcgccaccggtctgctggtgctgaaggacctgggcatccaggtggataggtacattgcctccgaggtgtgcgaggactccatcaccgtgggaatggtgcgtcatcagggcaagatcatgtacgtgggcgacgtgcggagcgtgacacagaagcatatccaggagtggggccctttcgacctggtgatcggcggcagcccttgcaatgacctgagcatcgtgaacccagcccggaagggcctgtacgagggaaccggcagactgttcttcgagttttacagactgctgcacgacgcccggcctaaggaaggcgacgaccggcccttcttttggctgttcgagaatgtggtggccatgggagtcagcgacaagcgggatattagccggttcctggagagcaaccccgtgatgatcgatgccaaggaagtgagcgccgcccaccgggccagatacttctggggcaatctgcctggcatgaacagacccctggccagcaccgtgaacgacaagctggagctgcaggagtgcctggagcacggccggatcgccaagttcagcaaggtgagaaccatcaccacccgaagcaacagcatcaaacaaggcaaggaccagcactttcctgtgttcatgaacgagaaggaggacatcctgtggtgtaccgagatggagagagtgttcgggttcccagtccactacacagatgtcagcaacatgtctagactggccagacagagactgctgggaagaagctggtccgtccctgtgatcagacacctgttcgcccctctgaaggagtacttcgcctgcgtgagcagcggcaacagcaacgccaacagccggggccccagcttctctagcggcctggtgccactgtccctgagagggagccacatgggccccatggagatctacaaaaccgtgagcgcctggaagcggcagcctgtgcgcgtgctgagcctgtttcggaatatcgataaagtcctgaaaagcctgggattcctggagagcggctctggctccggcggtggcaccctgaagtacgtggaggatgtgacaaacgtggtcagacgggatgtggagaagtggggccccttcgatctggtgtacggcagcacccaacccctgggcagctcttgtgaccggtgccctggctggtacatgtttcagttccaccggatcctgcagtacgccctgccgagacaggagtcccagcggccattcttttggattttcatggacaacttgctgctgaccgaggatgaccaggaaactaccactcggttcctgcagaccgaagccgtgaccctgcaggacgtgagaggccgggactaccagaacgccatgcgggtgtggtccaacatccctggactgaaaagcaagcacgcacctctgacccctaaagaagaggagtacctgcaggcccaggtgcggagcagaagcaagctggacgcccctaaggtggatctgctggtgaagaattgcctcctgcccctgagagagtacttcaagtatttcagccagaatagtctgcccctgggcggcccaagcagcggcgcccctcctcccagcggcggcagcccagccggctccccaacctctaccgaggagggcacctctgagtccgccacccccgagagcggccctggcacctccaccgagcccagcgagggcagcgcacccggcagccctgccggcagccccacctccacagaggagggaaccagcaccgagcccagcgaaggcagcgccccaggcaccagcaccgagcctagtgagggcggctctggcggcggcagcgcccaggagattaaacggatcaacaagatcagaagaagacttgtgaaagacagcaacaccaagaaggccggcaagacaggccccatgaaaaccctgctggttagagtgatgacacccgatctgagagagcggctggaaaacctgagaaagaagcctgaaaatatcccccagcccatcagcaatacatctagagccaacctgaataagctgctgaccgattacaccgaaatgaagaaggcgatcctgcatgtgtactgggaagagttccagaaggaccctgtgggcctgatgagccgggtggcccagcctgccagcaagaagatcgatcagaacaagctgaaacctgagatggacgagaagggcaacctgaccaccgccggctttgcctgctctcagtgtggccagcccctgttcgtgtacaagctggagcaggtgtctgagaagggcaaggcttacaccaactacttcggacggtgcaatgtggccgagcacgaaaagctgatcctgctggcccagctgaagcccgagaaggatagcgacgaagccgtgacatatagcctgggaaagtttgggcagagggccctggatttctacagcattcatgtgaccaaggagtccacccaccccgtgaagcccctggcccagatcgccggaaacagatacgcctccggacctgtgggaaaggccctgagcgacgcatgtatgggcacaatcgcctccttcctgtctaagtaccaggacatcatcatcgaacaccagaaggtggtgaagggcaaccagaagagactggagagcctgcgggagctggccggcaaggaaaacctggaataccctagcgtgaccctgccacctcagcctcacaccaaggagggcgttgatgcctacaacgaagtgatcgcccgggtgcgaatgtgggtgaacctgaacctgtggcagaagctgaagctaagcagagatgatgccaagcctctgctgagactgaagggattcccttcctttcctctggtcgagagacaggccaacgaagtggactggtgggacatggtgtgtaacgtgaagaagctgatcaacgagaaaaaggaggatggcaaggtgttttggcagaatctggctggctacaagagacaggaagccctgagaccatacctgagcagcgaggaagatcggaagaagggaaagaaattcgctcggtaccagctgggcgacctgctgctgcacctggaaaagaagcacggcgaggactggggaaaggtgtacgacgaggcctgggagcggattgacaagaaagtggaaggcctgagcaagcacatcaagctggaagaggaacggagaagcgaggacgcccagagcaaggccgccctgaccgactggctgcgggctaaggccagcttcgtgatcgagggcctgaaggaggccgacaaggacgagttctgcagatgcgagctgaagctgcagaagtggtacggggacctgcggggaaagcccttcgccatcgaagccgagaacagcatcctggacatcagcggcttcagcaagcagtacaactgtgccttcatctggcagaaggacggcgtgaagaagctgaacctgtacctgatcatcaactacttcaagggcggcaagctgcggttcaagaagatcaaacctgaagccttcgaagccaacagattctacaccgtgatcaacaaaaagagcggcgagatcgtgcccatggaggtgaacttcaacttcgacgaccccaacctgatcatcctgcctctggcctttggcaagagacagggcagagaattcatctggaacgacctgctgtccctggaaaccggcagcctgaagctggccaacggaagagtgatcgagaagacactgtacaacagaagaacccggcaggatgagcctgccctgttcgtggccctgaccttcgagcggcgggaggtcctggactcctccaatatcaaaccaatgaacctgatcggcgtggcaagaggcgaaaacatccccgccgtgatcgccctgaccgaccccgagggctgcccactgagccggtttaaggatagcctgggaaacccaacccacatcctgagaatcggcgagagctataaggagaagcagcggaccatccaggccaagaaggaggtggagcagcggagagccggcggctacagccggaagtacgccagcaaagccaagaatctggcagacgatatggtgagaaacaccgctagagatctgctgtactacgccgtgacccaggatgccatgctgatcttcgccaacctgagccggggcttcggccggcagggcaagcggaccttcatggccgagagacagtacacacggatggaggactggctgaccgccaagctggcctacgagggcctgagcaagacctacctgtccaagacactggcccagtacacctccaagacatgcagcaactgtgggtttaccatcaccagcgccgactacgacagggtgctggagaagctgaagaagacagcaacaggctggatgaccacaattaacggcaaggagctgaaggtggagggccagattacctactacaacagatacaagagacagaacgtagtcaaggacctgtccgtcgagctggatagactgagcgaagaatctgtgaacaacgacatctcctcctggacaaagggcagaagcggagaagctctgagcctcctgaagaaaagattctcccatagacccgtgcaggagaagttcgtgtgcctgaactgcggcttcgagacacacgcagccgagcaagccgccctgaacatcgccagatcctggctgttcctgcggagccaggagtacaagaaataccagacaaacaagacaaccggcaacaccgataagagagccttcgtcgagacctggcagtccttttaccggaagaagcttaaggaggtgtggaaacctgccgtgcggtctggcggatctggcggaggctccacaagcgccgacatcaccctgatgagccaggcccaggacagcaggagcatcctgttccaggagagcgtgaccttcgaggacgtggccgtgaacttcaccaacagggagtggcagtgcctgacctacgcccagaggcacctgtacaaggacgtgatgctggagaactacggcaacatggtgagcctgggcttccccttccccaagccccccctgatcagccacctggagagggaggtggacccctgcgtgaccagccccaagaaaaagagaaaagtctaagctgccttctgcggggcttgccttctggccatgcccttcttctctcccttgcacctgtacctcttggtctttgaataaagcctgagtaggaaggctagcaaaaaaaaaaaaaaaaaaaaaaaaaaaaaaaaaaaaaaaaaaaaaaaaaaaaaaaaaaaaaaaaaaaaaaaaaaaaaaaa

SEQ ID NO: 6895 - RNA, 5797 nt, synthetic construct
  source 1..5797: mol_type = other RNA
aggaaataagagagaaaagaagagtaagaagaaatataagagccaccatggcccctaagaagaagcgtaaagtgagccggatggaacgcctcgtctacgaggtgcggcagaagtgcagaaacatcgaggacatctgcatctcctgcggatctctgaacgtgaccctggagcacccactgttcatcggcggcatgtgccagaactgtaaaaactgttttctggagtgtgcctatcaatacgacgatgacggctaccagagctactgcaccatctgttgcggcggaagagaggtgctgatgtgtggaaataacaactgctgccggtgcttctgcgtggaatgcgtggacctgctggtgggccccggcgccgcccaggccgctattaaggaagatccttggaactgctacatgtgcggccacaagggcacatacggcctgctgagacggagagaggactggcctagcagactgcagatgttcttcgccaataaccacgaccaggagttcgacccccctaaggtgtaccctcccgtccccgccgagaagagaaagcccatccgggtcctgagcctgttcgatggcatcgccaccggtctgctggtgctgaaggacctgggcatccaggtggataggtacattgcctccgaggtgtgcgaggactccatcaccgtgggaatggtgcgtcatcagggcaagatcatgtacgtgggcgacgtgcggagcgtgacacagaagcatatccaggagtggggccctttcgacctggtgatcggcggcagcccttgcaatgacctgagcatcgtgaacccagcccggaagggcctgtacgagggaaccggcagactgttcttcgagttttacagactgctgcacgacgcccggcctaaggaaggcgacgaccggcccttcttttggctgttcgagaatgtggtggccatgggagtcagcgacaagcgggatattagccggttcctggagagcaaccccgtgatgatcgatgccaaggaagtgagcgccgcccaccgggccagatacttctggggcaatctgcctggcatgaacagacccctggccagcaccgtgaacgacaagctggagctgcaggagtgcctggagcacggccggatcgccaagttcagcaaggtgagaaccatcaccacccgaagcaacagcatcaaacaaggcaaggaccagcactttcctgtgttcatgaacgagaaggaggacatcctgtggtgtaccgagatggagagagtgttcgggttcccagtccactacacagatgtcagcaacatgtctagactggccagacagagactgctgggaagaagctggtccgtccctgtgatcagacacctgttcgcccctctgaaggagtacttcgcctgcgtgagcagcggcaacagcaacgccaacagccggggccccagcttctctagcggcctggtgccactgtccctgagagggagccacatgggccccatggagatctacaaaaccgtgagcgcctggaagcggcagcctgtgcgcgtgctgagcctgtttcggaatatcgataaagtcctgaaaagcctgggattcctggagagcggctctggctccggcggtggcaccctgaagtacgtggaggatgtgacaaacgtggtcagacgggatgtggagaagtggggccccttcgatctggtgtacggcagcacccaacccctgggcagctcttgtgaccggtgccctggctggtacatgtttcagttccaccggatcctgcagtacgccctgccgagacaggagtcccagcggccattcttttggattttcatggacaacttgctgctgaccgaggatgaccaggaaactaccactcggttcctgcagaccgaagccgtgaccctgcaggacgtgagaggccgggactaccagaacgccatgcgggtgtggtccaacatccctggactgaaaagcaagcacgcacctctgacccctaaagaagaggagtacctgcaggcccaggtgcggagcagaagcaagctggacgcccctaaggtggatctgctggtgaagaattgcctcctgcccctgagagagtacttcaagtatttcagccagaatagtctgcccctgggcggcccaagcagcggcgcccctcctcccagcggcggcagcccagccggctccccaacctctaccgaggagggcacctctgagtccgccacccccgagagcggccctggcacctccaccgagcccagcgagggcagcgcacccggcagccctgccggcagccccacctccacagaggagggaaccagcaccgagcccagcgaaggcagcgccccaggcaccagcaccgagcctagtgagggcggctctggcggcggcagcgcccaggagattaaacggatcaacaagatcagaagaagacttgtgaaagacagcaacaccaagaaggccggcaagacaggccccatgaaaaccctgctggttagagtgatgacacccgatctgagagagcggctggaaaacctgagaaagaagcctgaaaatatcccccagcccatcagcaatacatctagagccaacctgaataagctgctgaccgattacaccgaaatgaagaaggcgatcctgcatgtgtactgggaagagttccagaaggaccctgtgggcctgatgagccgggtggcccagcctgccagcaagaagatcgatcagaacaagctgaaacctgagatggacgagaagggcaacctgaccaccgccggctttgcctgctctcagtgtggccagcccctgttcgtgtacaagctggagcaggtgtctgagaagggcaaggcttacaccaactacttcggacggtgcaatgtggccgagcacgaaaagctgatcctgctggcccagctgaagcccgagaaggatagcgacgaagccgtgacatatagcctgggaaagtttgggcagagggccctggatttctacagcattcatgtgaccaaggagtccacccaccccgtgaagcccctggcccagatcgccggaaacagatacgcctccggacctgtgggaaaggccctgagcgacgcatgtatgggcacaatcgcctccttcctgtctaagtaccaggacatcatcatcgaacaccagaaggtggtgaagggcaaccagaagagactggagagcctgcgggagctggccggcaaggaaaacctggaataccctagcgtgaccctgccacctcagcctcacaccaaggagggcgttgatgcctacaacgaagtgatcgcccgggtgcgaatgtgggtgaacctgaacctgtggcagaagctgaagctaagcagagatgatgccaagcctctgctgagactgaagggattcccttcctttcctctggtcgagagacaggccaacgaagtggactggtgggacatggtgtgtaacgtgaagaagctgatcaacgagaaaaaggaggatggcaaggtgttttggcagaatctggctggctacaagagacaggaagccctgagaccatacctgagcagcgaggaagatcggaagaagggaaagaaattcgctcggtaccagctgggcgacctgctgctgcacctggaaaagaagcacggcgaggactggggaaaggtgtacgacgaggcctgggagcggattgacaagaaagtggaaggcctgagcaagcacatcaagctggaagaggaacggagaagcgaggacgcccagagcaaggccgccctgaccgactggctgcgggctaaggccagcttcgtgatcgagggcctgaaggaggccgacaaggacgagttctgcagatgcgagctgaagctgcagaagtggtacggggacctgcggggaaagcccttcgccatcgaagccgagaacagcatcctggacatcagcggcttcagcaagcagtacaactgtgccttcatctggcagaaggacggcgtgaagaagctgaacctgtacctgatcatcaactacttcaagggcggcaagctgcggttcaagaagatcaaacctgaagccttcgaagccaacagattctacaccgtgatcaacaaaaagagcggcgagatcgtgcccatggaggtgaacttcaacttcgacgaccccaacctgatcatcctgcctctggcctttggcaagagacagggcagagaattcatctggaacgacctgctgtccctggaaaccggcagcctgaagctggccaacggaagagtgatcgagaagacactgtacaacagaagaacccggcaggatgagcctgccctgttcgtggccctgaccttcgagcggcgggaggtcctggactcctccaatatcaaaccaatgaacctgatcggcgtggcaagaggcgaaaacatccccgccgtgatcgccctgaccgaccccgagggctgcccactgagccggtttaaggatagcctgggaaacccaacccacatcctgagaatcggcgagagctataaggagaagcagcggaccatccaggccaagaaggaggtggagcagcggagagccggcggctacagccggaagtacgccagcaaagccaagaatctggcagacgatatggtgagaaacaccgctagagatctgctgtactacgccgtgacccaggatgccatgctgatcttcgccaacctgagccggggcttcggccggcagggcaagcggaccttcatggccgagagacagtacacacggatggaggactggctgaccgccaagctggcctacgagggcctgagcaagacctacctgtccaagacactggcccagtacacctccaagacatgcagcaactgtgggtttaccatcaccagcgccgactacgacagggtgctggagaagctgaagaagacagcaacaggctggatgaccacaattaacggcaaggagctgaaggtggagggccagattacctactacaacagatacaagagacagaacgtagtcaaggacctgtccgtcgagctggatagactgagcgaagaatctgtgaacaacgacatctcctcctggacaaagggcagaagcggagaagctctgagcctcctgaagaaaagattctcccatagacccgtgcaggagaagttcgtgtgcctgaactgcggcttcgagacacacgcagccgagcaagccgccctgaacatcgccagatcctggctgttcctgcggagccaggagtacaagaaataccagacaaacaagacaaccggcaacaccgataagagagccttcgtcgagacctggcagtccttttaccggaagaagcttaaggaggtgtggaaacctgccgtgcggtctggcggatctggcggaggctccacaagcgtgttcgacgccgtgaccttcaccgacgtggccgtggacttcagccaggacgagtgggagaggctgaccctggcccagaggaccctgtacaagaaggtgatgctggagaactacagcaacctggccagcctgggcctgtgcatcagcaagcccgacgtgatcagcagcctggagcaggacaaggagccctggaccatgaagggcgagctgaccaggggcccctgcgccgacctggagtacgtgaccagccccaagaaaaagagaaaagtctaagctgccttctgcggggcttgccttctggccatgcccttcttctctcccttgcacctgtacctcttggtctttgaataaagcctgagtaggaaggctagcaaaaaaaaaaaaaaaaaaaaaaaaaaaaaaaaaaaaaaaaaaaaaaaaaaaaaaaaaaaaaaaaaaaaaaaaaaaaaaaa

SEQ ID NO: 6896 - RNA, 5797 nt, synthetic construct
  source 1..5797: mol_type = other RNA
aggaaataagagagaaaagaagagtaagaagaaatataagagccaccatggcccctaagaagaagcgtaaagtgagccggatggaacgcctcgtctacgaggtgcggcagaagtgcagaaacatcgaggacatctgcatctcctgcggatctctgaacgtgaccctggagcacccactgttcatcggcggcatgtgccagaactgtaaaaactgttttctggagtgtgcctatcaatacgacgatgacggctaccagagctactgcaccatctgttgcggcggaagagaggtgctgatgtgtggaaataacaactgctgccggtgcttctgcgtggaatgcgtggacctgctggtgggccccggcgccgcccaggccgctattaaggaagatccttggaactgctacatgtgcggccacaagggcacatacggcctgctgagacggagagaggactggcctagcagactgcagatgttcttcgccaataaccacgaccaggagttcgacccccctaaggtgtaccctcccgtccccgccgagaagagaaagcccatccgggtcctgagcctgttcgatggcatcgccaccggtctgctggtgctgaaggacctgggcatccaggtggataggtacattgcctccgaggtgtgcgaggactccatcaccgtgggaatggtgcgtcatcagggcaagatcatgtacgtgggcgacgtgcggagcgtgacacagaagcatatccaggagtggggccctttcgacctggtgatcggcggcagcccttgcaatgacctgagcatcgtgaacccagcccggaagggcctgtacgagggaaccggcagactgttcttcgagttttacagactgctgcacgacgcccggcctaaggaaggcgacgaccggcccttcttttggctgttcgagaatgtggtggccatgggagtcagcgacaagcgggatattagccggttcctggagagcaaccccgtgatgatcgatgccaaggaagtgagcgccgcccaccgggccagatacttctggggcaatctgcctggcatgaacagacccctggccagcaccgtgaacgacaagctggagctgcaggagtgcctggagcacggccggatcgccaagttcagcaaggtgagaaccatcaccacccgaagcaacagcatcaaacaaggcaaggaccagcactttcctgtgttcatgaacgagaaggaggacatcctgtggtgtaccgagatggagagagtgttcgggttcccagtccactacacagatgtcagcaacatgtctagactggccagacagagactgctgggaagaagctggtccgtccctgtgatcagacacctgttcgcccctctgaaggagtacttcgcctgcgtgagcagcggcaacagcaacgccaacagccggggccccagcttctctagcggcctggtgccactgtccctgagagggagccacatgggccccatggagatctacaaaaccgtgagcgcctggaagcggcagcctgtgcgcgtgctgagcctgtttcggaatatcgataaagtcctgaaaagcctgggattcctggagagcggctctggctccggcggtggcaccctgaagtacgtggaggatgtgacaaacgtggtcagacgggatgtggagaagtggggccccttcgatctggtgtacggcagcacccaacccctgggcagctcttgtgaccggtgccctggctggtacatgtttcagttccaccggatcctgcagtacgccctgccgagacaggagtcccagcggccattcttttggattttcatggacaacttgctgctgaccgaggatgaccaggaaactaccactcggttcctgcagaccgaagccgtgaccctgcaggacgtgagaggccgggactaccagaacgccatgcgggtgtggtccaacatccctggactgaaaagcaagcacgcacctctgacccctaaagaagaggagtacctgcaggcccaggtgcggagcagaagcaagctggacgcccctaaggtggatctgctggtgaagaattgcctcctgcccctgagagagtacttcaagtatttcagccagaatagtctgcccctgggcggcccaagcagcggcgcccctcctcccagcggcggcagcccagccggctccccaacctctaccgaggagggcacctctgagtccgccacccccgagagcggccctggcacctccaccgagcccagcgagggcagcgcacccggcagccctgccggcagccccacctccacagaggagggaaccagcaccgagcccagcgaaggcagcgccccaggcaccagcaccgagcctagtgagggcggctctggcggcggcagcgcccaggagattaaacggatcaacaagatcagaagaagacttgtgaaagacagcaacaccaagaaggccggcaagacaggccccatgaaaaccctgctggttagagtgatgacacccgatctgagagagcggctggaaaacctgagaaagaagcctgaaaatatcccccagcccatcagcaatacatctagagccaacctgaataagctgctgaccgattacaccgaaatgaagaaggcgatcctgcatgtgtactgggaagagttccagaaggaccctgtgggcctgatgagccgggtggcccagcctgccagcaagaagatcgatcagaacaagctgaaacctgagatggacgagaagggcaacctgaccaccgccggctttgcctgctctcagtgtggccagcccctgttcgtgtacaagctggagcaggtgtctgagaagggcaaggcttacaccaactacttcggacggtgcaatgtggccgagcacgaaaagctgatcctgctggcccagctgaagcccgagaaggatagcgacgaagccgtgacatatagcctgggaaagtttgggcagagggccctggatttctacagcattcatgtgaccaaggagtccacccaccccgtgaagcccctggcccagatcgccggaaacagatacgcctccggacctgtgggaaaggccctgagcgacgcatgtatgggcacaatcgcctccttcctgtctaagtaccaggacatcatcatcgaacaccagaaggtggtgaagggcaaccagaagagactggagagcctgcgggagctggccggcaaggaaaacctggaataccctagcgtgaccctgccacctcagcctcacaccaaggagggcgttgatgcctacaacgaagtgatcgcccgggtgcgaatgtgggtgaacctgaacctgtggcagaagctgaagctaagcagagatgatgccaagcctctgctgagactgaagggattcccttcctttcctctggtcgagagacaggccaacgaagtggactggtgggacatggtgtgtaacgtgaagaagctgatcaacgagaaaaaggaggatggcaaggtgttttggcagaatctggctggctacaagagacaggaagccctgagaccatacctgagcagcgaggaagatcggaagaagggaaagaaattcgctcggtaccagctgggcgacctgctgctgcacctggaaaagaagcacggcgaggactggggaaaggtgtacgacgaggcctgggagcggattgacaagaaagtggaaggcctgagcaagcacatcaagctggaagaggaacggagaagcgaggacgcccagagcaaggccgccctgaccgactggctgcgggctaaggccagcttcgtgatcgagggcctgaaggaggccgacaaggacgagttctgcagatgcgagctgaagctgcagaagtggtacggggacctgcggggaaagcccttcgccatcgaagccgagaacagcatcctggacatcagcggcttcagcaagcagtacaactgtgccttcatctggcagaaggacggcgtgaagaagctgaacctgtacctgatcatcaactacttcaagggcggcaagctgcggttcaagaagatcaaacctgaagccttcgaagccaacagattctacaccgtgatcaacaaaaagagcggcgagatcgtgcccatggaggtgaacttcaacttcgacgaccccaacctgatcatcctgcctctggcctttggcaagagacagggcagagaattcatctggaacgacctgctgtccctggaaaccggcagcctgaagctggccaacggaagagtgatcgagaagacactgtacaacagaagaacccggcaggatgagcctgccctgttcgtggccctgaccttcgagcggcgggaggtcctggactcctccaatatcaaaccaatgaacctgatcggcgtggcaagaggcgaaaacatccccgccgtgatcgccctgaccgaccccgagggctgcccactgagccggtttaaggatagcctgggaaacccaacccacatcctgagaatcggcgagagctataaggagaagcagcggaccatccaggccaagaaggaggtggagcagcggagagccggcggctacagccggaagtacgccagcaaagccaagaatctggcagacgatatggtgagaaacaccgctagagatctgctgtactacgccgtgacccaggatgccatgctgatcttcgccaacctgagccggggcttcggccggcagggcaagcggaccttcatggccgagagacagtacacacggatggaggactggctgaccgccaagctggcctacgagggcctgagcaagacctacctgtccaagacactggcccagtacacctccaagacatgcagcaactgtgggtttaccatcaccagcgccgactacgacagggtgctggagaagctgaagaagacagcaacaggctggatgaccacaattaacggcaaggagctgaaggtggagggccagattacctactacaacagatacaagagacagaacgtagtcaaggacctgtccgtcgagctggatagactgagcgaagaatctgtgaacaacgacatctcctcctggacaaagggcagaagcggagaagctctgagcctcctgaagaaaagattctcccatagacccgtgcaggagaagttcgtgtgcctgaactgcggcttcgagacacacgcagccgagcaagccgccctgaacatcgccagatcctggctgttcctgcggagccaggagtacaagaaataccagacaaacaagacaaccggcaacaccgataagagagccttcgtcgagacctggcagtccttttaccggaagaagcttaaggaggtgtggaaacctgccgtgcggtctggcggatctggcggaggctccacaagcaggcaggagcccgtgaccttcgaggacgtggccgtgtacttcacccagaacgagtgggccagcctggacagcgtgcagagggccctgtacagggaggtgatgctggagaactacgccaacgtggccagcctggccttccccttcatcacccccgtgctggtgagccagctggagcagggcgagctgccctggggcctggacccctgggagcccatgggcagggaggccctgaggggcatctgcaccagccccaagaaaaagagaaaagtctaagctgccttctgcggggcttgccttctggccatgcccttcttctctcccttgcacctgtacctcttggtctttgaataaagcctgagtaggaaggctagcaaaaaaaaaaaaaaaaaaaaaaaaaaaaaaaaaaaaaaaaaaaaaaaaaaaaaaaaaaaaaaaaaaaaaaaaaaaaaaaa

SEQ ID NO: 6897 - RNA, 5797 nt, synthetic construct
  source 1..5797: mol_type = other RNA
aggaaataagagagaaaagaagagtaagaagaaatataagagccaccatggcccctaagaagaagcgtaaagtgagccggatggaacgcctcgtctacgaggtgcggcagaagtgcagaaacatcgaggacatctgcatctcctgcggatctctgaacgtgaccctggagcacccactgttcatcggcggcatgtgccagaactgtaaaaactgttttctggagtgtgcctatcaatacgacgatgacggctaccagagctactgcaccatctgttgcggcggaagagaggtgctgatgtgtggaaataacaactgctgccggtgcttctgcgtggaatgcgtggacctgctggtgggccccggcgccgcccaggccgctattaaggaagatccttggaactgctacatgtgcggccacaagggcacatacggcctgctgagacggagagaggactggcctagcagactgcagatgttcttcgccaataaccacgaccaggagttcgacccccctaaggtgtaccctcccgtccccgccgagaagagaaagcccatccgggtcctgagcctgttcgatggcatcgccaccggtctgctggtgctgaaggacctgggcatccaggtggataggtacattgcctccgaggtgtgcgaggactccatcaccgtgggaatggtgcgtcatcagggcaagatcatgtacgtgggcgacgtgcggagcgtgacacagaagcatatccaggagtggggccctttcgacctggtgatcggcggcagcccttgcaatgacctgagcatcgtgaacccagcccggaagggcctgtacgagggaaccggcagactgttcttcgagttttacagactgctgcacgacgcccggcctaaggaaggcgacgaccggcccttcttttggctgttcgagaatgtggtggccatgggagtcagcgacaagcgggatattagccggttcctggagagcaaccccgtgatgatcgatgccaaggaagtgagcgccgcccaccgggccagatacttctggggcaatctgcctggcatgaacagacccctggccagcaccgtgaacgacaagctggagctgcaggagtgcctggagcacggccggatcgccaagttcagcaaggtgagaaccatcaccacccgaagcaacagcatcaaacaaggcaaggaccagcactttcctgtgttcatgaacgagaaggaggacatcctgtggtgtaccgagatggagagagtgttcgggttcccagtccactacacagatgtcagcaacatgtctagactggccagacagagactgctgggaagaagctggtccgtccctgtgatcagacacctgttcgcccctctgaaggagtacttcgcctgcgtgagcagcggcaacagcaacgccaacagccggggccccagcttctctagcggcctggtgccactgtccctgagagggagccacatgggccccatggagatctacaaaaccgtgagcgcctggaagcggcagcctgtgcgcgtgctgagcctgtttcggaatatcgataaagtcctgaaaagcctgggattcctggagagcggctctggctccggcggtggcaccctgaagtacgtggaggatgtgacaaacgtggtcagacgggatgtggagaagtggggccccttcgatctggtgtacggcagcacccaacccctgggcagctcttgtgaccggtgccctggctggtacatgtttcagttccaccggatcctgcagtacgccctgccgagacaggagtcccagcggccattcttttggattttcatggacaacttgctgctgaccgaggatgaccaggaaactaccactcggttcctgcagaccgaagccgtgaccctgcaggacgtgagaggccgggactaccagaacgccatgcgggtgtggtccaacatccctggactgaaaagcaagcacgcacctctgacccctaaagaagaggagtacctgcaggcccaggtgcggagcagaagcaagctggacgcccctaaggtggatctgctggtgaagaattgcctcctgcccctgagagagtacttcaagtatttcagccagaatagtctgcccctgggcggcccaagcagcggcgcccctcctcccagcggcggcagcccagccggctccccaacctctaccgaggagggcacctctgagtccgccacccccgagagcggccctggcacctccaccgagcccagcgagggcagcgcacccggcagccctgccggcagccccacctccacagaggagggaaccagcaccgagcccagcgaaggcagcgccccaggcaccagcaccgagcctagtgagggcggctctggcggcggcagcgcccaggagattaaacggatcaacaagatcagaagaagacttgtgaaagacagcaacaccaagaaggccggcaagacaggccccatgaaaaccctgctggttagagtgatgacacccgatctgagagagcggctggaaaacctgagaaagaagcctgaaaatatcccccagcccatcagcaatacatctagagccaacctgaataagctgctgaccgattacaccgaaatgaagaaggcgatcctgcatgtgtactgggaagagttccagaaggaccctgtgggcctgatgagccgggtggcccagcctgccagcaagaagatcgatcagaacaagctgaaacctgagatggacgagaagggcaacctgaccaccgccggctttgcctgctctcagtgtggccagcccctgttcgtgtacaagctggagcaggtgtctgagaagggcaaggcttacaccaactacttcggacggtgcaatgtggccgagcacgaaaagctgatcctgctggcccagctgaagcccgagaaggatagcgacgaagccgtgacatatagcctgggaaagtttgggcagagggccctggatttctacagcattcatgtgaccaaggagtccacccaccccgtgaagcccctggcccagatcgccggaaacagatacgcctccggacctgtgggaaaggccctgagcgacgcatgtatgggcacaatcgcctccttcctgtctaagtaccaggacatcatcatcgaacaccagaaggtggtgaagggcaaccagaagagactggagagcctgcgggagctggccggcaaggaaaacctggaataccctagcgtgaccctgccacctcagcctcacaccaaggagggcgttgatgcctacaacgaagtgatcgcccgggtgcgaatgtgggtgaacctgaacctgtggcagaagctgaagctaagcagagatgatgccaagcctctgctgagactgaagggattcccttcctttcctctggtcgagagacaggccaacgaagtggactggtgggacatggtgtgtaacgtgaagaagctgatcaacgagaaaaaggaggatggcaaggtgttttggcagaatctggctggctacaagagacaggaagccctgagaccatacctgagcagcgaggaagatcggaagaagggaaagaaattcgctcggtaccagctgggcgacctgctgctgcacctggaaaagaagcacggcgaggactggggaaaggtgtacgacgaggcctgggagcggattgacaagaaagtggaaggcctgagcaagcacatcaagctggaagaggaacggagaagcgaggacgcccagagcaaggccgccctgaccgactggctgcgggctaaggccagcttcgtgatcgagggcctgaaggaggccgacaaggacgagttctgcagatgcgagctgaagctgcagaagtggtacggggacctgcggggaaagcccttcgccatcgaagccgagaacagcatcctggacatcagcggcttcagcaagcagtacaactgtgccttcatctggcagaaggacggcgtgaagaagctgaacctgtacctgatcatcaactacttcaagggcggcaagctgcggttcaagaagatcaaacctgaagccttcgaagccaacagattctacaccgtgatcaacaaaaagagcggcgagatcgtgcccatggaggtgaacttcaacttcgacgaccccaacctgatcatcctgcctctggcctttggcaagagacagggcagagaattcatctggaacgacctgctgtccctggaaaccggcagcctgaagctggccaacggaagagtgatcgagaagacactgtacaacagaagaacccggcaggatgagcctgccctgttcgtggccctgaccttcgagcggcgggaggtcctggactcctccaatatcaaaccaatgaacctgatcggcgtggcaagaggcgaaaacatccccgccgtgatcgccctgaccgaccccgagggctgcccactgagccggtttaaggatagcctgggaaacccaacccacatcctgagaatcggcgagagctataaggagaagcagcggaccatccaggccaagaaggaggtggagcagcggagagccggcggctacagccggaagtacgccagcaaagccaagaatctggcagacgatatggtgagaaacaccgctagagatctgctgtactacgccgtgacccaggatgccatgctgatcttcgccaacctgagccggggcttcggccggcagggcaagcggaccttcatggccgagagacagtacacacggatggaggactggctgaccgccaagctggcctacgagggcctgagcaagacctacctgtccaagacactggcccagtacacctccaagacatgcagcaactgtgggtttaccatcaccagcgccgactacgacagggtgctggagaagctgaagaagacagcaacaggctggatgaccacaattaacggcaaggagctgaaggtggagggccagattacctactacaacagatacaagagacagaacgtagtcaaggacctgtccgtcgagctggatagactgagcgaagaatctgtgaacaacgacatctcctcctggacaaagggcagaagcggagaagctctgagcctcctgaagaaaagattctcccatagacccgtgcaggagaagttcgtgtgcctgaactgcggcttcgagacacacgcagccgagcaagccgccctgaacatcgccagatcctggctgttcctgcggagccaggagtacaagaaataccagacaaacaagacaaccggcaacaccgataagagagccttcgtcgagacctggcagtccttttaccggaagaagcttaaggaggtgtggaaacctgccgtgcggtctggcggatctggcggaggctccacaagcccccagaagagcgtgaccttcgaggacgtggccgtgtacttcacccaggccgagtgggacggcctgagccccgcccagaggaccctgtacagggacgtgatgctggagaactacggcaacgtggccagcctgggcttccccctgctgaagcccgccgtgatcagccagctggagggcggcggcgagctgggcggccccagccccctggccgccggcaccggcctgcacgtgctgaggaccgtgaccagccccaagaaaaagagaaaagtctaagctgccttctgcggggcttgccttctggccatgcccttcttctctcccttgcacctgtacctcttggtctttgaataaagcctgagtaggaaggctagcaaaaaaaaaaaaaaaaaaaaaaaaaaaaaaaaaaaaaaaaaaaaaaaaaaaaaaaaaaaaaaaaaaaaaaaaaaaaaaaa

SEQ ID NO: 6898 - RNA, 5797 nt, synthetic construct
  source 1..5797: mol_type = other RNA
aggaaataagagagaaaagaagagtaagaagaaatataagagccaccatggcccctaagaagaagcgtaaagtgagccggatggaacgcctcgtctacgaggtgcggcagaagtgcagaaacatcgaggacatctgcatctcctgcggatctctgaacgtgaccctggagcacccactgttcatcggcggcatgtgccagaactgtaaaaactgttttctggagtgtgcctatcaatacgacgatgacggctaccagagctactgcaccatctgttgcggcggaagagaggtgctgatgtgtggaaataacaactgctgccggtgcttctgcgtggaatgcgtggacctgctggtgggccccggcgccgcccaggccgctattaaggaagatccttggaactgctacatgtgcggccacaagggcacatacggcctgctgagacggagagaggactggcctagcagactgcagatgttcttcgccaataaccacgaccaggagttcgacccccctaaggtgtaccctcccgtccccgccgagaagagaaagcccatccgggtcctgagcctgttcgatggcatcgccaccggtctgctggtgctgaaggacctgggcatccaggtggataggtacattgcctccgaggtgtgcgaggactccatcaccgtgggaatggtgcgtcatcagggcaagatcatgtacgtgggcgacgtgcggagcgtgacacagaagcatatccaggagtggggccctttcgacctggtgatcggcggcagcccttgcaatgacctgagcatcgtgaacccagcccggaagggcctgtacgagggaaccggcagactgttcttcgagttttacagactgctgcacgacgcccggcctaaggaaggcgacgaccggcccttcttttggctgttcgagaatgtggtggccatgggagtcagcgacaagcgggatattagccggttcctggagagcaaccccgtgatgatcgatgccaaggaagtgagcgccgcccaccgggccagatacttctggggcaatctgcctggcatgaacagacccctggccagcaccgtgaacgacaagctggagctgcaggagtgcctggagcacggccggatcgccaagttcagcaaggtgagaaccatcaccacccgaagcaacagcatcaaacaaggcaaggaccagcactttcctgtgttcatgaacgagaaggaggacatcctgtggtgtaccgagatggagagagtgttcgggttcccagtccactacacagatgtcagcaacatgtctagactggccagacagagactgctgggaagaagctggtccgtccctgtgatcagacacctgttcgcccctctgaaggagtacttcgcctgcgtgagcagcggcaacagcaacgccaacagccggggccccagcttctctagcggcctggtgccactgtccctgagagggagccacatgggccccatggagatctacaaaaccgtgagcgcctggaagcggcagcctgtgcgcgtgctgagcctgtttcggaatatcgataaagtcctgaaaagcctgggattcctggagagcggctctggctccggcggtggcaccctgaagtacgtggaggatgtgacaaacgtggtcagacgggatgtggagaagtggggccccttcgatctggtgtacggcagcacccaacccctgggcagctcttgtgaccggtgccctggctggtacatgtttcagttccaccggatcctgcagtacgccctgccgagacaggagtcccagcggccattcttttggattttcatggacaacttgctgctgaccgaggatgaccaggaaactaccactcggttcctgcagaccgaagccgtgaccctgcaggacgtgagaggccgggactaccagaacgccatgcgggtgtggtccaacatccctggactgaaaagcaagcacgcacctctgacccctaaagaagaggagtacctgcaggcccaggtgcggagcagaagcaagctggacgcccctaaggtggatctgctggtgaagaattgcctcctgcccctgagagagtacttcaagtatttcagccagaatagtctgcccctgggcggcccaagcagcggcgcccctcctcccagcggcggcagcccagccggctccccaacctctaccgaggagggcacctctgagtccgccacccccgagagcggccctggcacctccaccgagcccagcgagggcagcgcacccggcagccctgccggcagccccacctccacagaggagggaaccagcaccgagcccagcgaaggcagcgccccaggcaccagcaccgagcctagtgagggcggctctggcggcggcagcgcccaggagattaaacggatcaacaagatcagaagaagacttgtgaaagacagcaacaccaagaaggccggcaagacaggccccatgaaaaccctgctggttagagtgatgacacccgatctgagagagcggctggaaaacctgagaaagaagcctgaaaatatcccccagcccatcagcaatacatctagagccaacctgaataagctgctgaccgattacaccgaaatgaagaaggcgatcctgcatgtgtactgggaagagttccagaaggaccctgtgggcctgatgagccgggtggcccagcctgccagcaagaagatcgatcagaacaagctgaaacctgagatggacgagaagggcaacctgaccaccgccggctttgcctgctctcagtgtggccagcccctgttcgtgtacaagctggagcaggtgtctgagaagggcaaggcttacaccaactacttcggacggtgcaatgtggccgagcacgaaaagctgatcctgctggcccagctgaagcccgagaaggatagcgacgaagccgtgacatatagcctgggaaagtttgggcagagggccctggatttctacagcattcatgtgaccaaggagtccacccaccccgtgaagcccctggcccagatcgccggaaacagatacgcctccggacctgtgggaaaggccctgagcgacgcatgtatgggcacaatcgcctccttcctgtctaagtaccaggacatcatcatcgaacaccagaaggtggtgaagggcaaccagaagagactggagagcctgcgggagctggccggcaaggaaaacctggaataccctagcgtgaccctgccacctcagcctcacaccaaggagggcgttgatgcctacaacgaagtgatcgcccgggtgcgaatgtgggtgaacctgaacctgtggcagaagctgaagctaagcagagatgatgccaagcctctgctgagactgaagggattcccttcctttcctctggtcgagagacaggccaacgaagtggactggtgggacatggtgtgtaacgtgaagaagctgatcaacgagaaaaaggaggatggcaaggtgttttggcagaatctggctggctacaagagacaggaagccctgagaccatacctgagcagcgaggaagatcggaagaagggaaagaaattcgctcggtaccagctgggcgacctgctgctgcacctggaaaagaagcacggcgaggactggggaaaggtgtacgacgaggcctgggagcggattgacaagaaagtggaaggcctgagcaagcacatcaagctggaagaggaacggagaagcgaggacgcccagagcaaggccgccctgaccgactggctgcgggctaaggccagcttcgtgatcgagggcctgaaggaggccgacaaggacgagttctgcagatgcgagctgaagctgcagaagtggtacggggacctgcggggaaagcccttcgccatcgaagccgagaacagcatcctggacatcagcggcttcagcaagcagtacaactgtgccttcatctggcagaaggacggcgtgaagaagctgaacctgtacctgatcatcaactacttcaagggcggcaagctgcggttcaagaagatcaaacctgaagccttcgaagccaacagattctacaccgtgatcaacaaaaagagcggcgagatcgtgcccatggaggtgaacttcaacttcgacgaccccaacctgatcatcctgcctctggcctttggcaagagacagggcagagaattcatctggaacgacctgctgtccctggaaaccggcagcctgaagctggccaacggaagagtgatcgagaagacactgtacaacagaagaacccggcaggatgagcctgccctgttcgtggccctgaccttcgagcggcgggaggtcctggactcctccaatatcaaaccaatgaacctgatcggcgtggcaagaggcgaaaacatccccgccgtgatcgccctgaccgaccccgagggctgcccactgagccggtttaaggatagcctgggaaacccaacccacatcctgagaatcggcgagagctataaggagaagcagcggaccatccaggccaagaaggaggtggagcagcggagagccggcggctacagccggaagtacgccagcaaagccaagaatctggcagacgatatggtgagaaacaccgctagagatctgctgtactacgccgtgacccaggatgccatgctgatcttcgccaacctgagccggggcttcggccggcagggcaagcggaccttcatggccgagagacagtacacacggatggaggactggctgaccgccaagctggcctacgagggcctgagcaagacctacctgtccaagacactggcccagtacacctccaagacatgcagcaactgtgggtttaccatcaccagcgccgactacgacagggtgctggagaagctgaagaagacagcaacaggctggatgaccacaattaacggcaaggagctgaaggtggagggccagattacctactacaacagatacaagagacagaacgtagtcaaggacctgtccgtcgagctggatagactgagcgaagaatctgtgaacaacgacatctcctcctggacaaagggcagaagcggagaagctctgagcctcctgaagaaaagattctcccatagacccgtgcaggagaagttcgtgtgcctgaactgcggcttcgagacacacgcagccgagcaagccgccctgaacatcgccagatcctggctgttcctgcggagccaggagtacaagaaataccagacaaacaagacaaccggcaacaccgataagagagccttcgtcgagacctggcagtccttttaccggaagaagcttaaggaggtgtggaaacctgccgtgcggtctggcggatctggcggaggctccacaagcaagcccgaggacgtgagcttcgccgaggtggccgtgtacttcagcctggacgagtggggctacctgtggcccgcccagagggccctgtacagggacgtgatgagggagacctacggccacttcggcgagctgggcttccccggccccaagcccgccctgatcagctggatggagcaggagagcgaggcctggagccccgccgcccaggaccccgaggagggcgagagcgtgggcggcgccgtgaccagccccaagaaaaagagaaaagtctaagctgccttctgcggggcttgccttctggccatgcccttcttctctcccttgcacctgtacctcttggtctttgaataaagcctgagtaggaaggctagcaaaaaaaaaaaaaaaaaaaaaaaaaaaaaaaaaaaaaaaaaaaaaaaaaaaaaaaaaaaaaaaaaaaaaaaaaaaaaaaa

SEQ ID NO: 6899 - RNA, 5797 nt, synthetic construct
  source 1..5797: mol_type = other RNA
aggaaataagagagaaaagaagagtaagaagaaatataagagccaccatggcccctaagaagaagcgtaaagtgagccggatggaacgcctcgtctacgaggtgcggcagaagtgcagaaacatcgaggacatctgcatctcctgcggatctctgaacgtgaccctggagcacccactgttcatcggcggcatgtgccagaactgtaaaaactgttttctggagtgtgcctatcaatacgacgatgacggctaccagagctactgcaccatctgttgcggcggaagagaggtgctgatgtgtggaaataacaactgctgccggtgcttctgcgtggaatgcgtggacctgctggtgggccccggcgccgcccaggccgctattaaggaagatccttggaactgctacatgtgcggccacaagggcacatacggcctgctgagacggagagaggactggcctagcagactgcagatgttcttcgccaataaccacgaccaggagttcgacccccctaaggtgtaccctcccgtccccgccgagaagagaaagcccatccgggtcctgagcctgttcgatggcatcgccaccggtctgctggtgctgaaggacctgggcatccaggtggataggtacattgcctccgaggtgtgcgaggactccatcaccgtgggaatggtgcgtcatcagggcaagatcatgtacgtgggcgacgtgcggagcgtgacacagaagcatatccaggagtggggccctttcgacctggtgatcggcggcagcccttgcaatgacctgagcatcgtgaacccagcccggaagggcctgtacgagggaaccggcagactgttcttcgagttttacagactgctgcacgacgcccggcctaaggaaggcgacgaccggcccttcttttggctgttcgagaatgtggtggccatgggagtcagcgacaagcgggatattagccggttcctggagagcaaccccgtgatgatcgatgccaaggaagtgagcgccgcccaccgggccagatacttctggggcaatctgcctggcatgaacagacccctggccagcaccgtgaacgacaagctggagctgcaggagtgcctggagcacggccggatcgccaagttcagcaaggtgagaaccatcaccacccgaagcaacagcatcaaacaaggcaaggaccagcactttcctgtgttcatgaacgagaaggaggacatcctgtggtgtaccgagatggagagagtgttcgggttcccagtccactacacagatgtcagcaacatgtctagactggccagacagagactgctgggaagaagctggtccgtccctgtgatcagacacctgttcgcccctctgaaggagtacttcgcctgcgtgagcagcggcaacagcaacgccaacagccggggccccagcttctctagcggcctggtgccactgtccctgagagggagccacatgggccccatggagatctacaaaaccgtgagcgcctggaagcggcagcctgtgcgcgtgctgagcctgtttcggaatatcgataaagtcctgaaaagcctgggattcctggagagcggctctggctccggcggtggcaccctgaagtacgtggaggatgtgacaaacgtggtcagacgggatgtggagaagtggggccccttcgatctggtgtacggcagcacccaacccctgggcagctcttgtgaccggtgccctggctggtacatgtttcagttccaccggatcctgcagtacgccctgccgagacaggagtcccagcggccattcttttggattttcatggacaacttgctgctgaccgaggatgaccaggaaactaccactcggttcctgcagaccgaagccgtgaccctgcaggacgtgagaggccgggactaccagaacgccatgcgggtgtggtccaacatccctggactgaaaagcaagcacgcacctctgacccctaaagaagaggagtacctgcaggcccaggtgcggagcagaagcaagctggacgcccctaaggtggatctgctggtgaagaattgcctcctgcccctgagagagtacttcaagtatttcagccagaatagtctgcccctgggcggcccaagcagcggcgcccctcctcccagcggcggcagcccagccggctccccaacctctaccgaggagggcacctctgagtccgccacccccgagagcggccctggcacctccaccgagcccagcgagggcagcgcacccggcagccctgccggcagccccacctccacagaggagggaaccagcaccgagcccagcgaaggcagcgccccaggcaccagcaccgagcctagtgagggcggctctggcggcggcagcgcccaggagattaaacggatcaacaagatcagaagaagacttgtgaaagacagcaacaccaagaaggccggcaagacaggccccatgaaaaccctgctggttagagtgatgacacccgatctgagagagcggctggaaaacctgagaaagaagcctgaaaatatcccccagcccatcagcaatacatctagagccaacctgaataagctgctgaccgattacaccgaaatgaagaaggcgatcctgcatgtgtactgggaagagttccagaaggaccctgtgggcctgatgagccgggtggcccagcctgccagcaagaagatcgatcagaacaagctgaaacctgagatggacgagaagggcaacctgaccaccgccggctttgcctgctctcagtgtggccagcccctgttcgtgtacaagctggagcaggtgtctgagaagggcaaggcttacaccaactacttcggacggtgcaatgtggccgagcacgaaaagctgatcctgctggcccagctgaagcccgagaaggatagcgacgaagccgtgacatatagcctgggaaagtttgggcagagggccctggatttctacagcattcatgtgaccaaggagtccacccaccccgtgaagcccctggcccagatcgccggaaacagatacgcctccggacctgtgggaaaggccctgagcgacgcatgtatgggcacaatcgcctccttcctgtctaagtaccaggacatcatcatcgaacaccagaaggtggtgaagggcaaccagaagagactggagagcctgcgggagctggccggcaaggaaaacctggaataccctagcgtgaccctgccacctcagcctcacaccaaggagggcgttgatgcctacaacgaagtgatcgcccgggtgcgaatgtgggtgaacctgaacctgtggcagaagctgaagctaagcagagatgatgccaagcctctgctgagactgaagggattcccttcctttcctctggtcgagagacaggccaacgaagtggactggtgggacatggtgtgtaacgtgaagaagctgatcaacgagaaaaaggaggatggcaaggtgttttggcagaatctggctggctacaagagacaggaagccctgagaccatacctgagcagcgaggaagatcggaagaagggaaagaaattcgctcggtaccagctgggcgacctgctgctgcacctggaaaagaagcacggcgaggactggggaaaggtgtacgacgaggcctgggagcggattgacaagaaagtggaaggcctgagcaagcacatcaagctggaagaggaacggagaagcgaggacgcccagagcaaggccgccctgaccgactggctgcgggctaaggccagcttcgtgatcgagggcctgaaggaggccgacaaggacgagttctgcagatgcgagctgaagctgcagaagtggtacggggacctgcggggaaagcccttcgccatcgaagccgagaacagcatcctggacatcagcggcttcagcaagcagtacaactgtgccttcatctggcagaaggacggcgtgaagaagctgaacctgtacctgatcatcaactacttcaagggcggcaagctgcggttcaagaagatcaaacctgaagccttcgaagccaacagattctacaccgtgatcaacaaaaagagcggcgagatcgtgcccatggaggtgaacttcaacttcgacgaccccaacctgatcatcctgcctctggcctttggcaagagacagggcagagaattcatctggaacgacctgctgtccctggaaaccggcagcctgaagctggccaacggaagagtgatcgagaagacactgtacaacagaagaacccggcaggatgagcctgccctgttcgtggccctgaccttcgagcggcgggaggtcctggactcctccaatatcaaaccaatgaacctgatcggcgtggcaagaggcgaaaacatccccgccgtgatcgccctgaccgaccccgagggctgcccactgagccggtttaaggatagcctgggaaacccaacccacatcctgagaatcggcgagagctataaggagaagcagcggaccatccaggccaagaaggaggtggagcagcggagagccggcggctacagccggaagtacgccagcaaagccaagaatctggcagacgatatggtgagaaacaccgctagagatctgctgtactacgccgtgacccaggatgccatgctgatcttcgccaacctgagccggggcttcggccggcagggcaagcggaccttcatggccgagagacagtacacacggatggaggactggctgaccgccaagctggcctacgagggcctgagcaagacctacctgtccaagacactggcccagtacacctccaagacatgcagcaactgtgggtttaccatcaccagcgccgactacgacagggtgctggagaagctgaagaagacagcaacaggctggatgaccacaattaacggcaaggagctgaaggtggagggccagattacctactacaacagatacaagagacagaacgtagtcaaggacctgtccgtcgagctggatagactgagcgaagaatctgtgaacaacgacatctcctcctggacaaagggcagaagcggagaagctctgagcctcctgaagaaaagattctcccatagacccgtgcaggagaagttcgtgtgcctgaactgcggcttcgagacacacgcagccgagcaagccgccctgaacatcgccagatcctggctgttcctgcggagccaggagtacaagaaataccagacaaacaagacaaccggcaacaccgataagagagccttcgtcgagacctggcagtccttttaccggaagaagcttaaggaggtgtggaaacctgccgtgcggtctggcggatctggcggaggctccacaagcagccagggcagcgtgaccttcagggacgtggccatcgacttcagccaggaggagtggaagtggctgcagcccgcccagagggacctgtacaggtgcgtgatgctggagaactacggccacctggtgagcctgggcctgagcatcagcaagcccgacgtggtgagcctgctggagcagggcaaggagccctggctgggcaagagggaggtgaagagggacctgttcagcgtgagcgagagcagcaccagccccaagaaaaagagaaaagtctaagctgccttctgcggggcttgccttctggccatgcccttcttctctcccttgcacctgtacctcttggtctttgaataaagcctgagtaggaaggctagcaaaaaaaaaaaaaaaaaaaaaaaaaaaaaaaaaaaaaaaaaaaaaaaaaaaaaaaaaaaaaaaaaaaaaaaaaaaaaaaa

SEQ ID NO: 6900 - RNA, 5797 nt, synthetic construct
  source 1..5797: mol_type = other RNA
aggaaataagagagaaaagaagagtaagaagaaatataagagccaccatggcccctaagaagaagcgtaaagtgagccggatggaacgcctcgtctacgaggtgcggcagaagtgcagaaacatcgaggacatctgcatctcctgcggatctctgaacgtgaccctggagcacccactgttcatcggcggcatgtgccagaactgtaaaaactgttttctggagtgtgcctatcaatacgacgatgacggctaccagagctactgcaccatctgttgcggcggaagagaggtgctgatgtgtggaaataacaactgctgccggtgcttctgcgtggaatgcgtggacctgctggtgggccccggcgccgcccaggccgctattaaggaagatccttggaactgctacatgtgcggccacaagggcacatacggcctgctgagacggagagaggactggcctagcagactgcagatgttcttcgccaataaccacgaccaggagttcgacccccctaaggtgtaccctcccgtccccgccgagaagagaaagcccatccgggtcctgagcctgttcgatggcatcgccaccggtctgctggtgctgaaggacctgggcatccaggtggataggtacattgcctccgaggtgtgcgaggactccatcaccgtgggaatggtgcgtcatcagggcaagatcatgtacgtgggcgacgtgcggagcgtgacacagaagcatatccaggagtggggccctttcgacctggtgatcggcggcagcccttgcaatgacctgagcatcgtgaacccagcccggaagggcctgtacgagggaaccggcagactgttcttcgagttttacagactgctgcacgacgcccggcctaaggaaggcgacgaccggcccttcttttggctgttcgagaatgtggtggccatgggagtcagcgacaagcgggatattagccggttcctggagagcaaccccgtgatgatcgatgccaaggaagtgagcgccgcccaccgggccagatacttctggggcaatctgcctggcatgaacagacccctggccagcaccgtgaacgacaagctggagctgcaggagtgcctggagcacggccggatcgccaagttcagcaaggtgagaaccatcaccacccgaagcaacagcatcaaacaaggcaaggaccagcactttcctgtgttcatgaacgagaaggaggacatcctgtggtgtaccgagatggagagagtgttcgggttcccagtccactacacagatgtcagcaacatgtctagactggccagacagagactgctgggaagaagctggtccgtccctgtgatcagacacctgttcgcccctctgaaggagtacttcgcctgcgtgagcagcggcaacagcaacgccaacagccggggccccagcttctctagcggcctggtgccactgtccctgagagggagccacatgggccccatggagatctacaaaaccgtgagcgcctggaagcggcagcctgtgcgcgtgctgagcctgtttcggaatatcgataaagtcctgaaaagcctgggattcctggagagcggctctggctccggcggtggcaccctgaagtacgtggaggatgtgacaaacgtggtcagacgggatgtggagaagtggggccccttcgatctggtgtacggcagcacccaacccctgggcagctcttgtgaccggtgccctggctggtacatgtttcagttccaccggatcctgcagtacgccctgccgagacaggagtcccagcggccattcttttggattttcatggacaacttgctgctgaccgaggatgaccaggaaactaccactcggttcctgcagaccgaagccgtgaccctgcaggacgtgagaggccgggactaccagaacgccatgcgggtgtggtccaacatccctggactgaaaagcaagcacgcacctctgacccctaaagaagaggagtacctgcaggcccaggtgcggagcagaagcaagctggacgcccctaaggtggatctgctggtgaagaattgcctcctgcccctgagagagtacttcaagtatttcagccagaatagtctgcccctgggcggcccaagcagcggcgcccctcctcccagcggcggcagcccagccggctccccaacctctaccgaggagggcacctctgagtccgccacccccgagagcggccctggcacctccaccgagcccagcgagggcagcgcacccggcagccctgccggcagccccacctccacagaggagggaaccagcaccgagcccagcgaaggcagcgccccaggcaccagcaccgagcctagtgagggcggctctggcggcggcagcgcccaggagattaaacggatcaacaagatcagaagaagacttgtgaaagacagcaacaccaagaaggccggcaagacaggccccatgaaaaccctgctggttagagtgatgacacccgatctgagagagcggctggaaaacctgagaaagaagcctgaaaatatcccccagcccatcagcaatacatctagagccaacctgaataagctgctgaccgattacaccgaaatgaagaaggcgatcctgcatgtgtactgggaagagttccagaaggaccctgtgggcctgatgagccgggtggcccagcctgccagcaagaagatcgatcagaacaagctgaaacctgagatggacgagaagggcaacctgaccaccgccggctttgcctgctctcagtgtggccagcccctgttcgtgtacaagctggagcaggtgtctgagaagggcaaggcttacaccaactacttcggacggtgcaatgtggccgagcacgaaaagctgatcctgctggcccagctgaagcccgagaaggatagcgacgaagccgtgacatatagcctgggaaagtttgggcagagggccctggatttctacagcattcatgtgaccaaggagtccacccaccccgtgaagcccctggcccagatcgccggaaacagatacgcctccggacctgtgggaaaggccctgagcgacgcatgtatgggcacaatcgcctccttcctgtctaagtaccaggacatcatcatcgaacaccagaaggtggtgaagggcaaccagaagagactggagagcctgcgggagctggccggcaaggaaaacctggaataccctagcgtgaccctgccacctcagcctcacaccaaggagggcgttgatgcctacaacgaagtgatcgcccgggtgcgaatgtgggtgaacctgaacctgtggcagaagctgaagctaagcagagatgatgccaagcctctgctgagactgaagggattcccttcctttcctctggtcgagagacaggccaacgaagtggactggtgggacatggtgtgtaacgtgaagaagctgatcaacgagaaaaaggaggatggcaaggtgttttggcagaatctggctggctacaagagacaggaagccctgagaccatacctgagcagcgaggaagatcggaagaagggaaagaaattcgctcggtaccagctgggcgacctgctgctgcacctggaaaagaagcacggcgaggactggggaaaggtgtacgacgaggcctgggagcggattgacaagaaagtggaaggcctgagcaagcacatcaagctggaagaggaacggagaagcgaggacgcccagagcaaggccgccctgaccgactggctgcgggctaaggccagcttcgtgatcgagggcctgaaggaggccgacaaggacgagttctgcagatgcgagctgaagctgcagaagtggtacggggacctgcggggaaagcccttcgccatcgaagccgagaacagcatcctggacatcagcggcttcagcaagcagtacaactgtgccttcatctggcagaaggacggcgtgaagaagctgaacctgtacctgatcatcaactacttcaagggcggcaagctgcggttcaagaagatcaaacctgaagccttcgaagccaacagattctacaccgtgatcaacaaaaagagcggcgagatcgtgcccatggaggtgaacttcaacttcgacgaccccaacctgatcatcctgcctctggcctttggcaagagacagggcagagaattcatctggaacgacctgctgtccctggaaaccggcagcctgaagctggccaacggaagagtgatcgagaagacactgtacaacagaagaacccggcaggatgagcctgccctgttcgtggccctgaccttcgagcggcgggaggtcctggactcctccaatatcaaaccaatgaacctgatcggcgtggcaagaggcgaaaacatccccgccgtgatcgccctgaccgaccccgagggctgcccactgagccggtttaaggatagcctgggaaacccaacccacatcctgagaatcggcgagagctataaggagaagcagcggaccatccaggccaagaaggaggtggagcagcggagagccggcggctacagccggaagtacgccagcaaagccaagaatctggcagacgatatggtgagaaacaccgctagagatctgctgtactacgccgtgacccaggatgccatgctgatcttcgccaacctgagccggggcttcggccggcagggcaagcggaccttcatggccgagagacagtacacacggatggaggactggctgaccgccaagctggcctacgagggcctgagcaagacctacctgtccaagacactggcccagtacacctccaagacatgcagcaactgtgggtttaccatcaccagcgccgactacgacagggtgctggagaagctgaagaagacagcaacaggctggatgaccacaattaacggcaaggagctgaaggtggagggccagattacctactacaacagatacaagagacagaacgtagtcaaggacctgtccgtcgagctggatagactgagcgaagaatctgtgaacaacgacatctcctcctggacaaagggcagaagcggagaagctctgagcctcctgaagaaaagattctcccatagacccgtgcaggagaagttcgtgtgcctgaactgcggcttcgagacacacgcagccgagcaagccgccctgaacatcgccagatcctggctgttcctgcggagccaggagtacaagaaataccagacaaacaagacaaccggcaacaccgataagagagccttcgtcgagacctggcagtccttttaccggaagaagcttaaggaggtgtggaaacctgccgtgcggtctggcggatctggcggaggctccacaagcatgggcccccagggcgccaggaggcaggccttcctggccttcggcgacgtgaccgtggacttcacccagaaggagtggaggctgctgagccccacccagagggccctgtacagggaggtgaccctggagaactacagccacctggtgagcctgggcatcctgcacagcaagcccgagctgatcaggaggctggagcagggcgaggccccctggggcgaggagaggaggaggaggcccggccccaccagccccaagaaaaagagaaaagtctaagctgccttctgcggggcttgccttctggccatgcccttcttctctcccttgcacctgtacctcttggtctttgaataaagcctgagtaggaaggctagcaaaaaaaaaaaaaaaaaaaaaaaaaaaaaaaaaaaaaaaaaaaaaaaaaaaaaaaaaaaaaaaaaaaaaaaaaaaaaaaa

SEQ ID NO: 6901 - RNA, 5797 nt, synthetic construct
  source 1..5797: mol_type = other RNA
aggaaataagagagaaaagaagagtaagaagaaatataagagccaccatggcccctaagaagaagcgtaaagtgagccggatggaacgcctcgtctacgaggtgcggcagaagtgcagaaacatcgaggacatctgcatctcctgcggatctctgaacgtgaccctggagcacccactgttcatcggcggcatgtgccagaactgtaaaaactgttttctggagtgtgcctatcaatacgacgatgacggctaccagagctactgcaccatctgttgcggcggaagagaggtgctgatgtgtggaaataacaactgctgccggtgcttctgcgtggaatgcgtggacctgctggtgggccccggcgccgcccaggccgctattaaggaagatccttggaactgctacatgtgcggccacaagggcacatacggcctgctgagacggagagaggactggcctagcagactgcagatgttcttcgccaataaccacgaccaggagttcgacccccctaaggtgtaccctcccgtccccgccgagaagagaaagcccatccgggtcctgagcctgttcgatggcatcgccaccggtctgctggtgctgaaggacctgggcatccaggtggataggtacattgcctccgaggtgtgcgaggactccatcaccgtgggaatggtgcgtcatcagggcaagatcatgtacgtgggcgacgtgcggagcgtgacacagaagcatatccaggagtggggccctttcgacctggtgatcggcggcagcccttgcaatgacctgagcatcgtgaacccagcccggaagggcctgtacgagggaaccggcagactgttcttcgagttttacagactgctgcacgacgcccggcctaaggaaggcgacgaccggcccttcttttggctgttcgagaatgtggtggccatgggagtcagcgacaagcgggatattagccggttcctggagagcaaccccgtgatgatcgatgccaaggaagtgagcgccgcccaccgggccagatacttctggggcaatctgcctggcatgaacagacccctggccagcaccgtgaacgacaagctggagctgcaggagtgcctggagcacggccggatcgccaagttcagcaaggtgagaaccatcaccacccgaagcaacagcatcaaacaaggcaaggaccagcactttcctgtgttcatgaacgagaaggaggacatcctgtggtgtaccgagatggagagagtgttcgggttcccagtccactacacagatgtcagcaacatgtctagactggccagacagagactgctgggaagaagctggtccgtccctgtgatcagacacctgttcgcccctctgaaggagtacttcgcctgcgtgagcagcggcaacagcaacgccaacagccggggccccagcttctctagcggcctggtgccactgtccctgagagggagccacatgggccccatggagatctacaaaaccgtgagcgcctggaagcggcagcctgtgcgcgtgctgagcctgtttcggaatatcgataaagtcctgaaaagcctgggattcctggagagcggctctggctccggcggtggcaccctgaagtacgtggaggatgtgacaaacgtggtcagacgggatgtggagaagtggggccccttcgatctggtgtacggcagcacccaacccctgggcagctcttgtgaccggtgccctggctggtacatgtttcagttccaccggatcctgcagtacgccctgccgagacaggagtcccagcggccattcttttggattttcatggacaacttgctgctgaccgaggatgaccaggaaactaccactcggttcctgcagaccgaagccgtgaccctgcaggacgtgagaggccgggactaccagaacgccatgcgggtgtggtccaacatccctggactgaaaagcaagcacgcacctctgacccctaaagaagaggagtacctgcaggcccaggtgcggagcagaagcaagctggacgcccctaaggtggatctgctggtgaagaattgcctcctgcccctgagagagtacttcaagtatttcagccagaatagtctgcccctgggcggcccaagcagcggcgcccctcctcccagcggcggcagcccagccggctccccaacctctaccgaggagggcacctctgagtccgccacccccgagagcggccctggcacctccaccgagcccagcgagggcagcgcacccggcagccctgccggcagccccacctccacagaggagggaaccagcaccgagcccagcgaaggcagcgccccaggcaccagcaccgagcctagtgagggcggctctggcggcggcagcgcccaggagattaaacggatcaacaagatcagaagaagacttgtgaaagacagcaacaccaagaaggccggcaagacaggccccatgaaaaccctgctggttagagtgatgacacccgatctgagagagcggctggaaaacctgagaaagaagcctgaaaatatcccccagcccatcagcaatacatctagagccaacctgaataagctgctgaccgattacaccgaaatgaagaaggcgatcctgcatgtgtactgggaagagttccagaaggaccctgtgggcctgatgagccgggtggcccagcctgccagcaagaagatcgatcagaacaagctgaaacctgagatggacgagaagggcaacctgaccaccgccggctttgcctgctctcagtgtggccagcccctgttcgtgtacaagctggagcaggtgtctgagaagggcaaggcttacaccaactacttcggacggtgcaatgtggccgagcacgaaaagctgatcctgctggcccagctgaagcccgagaaggatagcgacgaagccgtgacatatagcctgggaaagtttgggcagagggccctggatttctacagcattcatgtgaccaaggagtccacccaccccgtgaagcccctggcccagatcgccggaaacagatacgcctccggacctgtgggaaaggccctgagcgacgcatgtatgggcacaatcgcctccttcctgtctaagtaccaggacatcatcatcgaacaccagaaggtggtgaagggcaaccagaagagactggagagcctgcgggagctggccggcaaggaaaacctggaataccctagcgtgaccctgccacctcagcctcacaccaaggagggcgttgatgcctacaacgaagtgatcgcccgggtgcgaatgtgggtgaacctgaacctgtggcagaagctgaagctaagcagagatgatgccaagcctctgctgagactgaagggattcccttcctttcctctggtcgagagacaggccaacgaagtggactggtgggacatggtgtgtaacgtgaagaagctgatcaacgagaaaaaggaggatggcaaggtgttttggcagaatctggctggctacaagagacaggaagccctgagaccatacctgagcagcgaggaagatcggaagaagggaaagaaattcgctcggtaccagctgggcgacctgctgctgcacctggaaaagaagcacggcgaggactggggaaaggtgtacgacgaggcctgggagcggattgacaagaaagtggaaggcctgagcaagcacatcaagctggaagaggaacggagaagcgaggacgcccagagcaaggccgccctgaccgactggctgcgggctaaggccagcttcgtgatcgagggcctgaaggaggccgacaaggacgagttctgcagatgcgagctgaagctgcagaagtggtacggggacctgcggggaaagcccttcgccatcgaagccgagaacagcatcctggacatcagcggcttcagcaagcagtacaactgtgccttcatctggcagaaggacggcgtgaagaagctgaacctgtacctgatcatcaactacttcaagggcggcaagctgcggttcaagaagatcaaacctgaagccttcgaagccaacagattctacaccgtgatcaacaaaaagagcggcgagatcgtgcccatggaggtgaacttcaacttcgacgaccccaacctgatcatcctgcctctggcctttggcaagagacagggcagagaattcatctggaacgacctgctgtccctggaaaccggcagcctgaagctggccaacggaagagtgatcgagaagacactgtacaacagaagaacccggcaggatgagcctgccctgttcgtggccctgaccttcgagcggcgggaggtcctggactcctccaatatcaaaccaatgaacctgatcggcgtggcaagaggcgaaaacatccccgccgtgatcgccctgaccgaccccgagggctgcccactgagccggtttaaggatagcctgggaaacccaacccacatcctgagaatcggcgagagctataaggagaagcagcggaccatccaggccaagaaggaggtggagcagcggagagccggcggctacagccggaagtacgccagcaaagccaagaatctggcagacgatatggtgagaaacaccgctagagatctgctgtactacgccgtgacccaggatgccatgctgatcttcgccaacctgagccggggcttcggccggcagggcaagcggaccttcatggccgagagacagtacacacggatggaggactggctgaccgccaagctggcctacgagggcctgagcaagacctacctgtccaagacactggcccagtacacctccaagacatgcagcaactgtgggtttaccatcaccagcgccgactacgacagggtgctggagaagctgaagaagacagcaacaggctggatgaccacaattaacggcaaggagctgaaggtggagggccagattacctactacaacagatacaagagacagaacgtagtcaaggacctgtccgtcgagctggatagactgagcgaagaatctgtgaacaacgacatctcctcctggacaaagggcagaagcggagaagctctgagcctcctgaagaaaagattctcccatagacccgtgcaggagaagttcgtgtgcctgaactgcggcttcgagacacacgcagccgagcaagccgccctgaacatcgccagatcctggctgttcctgcggagccaggagtacaagaaataccagacaaacaagacaaccggcaacaccgataagagagccttcgtcgagacctggcagtccttttaccggaagaagcttaaggaggtgtggaaacctgccgtgcggtctggcggatctggcggaggctccacaagcagccaggtgagcgtgaccttcgaggacgtggccgtgctgttcagcagggacgagtggaggaggctgggccccagccagaagaacctgtaccaggacgtgatgctggagaactacagcaacctggtgagcctgggcctgcccttcagcaagcccaaggtgatcagcctgctgcagcagggcgaggacccctggaaggtggagaaggagagccccggcagcttccccggctgcaagagcagccccaccagccccaagaaaaagagaaaagtctaagctgccttctgcggggcttgccttctggccatgcccttcttctctcccttgcacctgtacctcttggtctttgaataaagcctgagtaggaaggctagcaaaaaaaaaaaaaaaaaaaaaaaaaaaaaaaaaaaaaaaaaaaaaaaaaaaaaaaaaaaaaaaaaaaaaaaaaaaaaaaa

SEQ ID NO: 6902 - RNA, 5797 nt, synthetic construct
  source 1..5797: mol_type = other RNA
aggaaataagagagaaaagaagagtaagaagaaatataagagccaccatggcccctaagaagaagcgtaaagtgagccggatggaacgcctcgtctacgaggtgcggcagaagtgcagaaacatcgaggacatctgcatctcctgcggatctctgaacgtgaccctggagcacccactgttcatcggcggcatgtgccagaactgtaaaaactgttttctggagtgtgcctatcaatacgacgatgacggctaccagagctactgcaccatctgttgcggcggaagagaggtgctgatgtgtggaaataacaactgctgccggtgcttctgcgtggaatgcgtggacctgctggtgggccccggcgccgcccaggccgctattaaggaagatccttggaactgctacatgtgcggccacaagggcacatacggcctgctgagacggagagaggactggcctagcagactgcagatgttcttcgccaataaccacgaccaggagttcgacccccctaaggtgtaccctcccgtccccgccgagaagagaaagcccatccgggtcctgagcctgttcgatggcatcgccaccggtctgctggtgctgaaggacctgggcatccaggtggataggtacattgcctccgaggtgtgcgaggactccatcaccgtgggaatggtgcgtcatcagggcaagatcatgtacgtgggcgacgtgcggagcgtgacacagaagcatatccaggagtggggccctttcgacctggtgatcggcggcagcccttgcaatgacctgagcatcgtgaacccagcccggaagggcctgtacgagggaaccggcagactgttcttcgagttttacagactgctgcacgacgcccggcctaaggaaggcgacgaccggcccttcttttggctgttcgagaatgtggtggccatgggagtcagcgacaagcgggatattagccggttcctggagagcaaccccgtgatgatcgatgccaaggaagtgagcgccgcccaccgggccagatacttctggggcaatctgcctggcatgaacagacccctggccagcaccgtgaacgacaagctggagctgcaggagtgcctggagcacggccggatcgccaagttcagcaaggtgagaaccatcaccacccgaagcaacagcatcaaacaaggcaaggaccagcactttcctgtgttcatgaacgagaaggaggacatcctgtggtgtaccgagatggagagagtgttcgggttcccagtccactacacagatgtcagcaacatgtctagactggccagacagagactgctgggaagaagctggtccgtccctgtgatcagacacctgttcgcccctctgaaggagtacttcgcctgcgtgagcagcggcaacagcaacgccaacagccggggccccagcttctctagcggcctggtgccactgtccctgagagggagccacatgggccccatggagatctacaaaaccgtgagcgcctggaagcggcagcctgtgcgcgtgctgagcctgtttcggaatatcgataaagtcctgaaaagcctgggattcctggagagcggctctggctccggcggtggcaccctgaagtacgtggaggatgtgacaaacgtggtcagacgggatgtggagaagtggggccccttcgatctggtgtacggcagcacccaacccctgggcagctcttgtgaccggtgccctggctggtacatgtttcagttccaccggatcctgcagtacgccctgccgagacaggagtcccagcggccattcttttggattttcatggacaacttgctgctgaccgaggatgaccaggaaactaccactcggttcctgcagaccgaagccgtgaccctgcaggacgtgagaggccgggactaccagaacgccatgcgggtgtggtccaacatccctggactgaaaagcaagcacgcacctctgacccctaaagaagaggagtacctgcaggcccaggtgcggagcagaagcaagctggacgcccctaaggtggatctgctggtgaagaattgcctcctgcccctgagagagtacttcaagtatttcagccagaatagtctgcccctgggcggcccaagcagcggcgcccctcctcccagcggcggcagcccagccggctccccaacctctaccgaggagggcacctctgagtccgccacccccgagagcggccctggcacctccaccgagcccagcgagggcagcgcacccggcagccctgccggcagccccacctccacagaggagggaaccagcaccgagcccagcgaaggcagcgccccaggcaccagcaccgagcctagtgagggcggctctggcggcggcagcgcccaggagattaaacggatcaacaagatcagaagaagacttgtgaaagacagcaacaccaagaaggccggcaagacaggccccatgaaaaccctgctggttagagtgatgacacccgatctgagagagcggctggaaaacctgagaaagaagcctgaaaatatcccccagcccatcagcaatacatctagagccaacctgaataagctgctgaccgattacaccgaaatgaagaaggcgatcctgcatgtgtactgggaagagttccagaaggaccctgtgggcctgatgagccgggtggcccagcctgccagcaagaagatcgatcagaacaagctgaaacctgagatggacgagaagggcaacctgaccaccgccggctttgcctgctctcagtgtggccagcccctgttcgtgtacaagctggagcaggtgtctgagaagggcaaggcttacaccaactacttcggacggtgcaatgtggccgagcacgaaaagctgatcctgctggcccagctgaagcccgagaaggatagcgacgaagccgtgacatatagcctgggaaagtttgggcagagggccctggatttctacagcattcatgtgaccaaggagtccacccaccccgtgaagcccctggcccagatcgccggaaacagatacgcctccggacctgtgggaaaggccctgagcgacgcatgtatgggcacaatcgcctccttcctgtctaagtaccaggacatcatcatcgaacaccagaaggtggtgaagggcaaccagaagagactggagagcctgcgggagctggccggcaaggaaaacctggaataccctagcgtgaccctgccacctcagcctcacaccaaggagggcgttgatgcctacaacgaagtgatcgcccgggtgcgaatgtgggtgaacctgaacctgtggcagaagctgaagctaagcagagatgatgccaagcctctgctgagactgaagggattcccttcctttcctctggtcgagagacaggccaacgaagtggactggtgggacatggtgtgtaacgtgaagaagctgatcaacgagaaaaaggaggatggcaaggtgttttggcagaatctggctggctacaagagacaggaagccctgagaccatacctgagcagcgaggaagatcggaagaagggaaagaaattcgctcggtaccagctgggcgacctgctgctgcacctggaaaagaagcacggcgaggactggggaaaggtgtacgacgaggcctgggagcggattgacaagaaagtggaaggcctgagcaagcacatcaagctggaagaggaacggagaagcgaggacgcccagagcaaggccgccctgaccgactggctgcgggctaaggccagcttcgtgatcgagggcctgaaggaggccgacaaggacgagttctgcagatgcgagctgaagctgcagaagtggtacggggacctgcggggaaagcccttcgccatcgaagccgagaacagcatcctggacatcagcggcttcagcaagcagtacaactgtgccttcatctggcagaaggacggcgtgaagaagctgaacctgtacctgatcatcaactacttcaagggcggcaagctgcggttcaagaagatcaaacctgaagccttcgaagccaacagattctacaccgtgatcaacaaaaagagcggcgagatcgtgcccatggaggtgaacttcaacttcgacgaccccaacctgatcatcctgcctctggcctttggcaagagacagggcagagaattcatctggaacgacctgctgtccctggaaaccggcagcctgaagctggccaacggaagagtgatcgagaagacactgtacaacagaagaacccggcaggatgagcctgccctgttcgtggccctgaccttcgagcggcgggaggtcctggactcctccaatatcaaaccaatgaacctgatcggcgtggcaagaggcgaaaacatccccgccgtgatcgccctgaccgaccccgagggctgcccactgagccggtttaaggatagcctgggaaacccaacccacatcctgagaatcggcgagagctataaggagaagcagcggaccatccaggccaagaaggaggtggagcagcggagagccggcggctacagccggaagtacgccagcaaagccaagaatctggcagacgatatggtgagaaacaccgctagagatctgctgtactacgccgtgacccaggatgccatgctgatcttcgccaacctgagccggggcttcggccggcagggcaagcggaccttcatggccgagagacagtacacacggatggaggactggctgaccgccaagctggcctacgagggcctgagcaagacctacctgtccaagacactggcccagtacacctccaagacatgcagcaactgtgggtttaccatcaccagcgccgactacgacagggtgctggagaagctgaagaagacagcaacaggctggatgaccacaattaacggcaaggagctgaaggtggagggccagattacctactacaacagatacaagagacagaacgtagtcaaggacctgtccgtcgagctggatagactgagcgaagaatctgtgaacaacgacatctcctcctggacaaagggcagaagcggagaagctctgagcctcctgaagaaaagattctcccatagacccgtgcaggagaagttcgtgtgcctgaactgcggcttcgagacacacgcagccgagcaagccgccctgaacatcgccagatcctggctgttcctgcggagccaggagtacaagaaataccagacaaacaagacaaccggcaacaccgataagagagccttcgtcgagacctggcagtccttttaccggaagaagcttaaggaggtgtggaaacctgccgtgcggtctggcggatctggcggaggctccacaagcaagcccggcaccgtgagcttcgccgacgtggccgtgtacttcagcagggaggagtggggctacctgaggcccgcccagagggccctgtacagggacgtgatgagggagacctactgccacctgggcgccctgggcgtgggcggcagcaagcccgccctgatcagctgggtggaggaggaggccgagctgtgggaccccgccgccagggaccccgaggtgaccaagggcctgaccgagaccgacaccagccccaagaaaaagagaaaagtctaagctgccttctgcggggcttgccttctggccatgcccttcttctctcccttgcacctgtacctcttggtctttgaataaagcctgagtaggaaggctagcaaaaaaaaaaaaaaaaaaaaaaaaaaaaaaaaaaaaaaaaaaaaaaaaaaaaaaaaaaaaaaaaaaaaaaaaaaaaaaaa

SEQ ID NO: 6903 - RNA, 5797 nt, synthetic construct
  source 1..5797: mol_type = other RNA
aggaaataagagagaaaagaagagtaagaagaaatataagagccaccatggcccctaagaagaagcgtaaagtgagccggatggaacgcctcgtctacgaggtgcggcagaagtgcagaaacatcgaggacatctgcatctcctgcggatctctgaacgtgaccctggagcacccactgttcatcggcggcatgtgccagaactgtaaaaactgttttctggagtgtgcctatcaatacgacgatgacggctaccagagctactgcaccatctgttgcggcggaagagaggtgctgatgtgtggaaataacaactgctgccggtgcttctgcgtggaatgcgtggacctgctggtgggccccggcgccgcccaggccgctattaaggaagatccttggaactgctacatgtgcggccacaagggcacatacggcctgctgagacggagagaggactggcctagcagactgcagatgttcttcgccaataaccacgaccaggagttcgacccccctaaggtgtaccctcccgtccccgccgagaagagaaagcccatccgggtcctgagcctgttcgatggcatcgccaccggtctgctggtgctgaaggacctgggcatccaggtggataggtacattgcctccgaggtgtgcgaggactccatcaccgtgggaatggtgcgtcatcagggcaagatcatgtacgtgggcgacgtgcggagcgtgacacagaagcatatccaggagtggggccctttcgacctggtgatcggcggcagcccttgcaatgacctgagcatcgtgaacccagcccggaagggcctgtacgagggaaccggcagactgttcttcgagttttacagactgctgcacgacgcccggcctaaggaaggcgacgaccggcccttcttttggctgttcgagaatgtggtggccatgggagtcagcgacaagcgggatattagccggttcctggagagcaaccccgtgatgatcgatgccaaggaagtgagcgccgcccaccgggccagatacttctggggcaatctgcctggcatgaacagacccctggccagcaccgtgaacgacaagctggagctgcaggagtgcctggagcacggccggatcgccaagttcagcaaggtgagaaccatcaccacccgaagcaacagcatcaaacaaggcaaggaccagcactttcctgtgttcatgaacgagaaggaggacatcctgtggtgtaccgagatggagagagtgttcgggttcccagtccactacacagatgtcagcaacatgtctagactggccagacagagactgctgggaagaagctggtccgtccctgtgatcagacacctgttcgcccctctgaaggagtacttcgcctgcgtgagcagcggcaacagcaacgccaacagccggggccccagcttctctagcggcctggtgccactgtccctgagagggagccacatgggccccatggagatctacaaaaccgtgagcgcctggaagcggcagcctgtgcgcgtgctgagcctgtttcggaatatcgataaagtcctgaaaagcctgggattcctggagagcggctctggctccggcggtggcaccctgaagtacgtggaggatgtgacaaacgtggtcagacgggatgtggagaagtggggccccttcgatctggtgtacggcagcacccaacccctgggcagctcttgtgaccggtgccctggctggtacatgtttcagttccaccggatcctgcagtacgccctgccgagacaggagtcccagcggccattcttttggattttcatggacaacttgctgctgaccgaggatgaccaggaaactaccactcggttcctgcagaccgaagccgtgaccctgcaggacgtgagaggccgggactaccagaacgccatgcgggtgtggtccaacatccctggactgaaaagcaagcacgcacctctgacccctaaagaagaggagtacctgcaggcccaggtgcggagcagaagcaagctggacgcccctaaggtggatctgctggtgaagaattgcctcctgcccctgagagagtacttcaagtatttcagccagaatagtctgcccctgggcggcccaagcagcggcgcccctcctcccagcggcggcagcccagccggctccccaacctctaccgaggagggcacctctgagtccgccacccccgagagcggccctggcacctccaccgagcccagcgagggcagcgcacccggcagccctgccggcagccccacctccacagaggagggaaccagcaccgagcccagcgaaggcagcgccccaggcaccagcaccgagcctagtgagggcggctctggcggcggcagcgcccaggagattaaacggatcaacaagatcagaagaagacttgtgaaagacagcaacaccaagaaggccggcaagacaggccccatgaaaaccctgctggttagagtgatgacacccgatctgagagagcggctggaaaacctgagaaagaagcctgaaaatatcccccagcccatcagcaatacatctagagccaacctgaataagctgctgaccgattacaccgaaatgaagaaggcgatcctgcatgtgtactgggaagagttccagaaggaccctgtgggcctgatgagccgggtggcccagcctgccagcaagaagatcgatcagaacaagctgaaacctgagatggacgagaagggcaacctgaccaccgccggctttgcctgctctcagtgtggccagcccctgttcgtgtacaagctggagcaggtgtctgagaagggcaaggcttacaccaactacttcggacggtgcaatgtggccgagcacgaaaagctgatcctgctggcccagctgaagcccgagaaggatagcgacgaagccgtgacatatagcctgggaaagtttgggcagagggccctggatttctacagcattcatgtgaccaaggagtccacccaccccgtgaagcccctggcccagatcgccggaaacagatacgcctccggacctgtgggaaaggccctgagcgacgcatgtatgggcacaatcgcctccttcctgtctaagtaccaggacatcatcatcgaacaccagaaggtggtgaagggcaaccagaagagactggagagcctgcgggagctggccggcaaggaaaacctggaataccctagcgtgaccctgccacctcagcctcacaccaaggagggcgttgatgcctacaacgaagtgatcgcccgggtgcgaatgtgggtgaacctgaacctgtggcagaagctgaagctaagcagagatgatgccaagcctctgctgagactgaagggattcccttcctttcctctggtcgagagacaggccaacgaagtggactggtgggacatggtgtgtaacgtgaagaagctgatcaacgagaaaaaggaggatggcaaggtgttttggcagaatctggctggctacaagagacaggaagccctgagaccatacctgagcagcgaggaagatcggaagaagggaaagaaattcgctcggtaccagctgggcgacctgctgctgcacctggaaaagaagcacggcgaggactggggaaaggtgtacgacgaggcctgggagcggattgacaagaaagtggaaggcctgagcaagcacatcaagctggaagaggaacggagaagcgaggacgcccagagcaaggccgccctgaccgactggctgcgggctaaggccagcttcgtgatcgagggcctgaaggaggccgacaaggacgagttctgcagatgcgagctgaagctgcagaagtggtacggggacctgcggggaaagcccttcgccatcgaagccgagaacagcatcctggacatcagcggcttcagcaagcagtacaactgtgccttcatctggcagaaggacggcgtgaagaagctgaacctgtacctgatcatcaactacttcaagggcggcaagctgcggttcaagaagatcaaacctgaagccttcgaagccaacagattctacaccgtgatcaacaaaaagagcggcgagatcgtgcccatggaggtgaacttcaacttcgacgaccccaacctgatcatcctgcctctggcctttggcaagagacagggcagagaattcatctggaacgacctgctgtccctggaaaccggcagcctgaagctggccaacggaagagtgatcgagaagacactgtacaacagaagaacccggcaggatgagcctgccctgttcgtggccctgaccttcgagcggcgggaggtcctggactcctccaatatcaaaccaatgaacctgatcggcgtggcaagaggcgaaaacatccccgccgtgatcgccctgaccgaccccgagggctgcccactgagccggtttaaggatagcctgggaaacccaacccacatcctgagaatcggcgagagctataaggagaagcagcggaccatccaggccaagaaggaggtggagcagcggagagccggcggctacagccggaagtacgccagcaaagccaagaatctggcagacgatatggtgagaaacaccgctagagatctgctgtactacgccgtgacccaggatgccatgctgatcttcgccaacctgagccggggcttcggccggcagggcaagcggaccttcatggccgagagacagtacacacggatggaggactggctgaccgccaagctggcctacgagggcctgagcaagacctacctgtccaagacactggcccagtacacctccaagacatgcagcaactgtgggtttaccatcaccagcgccgactacgacagggtgctggagaagctgaagaagacagcaacaggctggatgaccacaattaacggcaaggagctgaaggtggagggccagattacctactacaacagatacaagagacagaacgtagtcaaggacctgtccgtcgagctggatagactgagcgaagaatctgtgaacaacgacatctcctcctggacaaagggcagaagcggagaagctctgagcctcctgaagaaaagattctcccatagacccgtgcaggagaagttcgtgtgcctgaactgcggcttcgagacacacgcagccgagcaagccgccctgaacatcgccagatcctggctgttcctgcggagccaggagtacaagaaataccagacaaacaagacaaccggcaacaccgataagagagccttcgtcgagacctggcagtccttttaccggaagaagcttaaggaggtgtggaaacctgccgtgcggtctggcggatctggcggaggctccacaagcatgttcagcgacgtgagcgtggacttcagccaggaggagtgggagtgcctggaccccggccagagggacctgtacagggacgtgatgctggagaactacagcaacctgctgagcatgggcctgtacatccccaagccccaggtgatcagcctgctggagcagggcaaggagccctggatggtgggcagggagctgaccaggggcctgtgcagcgacctggagagcatgtgcgagaccaagctgaccagccccaagaaaaagagaaaagtctaagctgccttctgcggggcttgccttctggccatgcccttcttctctcccttgcacctgtacctcttggtctttgaataaagcctgagtaggaaggctagcaaaaaaaaaaaaaaaaaaaaaaaaaaaaaaaaaaaaaaaaaaaaaaaaaaaaaaaaaaaaaaaaaaaaaaaaaaaaaaaa

SEQ ID NO: 6904 - RNA, 5797 nt, synthetic construct
  source 1..5797: mol_type = other RNA
aggaaataagagagaaaagaagagtaagaagaaatataagagccaccatggcccctaagaagaagcgtaaagtgagccggatggaacgcctcgtctacgaggtgcggcagaagtgcagaaacatcgaggacatctgcatctcctgcggatctctgaacgtgaccctggagcacccactgttcatcggcggcatgtgccagaactgtaaaaactgttttctggagtgtgcctatcaatacgacgatgacggctaccagagctactgcaccatctgttgcggcggaagagaggtgctgatgtgtggaaataacaactgctgccggtgcttctgcgtggaatgcgtggacctgctggtgggccccggcgccgcccaggccgctattaaggaagatccttggaactgctacatgtgcggccacaagggcacatacggcctgctgagacggagagaggactggcctagcagactgcagatgttcttcgccaataaccacgaccaggagttcgacccccctaaggtgtaccctcccgtccccgccgagaagagaaagcccatccgggtcctgagcctgttcgatggcatcgccaccggtctgctggtgctgaaggacctgggcatccaggtggataggtacattgcctccgaggtgtgcgaggactccatcaccgtgggaatggtgcgtcatcagggcaagatcatgtacgtgggcgacgtgcggagcgtgacacagaagcatatccaggagtggggccctttcgacctggtgatcggcggcagcccttgcaatgacctgagcatcgtgaacccagcccggaagggcctgtacgagggaaccggcagactgttcttcgagttttacagactgctgcacgacgcccggcctaaggaaggcgacgaccggcccttcttttggctgttcgagaatgtggtggccatgggagtcagcgacaagcgggatattagccggttcctggagagcaaccccgtgatgatcgatgccaaggaagtgagcgccgcccaccgggccagatacttctggggcaatctgcctggcatgaacagacccctggccagcaccgtgaacgacaagctggagctgcaggagtgcctggagcacggccggatcgccaagttcagcaaggtgagaaccatcaccacccgaagcaacagcatcaaacaaggcaaggaccagcactttcctgtgttcatgaacgagaaggaggacatcctgtggtgtaccgagatggagagagtgttcgggttcccagtccactacacagatgtcagcaacatgtctagactggccagacagagactgctgggaagaagctggtccgtccctgtgatcagacacctgttcgcccctctgaaggagtacttcgcctgcgtgagcagcggcaacagcaacgccaacagccggggccccagcttctctagcggcctggtgccactgtccctgagagggagccacatgggccccatggagatctacaaaaccgtgagcgcctggaagcggcagcctgtgcgcgtgctgagcctgtttcggaatatcgataaagtcctgaaaagcctgggattcctggagagcggctctggctccggcggtggcaccctgaagtacgtggaggatgtgacaaacgtggtcagacgggatgtggagaagtggggccccttcgatctggtgtacggcagcacccaacccctgggcagctcttgtgaccggtgccctggctggtacatgtttcagttccaccggatcctgcagtacgccctgccgagacaggagtcccagcggccattcttttggattttcatggacaacttgctgctgaccgaggatgaccaggaaactaccactcggttcctgcagaccgaagccgtgaccctgcaggacgtgagaggccgggactaccagaacgccatgcgggtgtggtccaacatccctggactgaaaagcaagcacgcacctctgacccctaaagaagaggagtacctgcaggcccaggtgcggagcagaagcaagctggacgcccctaaggtggatctgctggtgaagaattgcctcctgcccctgagagagtacttcaagtatttcagccagaatagtctgcccctgggcggcccaagcagcggcgcccctcctcccagcggcggcagcccagccggctccccaacctctaccgaggagggcacctctgagtccgccacccccgagagcggccctggcacctccaccgagcccagcgagggcagcgcacccggcagccctgccggcagccccacctccacagaggagggaaccagcaccgagcccagcgaaggcagcgccccaggcaccagcaccgagcctagtgagggcggctctggcggcggcagcgcccaggagattaaacggatcaacaagatcagaagaagacttgtgaaagacagcaacaccaagaaggccggcaagacaggccccatgaaaaccctgctggttagagtgatgacacccgatctgagagagcggctggaaaacctgagaaagaagcctgaaaatatcccccagcccatcagcaatacatctagagccaacctgaataagctgctgaccgattacaccgaaatgaagaaggcgatcctgcatgtgtactgggaagagttccagaaggaccctgtgggcctgatgagccgggtggcccagcctgccagcaagaagatcgatcagaacaagctgaaacctgagatggacgagaagggcaacctgaccaccgccggctttgcctgctctcagtgtggccagcccctgttcgtgtacaagctggagcaggtgtctgagaagggcaaggcttacaccaactacttcggacggtgcaatgtggccgagcacgaaaagctgatcctgctggcccagctgaagcccgagaaggatagcgacgaagccgtgacatatagcctgggaaagtttgggcagagggccctggatttctacagcattcatgtgaccaaggagtccacccaccccgtgaagcccctggcccagatcgccggaaacagatacgcctccggacctgtgggaaaggccctgagcgacgcatgtatgggcacaatcgcctccttcctgtctaagtaccaggacatcatcatcgaacaccagaaggtggtgaagggcaaccagaagagactggagagcctgcgggagctggccggcaaggaaaacctggaataccctagcgtgaccctgccacctcagcctcacaccaaggagggcgttgatgcctacaacgaagtgatcgcccgggtgcgaatgtgggtgaacctgaacctgtggcagaagctgaagctaagcagagatgatgccaagcctctgctgagactgaagggattcccttcctttcctctggtcgagagacaggccaacgaagtggactggtgggacatggtgtgtaacgtgaagaagctgatcaacgagaaaaaggaggatggcaaggtgttttggcagaatctggctggctacaagagacaggaagccctgagaccatacctgagcagcgaggaagatcggaagaagggaaagaaattcgctcggtaccagctgggcgacctgctgctgcacctggaaaagaagcacggcgaggactggggaaaggtgtacgacgaggcctgggagcggattgacaagaaagtggaaggcctgagcaagcacatcaagctggaagaggaacggagaagcgaggacgcccagagcaaggccgccctgaccgactggctgcgggctaaggccagcttcgtgatcgagggcctgaaggaggccgacaaggacgagttctgcagatgcgagctgaagctgcagaagtggtacggggacctgcggggaaagcccttcgccatcgaagccgagaacagcatcctggacatcagcggcttcagcaagcagtacaactgtgccttcatctggcagaaggacggcgtgaagaagctgaacctgtacctgatcatcaactacttcaagggcggcaagctgcggttcaagaagatcaaacctgaagccttcgaagccaacagattctacaccgtgatcaacaaaaagagcggcgagatcgtgcccatggaggtgaacttcaacttcgacgaccccaacctgatcatcctgcctctggcctttggcaagagacagggcagagaattcatctggaacgacctgctgtccctggaaaccggcagcctgaagctggccaacggaagagtgatcgagaagacactgtacaacagaagaacccggcaggatgagcctgccctgttcgtggccctgaccttcgagcggcgggaggtcctggactcctccaatatcaaaccaatgaacctgatcggcgtggcaagaggcgaaaacatccccgccgtgatcgccctgaccgaccccgagggctgcccactgagccggtttaaggatagcctgggaaacccaacccacatcctgagaatcggcgagagctataaggagaagcagcggaccatccaggccaagaaggaggtggagcagcggagagccggcggctacagccggaagtacgccagcaaagccaagaatctggcagacgatatggtgagaaacaccgctagagatctgctgtactacgccgtgacccaggatgccatgctgatcttcgccaacctgagccggggcttcggccggcagggcaagcggaccttcatggccgagagacagtacacacggatggaggactggctgaccgccaagctggcctacgagggcctgagcaagacctacctgtccaagacactggcccagtacacctccaagacatgcagcaactgtgggtttaccatcaccagcgccgactacgacagggtgctggagaagctgaagaagacagcaacaggctggatgaccacaattaacggcaaggagctgaaggtggagggccagattacctactacaacagatacaagagacagaacgtagtcaaggacctgtccgtcgagctggatagactgagcgaagaatctgtgaacaacgacatctcctcctggacaaagggcagaagcggagaagctctgagcctcctgaagaaaagattctcccatagacccgtgcaggagaagttcgtgtgcctgaactgcggcttcgagacacacgcagccgagcaagccgccctgaacatcgccagatcctggctgttcctgcggagccaggagtacaagaaataccagacaaacaagacaaccggcaacaccgataagagagccttcgtcgagacctggcagtccttttaccggaagaagcttaaggaggtgtggaaacctgccgtgcggtctggcggatctggcggaggctccacaagcaagcagggcggcgtgaccttcgaggacgtggccgtgtacttcagccaggaggagtggagcctgctgaacgaggcccagaggaggctgtaccacgacgtgatgctggagaacttcgccctgatcagcagcctgggctgctgctgcagggccgaggccgtggagacccccttcgagcagagcatcagcgtgggcgtgagccaggccaagacccccaaggagcccaggagcagccagaagacccacaccagccccaagaaaaagagaaaagtctaagctgccttctgcggggcttgccttctggccatgcccttcttctctcccttgcacctgtacctcttggtctttgaataaagcctgagtaggaaggctagcaaaaaaaaaaaaaaaaaaaaaaaaaaaaaaaaaaaaaaaaaaaaaaaaaaaaaaaaaaaaaaaaaaaaaaaaaaaaaaaa

SEQ ID NO: 6905 - RNA, 5797 nt, synthetic construct
  source 1..5797: mol_type = other RNA
aggaaataagagagaaaagaagagtaagaagaaatataagagccaccatggcccctaagaagaagcgtaaagtgagccggatggaacgcctcgtctacgaggtgcggcagaagtgcagaaacatcgaggacatctgcatctcctgcggatctctgaacgtgaccctggagcacccactgttcatcggcggcatgtgccagaactgtaaaaactgttttctggagtgtgcctatcaatacgacgatgacggctaccagagctactgcaccatctgttgcggcggaagagaggtgctgatgtgtggaaataacaactgctgccggtgcttctgcgtggaatgcgtggacctgctggtgggccccggcgccgcccaggccgctattaaggaagatccttggaactgctacatgtgcggccacaagggcacatacggcctgctgagacggagagaggactggcctagcagactgcagatgttcttcgccaataaccacgaccaggagttcgacccccctaaggtgtaccctcccgtccccgccgagaagagaaagcccatccgggtcctgagcctgttcgatggcatcgccaccggtctgctggtgctgaaggacctgggcatccaggtggataggtacattgcctccgaggtgtgcgaggactccatcaccgtgggaatggtgcgtcatcagggcaagatcatgtacgtgggcgacgtgcggagcgtgacacagaagcatatccaggagtggggccctttcgacctggtgatcggcggcagcccttgcaatgacctgagcatcgtgaacccagcccggaagggcctgtacgagggaaccggcagactgttcttcgagttttacagactgctgcacgacgcccggcctaaggaaggcgacgaccggcccttcttttggctgttcgagaatgtggtggccatgggagtcagcgacaagcgggatattagccggttcctggagagcaaccccgtgatgatcgatgccaaggaagtgagcgccgcccaccgggccagatacttctggggcaatctgcctggcatgaacagacccctggccagcaccgtgaacgacaagctggagctgcaggagtgcctggagcacggccggatcgccaagttcagcaaggtgagaaccatcaccacccgaagcaacagcatcaaacaaggcaaggaccagcactttcctgtgttcatgaacgagaaggaggacatcctgtggtgtaccgagatggagagagtgttcgggttcccagtccactacacagatgtcagcaacatgtctagactggccagacagagactgctgggaagaagctggtccgtccctgtgatcagacacctgttcgcccctctgaaggagtacttcgcctgcgtgagcagcggcaacagcaacgccaacagccggggccccagcttctctagcggcctggtgccactgtccctgagagggagccacatgggccccatggagatctacaaaaccgtgagcgcctggaagcggcagcctgtgcgcgtgctgagcctgtttcggaatatcgataaagtcctgaaaagcctgggattcctggagagcggctctggctccggcggtggcaccctgaagtacgtggaggatgtgacaaacgtggtcagacgggatgtggagaagtggggccccttcgatctggtgtacggcagcacccaacccctgggcagctcttgtgaccggtgccctggctggtacatgtttcagttccaccggatcctgcagtacgccctgccgagacaggagtcccagcggccattcttttggattttcatggacaacttgctgctgaccgaggatgaccaggaaactaccactcggttcctgcagaccgaagccgtgaccctgcaggacgtgagaggccgggactaccagaacgccatgcgggtgtggtccaacatccctggactgaaaagcaagcacgcacctctgacccctaaagaagaggagtacctgcaggcccaggtgcggagcagaagcaagctggacgcccctaaggtggatctgctggtgaagaattgcctcctgcccctgagagagtacttcaagtatttcagccagaatagtctgcccctgggcggcccaagcagcggcgcccctcctcccagcggcggcagcccagccggctccccaacctctaccgaggagggcacctctgagtccgccacccccgagagcggccctggcacctccaccgagcccagcgagggcagcgcacccggcagccctgccggcagccccacctccacagaggagggaaccagcaccgagcccagcgaaggcagcgccccaggcaccagcaccgagcctagtgagggcggctctggcggcggcagcgcccaggagattaaacggatcaacaagatcagaagaagacttgtgaaagacagcaacaccaagaaggccggcaagacaggccccatgaaaaccctgctggttagagtgatgacacccgatctgagagagcggctggaaaacctgagaaagaagcctgaaaatatcccccagcccatcagcaatacatctagagccaacctgaataagctgctgaccgattacaccgaaatgaagaaggcgatcctgcatgtgtactgggaagagttccagaaggaccctgtgggcctgatgagccgggtggcccagcctgccagcaagaagatcgatcagaacaagctgaaacctgagatggacgagaagggcaacctgaccaccgccggctttgcctgctctcagtgtggccagcccctgttcgtgtacaagctggagcaggtgtctgagaagggcaaggcttacaccaactacttcggacggtgcaatgtggccgagcacgaaaagctgatcctgctggcccagctgaagcccgagaaggatagcgacgaagccgtgacatatagcctgggaaagtttgggcagagggccctggatttctacagcattcatgtgaccaaggagtccacccaccccgtgaagcccctggcccagatcgccggaaacagatacgcctccggacctgtgggaaaggccctgagcgacgcatgtatgggcacaatcgcctccttcctgtctaagtaccaggacatcatcatcgaacaccagaaggtggtgaagggcaaccagaagagactggagagcctgcgggagctggccggcaaggaaaacctggaataccctagcgtgaccctgccacctcagcctcacaccaaggagggcgttgatgcctacaacgaagtgatcgcccgggtgcgaatgtgggtgaacctgaacctgtggcagaagctgaagctaagcagagatgatgccaagcctctgctgagactgaagggattcccttcctttcctctggtcgagagacaggccaacgaagtggactggtgggacatggtgtgtaacgtgaagaagctgatcaacgagaaaaaggaggatggcaaggtgttttggcagaatctggctggctacaagagacaggaagccctgagaccatacctgagcagcgaggaagatcggaagaagggaaagaaattcgctcggtaccagctgggcgacctgctgctgcacctggaaaagaagcacggcgaggactggggaaaggtgtacgacgaggcctgggagcggattgacaagaaagtggaaggcctgagcaagcacatcaagctggaagaggaacggagaagcgaggacgcccagagcaaggccgccctgaccgactggctgcgggctaaggccagcttcgtgatcgagggcctgaaggaggccgacaaggacgagttctgcagatgcgagctgaagctgcagaagtggtacggggacctgcggggaaagcccttcgccatcgaagccgagaacagcatcctggacatcagcggcttcagcaagcagtacaactgtgccttcatctggcagaaggacggcgtgaagaagctgaacctgtacctgatcatcaactacttcaagggcggcaagctgcggttcaagaagatcaaacctgaagccttcgaagccaacagattctacaccgtgatcaacaaaaagagcggcgagatcgtgcccatggaggtgaacttcaacttcgacgaccccaacctgatcatcctgcctctggcctttggcaagagacagggcagagaattcatctggaacgacctgctgtccctggaaaccggcagcctgaagctggccaacggaagagtgatcgagaagacactgtacaacagaagaacccggcaggatgagcctgccctgttcgtggccctgaccttcgagcggcgggaggtcctggactcctccaatatcaaaccaatgaacctgatcggcgtggcaagaggcgaaaacatccccgccgtgatcgccctgaccgaccccgagggctgcccactgagccggtttaaggatagcctgggaaacccaacccacatcctgagaatcggcgagagctataaggagaagcagcggaccatccaggccaagaaggaggtggagcagcggagagccggcggctacagccggaagtacgccagcaaagccaagaatctggcagacgatatggtgagaaacaccgctagagatctgctgtactacgccgtgacccaggatgccatgctgatcttcgccaacctgagccggggcttcggccggcagggcaagcggaccttcatggccgagagacagtacacacggatggaggactggctgaccgccaagctggcctacgagggcctgagcaagacctacctgtccaagacactggcccagtacacctccaagacatgcagcaactgtgggtttaccatcaccagcgccgactacgacagggtgctggagaagctgaagaagacagcaacaggctggatgaccacaattaacggcaaggagctgaaggtggagggccagattacctactacaacagatacaagagacagaacgtagtcaaggacctgtccgtcgagctggatagactgagcgaagaatctgtgaacaacgacatctcctcctggacaaagggcagaagcggagaagctctgagcctcctgaagaaaagattctcccatagacccgtgcaggagaagttcgtgtgcctgaactgcggcttcgagacacacgcagccgagcaagccgccctgaacatcgccagatcctggctgttcctgcggagccaggagtacaagaaataccagacaaacaagacaaccggcaacaccgataagagagccttcgtcgagacctggcagtccttttaccggaagaagcttaaggaggtgtggaaacctgccgtgcggtctggcggatctggcggaggctccacaagctgcagccacaggagctgcagggaggaccccggcaccagcgagagcagggagatggaccccgtggccttcaaggacgtggccgtgaacttcacccaggaggagtgggccctgctggacatcagccagaggaagctgtacagggaggtgatgctggagaccttcaggaacctgaccagcatcggcaagaagtggaaggaccagaacatcgagttcgagtaccagaaccccaggaggaacttcaggaccagccccaagaaaaagagaaaagtctaagctgccttctgcggggcttgccttctggccatgcccttcttctctcccttgcacctgtacctcttggtctttgaataaagcctgagtaggaaggctagcaaaaaaaaaaaaaaaaaaaaaaaaaaaaaaaaaaaaaaaaaaaaaaaaaaaaaaaaaaaaaaaaaaaaaaaaaaaaaaaa

SEQ ID NO: 6906 - RNA, 5797 nt, synthetic construct
  source 1..5797: mol_type = other RNA
aggaaataagagagaaaagaagagtaagaagaaatataagagccaccatggcccctaagaagaagcgtaaagtgagccggatggaacgcctcgtctacgaggtgcggcagaagtgcagaaacatcgaggacatctgcatctcctgcggatctctgaacgtgaccctggagcacccactgttcatcggcggcatgtgccagaactgtaaaaactgttttctggagtgtgcctatcaatacgacgatgacggctaccagagctactgcaccatctgttgcggcggaagagaggtgctgatgtgtggaaataacaactgctgccggtgcttctgcgtggaatgcgtggacctgctggtgggccccggcgccgcccaggccgctattaaggaagatccttggaactgctacatgtgcggccacaagggcacatacggcctgctgagacggagagaggactggcctagcagactgcagatgttcttcgccaataaccacgaccaggagttcgacccccctaaggtgtaccctcccgtccccgccgagaagagaaagcccatccgggtcctgagcctgttcgatggcatcgccaccggtctgctggtgctgaaggacctgggcatccaggtggataggtacattgcctccgaggtgtgcgaggactccatcaccgtgggaatggtgcgtcatcagggcaagatcatgtacgtgggcgacgtgcggagcgtgacacagaagcatatccaggagtggggccctttcgacctggtgatcggcggcagcccttgcaatgacctgagcatcgtgaacccagcccggaagggcctgtacgagggaaccggcagactgttcttcgagttttacagactgctgcacgacgcccggcctaaggaaggcgacgaccggcccttcttttggctgttcgagaatgtggtggccatgggagtcagcgacaagcgggatattagccggttcctggagagcaaccccgtgatgatcgatgccaaggaagtgagcgccgcccaccgggccagatacttctggggcaatctgcctggcatgaacagacccctggccagcaccgtgaacgacaagctggagctgcaggagtgcctggagcacggccggatcgccaagttcagcaaggtgagaaccatcaccacccgaagcaacagcatcaaacaaggcaaggaccagcactttcctgtgttcatgaacgagaaggaggacatcctgtggtgtaccgagatggagagagtgttcgggttcccagtccactacacagatgtcagcaacatgtctagactggccagacagagactgctgggaagaagctggtccgtccctgtgatcagacacctgttcgcccctctgaaggagtacttcgcctgcgtgagcagcggcaacagcaacgccaacagccggggccccagcttctctagcggcctggtgccactgtccctgagagggagccacatgggccccatggagatctacaaaaccgtgagcgcctggaagcggcagcctgtgcgcgtgctgagcctgtttcggaatatcgataaagtcctgaaaagcctgggattcctggagagcggctctggctccggcggtggcaccctgaagtacgtggaggatgtgacaaacgtggtcagacgggatgtggagaagtggggccccttcgatctggtgtacggcagcacccaacccctgggcagctcttgtgaccggtgccctggctggtacatgtttcagttccaccggatcctgcagtacgccctgccgagacaggagtcccagcggccattcttttggattttcatggacaacttgctgctgaccgaggatgaccaggaaactaccactcggttcctgcagaccgaagccgtgaccctgcaggacgtgagaggccgggactaccagaacgccatgcgggtgtggtccaacatccctggactgaaaagcaagcacgcacctctgacccctaaagaagaggagtacctgcaggcccaggtgcggagcagaagcaagctggacgcccctaaggtggatctgctggtgaagaattgcctcctgcccctgagagagtacttcaagtatttcagccagaatagtctgcccctgggcggcccaagcagcggcgcccctcctcccagcggcggcagcccagccggctccccaacctctaccgaggagggcacctctgagtccgccacccccgagagcggccctggcacctccaccgagcccagcgagggcagcgcacccggcagccctgccggcagccccacctccacagaggagggaaccagcaccgagcccagcgaaggcagcgccccaggcaccagcaccgagcctagtgagggcggctctggcggcggcagcgcccaggagattaaacggatcaacaagatcagaagaagacttgtgaaagacagcaacaccaagaaggccggcaagacaggccccatgaaaaccctgctggttagagtgatgacacccgatctgagagagcggctggaaaacctgagaaagaagcctgaaaatatcccccagcccatcagcaatacatctagagccaacctgaataagctgctgaccgattacaccgaaatgaagaaggcgatcctgcatgtgtactgggaagagttccagaaggaccctgtgggcctgatgagccgggtggcccagcctgccagcaagaagatcgatcagaacaagctgaaacctgagatggacgagaagggcaacctgaccaccgccggctttgcctgctctcagtgtggccagcccctgttcgtgtacaagctggagcaggtgtctgagaagggcaaggcttacaccaactacttcggacggtgcaatgtggccgagcacgaaaagctgatcctgctggcccagctgaagcccgagaaggatagcgacgaagccgtgacatatagcctgggaaagtttgggcagagggccctggatttctacagcattcatgtgaccaaggagtccacccaccccgtgaagcccctggcccagatcgccggaaacagatacgcctccggacctgtgggaaaggccctgagcgacgcatgtatgggcacaatcgcctccttcctgtctaagtaccaggacatcatcatcgaacaccagaaggtggtgaagggcaaccagaagagactggagagcctgcgggagctggccggcaaggaaaacctggaataccctagcgtgaccctgccacctcagcctcacaccaaggagggcgttgatgcctacaacgaagtgatcgcccgggtgcgaatgtgggtgaacctgaacctgtggcagaagctgaagctaagcagagatgatgccaagcctctgctgagactgaagggattcccttcctttcctctggtcgagagacaggccaacgaagtggactggtgggacatggtgtgtaacgtgaagaagctgatcaacgagaaaaaggaggatggcaaggtgttttggcagaatctggctggctacaagagacaggaagccctgagaccatacctgagcagcgaggaagatcggaagaagggaaagaaattcgctcggtaccagctgggcgacctgctgctgcacctggaaaagaagcacggcgaggactggggaaaggtgtacgacgaggcctgggagcggattgacaagaaagtggaaggcctgagcaagcacatcaagctggaagaggaacggagaagcgaggacgcccagagcaaggccgccctgaccgactggctgcgggctaaggccagcttcgtgatcgagggcctgaaggaggccgacaaggacgagttctgcagatgcgagctgaagctgcagaagtggtacggggacctgcggggaaagcccttcgccatcgaagccgagaacagcatcctggacatcagcggcttcagcaagcagtacaactgtgccttcatctggcagaaggacggcgtgaagaagctgaacctgtacctgatcatcaactacttcaagggcggcaagctgcggttcaagaagatcaaacctgaagccttcgaagccaacagattctacaccgtgatcaacaaaaagagcggcgagatcgtgcccatggaggtgaacttcaacttcgacgaccccaacctgatcatcctgcctctggcctttggcaagagacagggcagagaattcatctggaacgacctgctgtccctggaaaccggcagcctgaagctggccaacggaagagtgatcgagaagacactgtacaacagaagaacccggcaggatgagcctgccctgttcgtggccctgaccttcgagcggcgggaggtcctggactcctccaatatcaaaccaatgaacctgatcggcgtggcaagaggcgaaaacatccccgccgtgatcgccctgaccgaccccgagggctgcccactgagccggtttaaggatagcctgggaaacccaacccacatcctgagaatcggcgagagctataaggagaagcagcggaccatccaggccaagaaggaggtggagcagcggagagccggcggctacagccggaagtacgccagcaaagccaagaatctggcagacgatatggtgagaaacaccgctagagatctgctgtactacgccgtgacccaggatgccatgctgatcttcgccaacctgagccggggcttcggccggcagggcaagcggaccttcatggccgagagacagtacacacggatggaggactggctgaccgccaagctggcctacgagggcctgagcaagacctacctgtccaagacactggcccagtacacctccaagacatgcagcaactgtgggtttaccatcaccagcgccgactacgacagggtgctggagaagctgaagaagacagcaacaggctggatgaccacaattaacggcaaggagctgaaggtggagggccagattacctactacaacagatacaagagacagaacgtagtcaaggacctgtccgtcgagctggatagactgagcgaagaatctgtgaacaacgacatctcctcctggacaaagggcagaagcggagaagctctgagcctcctgaagaaaagattctcccatagacccgtgcaggagaagttcgtgtgcctgaactgcggcttcgagacacacgcagccgagcaagccgccctgaacatcgccagatcctggctgttcctgcggagccaggagtacaagaaataccagacaaacaagacaaccggcaacaccgataagagagccttcgtcgagacctggcagtccttttaccggaagaagcttaaggaggtgtggaaacctgccgtgcggtctggcggatctggcggaggctccacaagcagccagggcagcatcaccttcaaggacgtggccgtggacttcacccaggaggagtggtgcctgctggaccccagccagaaggagctgtacagggaggtgatgctggagaacgtgcagaacctgctgttcgtggagaccaacttcgaggtgaaggagatcagcaccaagcagagcctgttcgtggagggcagcggcccccccaggggcaagaacaagggcccctgcgacttcctgctgagggagaccagccccaagaaaaagagaaaagtctaagctgccttctgcggggcttgccttctggccatgcccttcttctctcccttgcacctgtacctcttggtctttgaataaagcctgagtaggaaggctagcaaaaaaaaaaaaaaaaaaaaaaaaaaaaaaaaaaaaaaaaaaaaaaaaaaaaaaaaaaaaaaaaaaaaaaaaaaaaaaaa

SEQ ID NO: 6907 - RNA, 5797 nt, synthetic construct
  source 1..5797: mol_type = other RNA
aggaaataagagagaaaagaagagtaagaagaaatataagagccaccatggcccctaagaagaagcgtaaagtgagccggatggaacgcctcgtctacgaggtgcggcagaagtgcagaaacatcgaggacatctgcatctcctgcggatctctgaacgtgaccctggagcacccactgttcatcggcggcatgtgccagaactgtaaaaactgttttctggagtgtgcctatcaatacgacgatgacggctaccagagctactgcaccatctgttgcggcggaagagaggtgctgatgtgtggaaataacaactgctgccggtgcttctgcgtggaatgcgtggacctgctggtgggccccggcgccgcccaggccgctattaaggaagatccttggaactgctacatgtgcggccacaagggcacatacggcctgctgagacggagagaggactggcctagcagactgcagatgttcttcgccaataaccacgaccaggagttcgacccccctaaggtgtaccctcccgtccccgccgagaagagaaagcccatccgggtcctgagcctgttcgatggcatcgccaccggtctgctggtgctgaaggacctgggcatccaggtggataggtacattgcctccgaggtgtgcgaggactccatcaccgtgggaatggtgcgtcatcagggcaagatcatgtacgtgggcgacgtgcggagcgtgacacagaagcatatccaggagtggggccctttcgacctggtgatcggcggcagcccttgcaatgacctgagcatcgtgaacccagcccggaagggcctgtacgagggaaccggcagactgttcttcgagttttacagactgctgcacgacgcccggcctaaggaaggcgacgaccggcccttcttttggctgttcgagaatgtggtggccatgggagtcagcgacaagcgggatattagccggttcctggagagcaaccccgtgatgatcgatgccaaggaagtgagcgccgcccaccgggccagatacttctggggcaatctgcctggcatgaacagacccctggccagcaccgtgaacgacaagctggagctgcaggagtgcctggagcacggccggatcgccaagttcagcaaggtgagaaccatcaccacccgaagcaacagcatcaaacaaggcaaggaccagcactttcctgtgttcatgaacgagaaggaggacatcctgtggtgtaccgagatggagagagtgttcgggttcccagtccactacacagatgtcagcaacatgtctagactggccagacagagactgctgggaagaagctggtccgtccctgtgatcagacacctgttcgcccctctgaaggagtacttcgcctgcgtgagcagcggcaacagcaacgccaacagccggggccccagcttctctagcggcctggtgccactgtccctgagagggagccacatgggccccatggagatctacaaaaccgtgagcgcctggaagcggcagcctgtgcgcgtgctgagcctgtttcggaatatcgataaagtcctgaaaagcctgggattcctggagagcggctctggctccggcggtggcaccctgaagtacgtggaggatgtgacaaacgtggtcagacgggatgtggagaagtggggccccttcgatctggtgtacggcagcacccaacccctgggcagctcttgtgaccggtgccctggctggtacatgtttcagttccaccggatcctgcagtacgccctgccgagacaggagtcccagcggccattcttttggattttcatggacaacttgctgctgaccgaggatgaccaggaaactaccactcggttcctgcagaccgaagccgtgaccctgcaggacgtgagaggccgggactaccagaacgccatgcgggtgtggtccaacatccctggactgaaaagcaagcacgcacctctgacccctaaagaagaggagtacctgcaggcccaggtgcggagcagaagcaagctggacgcccctaaggtggatctgctggtgaagaattgcctcctgcccctgagagagtacttcaagtatttcagccagaatagtctgcccctgggcggcccaagcagcggcgcccctcctcccagcggcggcagcccagccggctccccaacctctaccgaggagggcacctctgagtccgccacccccgagagcggccctggcacctccaccgagcccagcgagggcagcgcacccggcagccctgccggcagccccacctccacagaggagggaaccagcaccgagcccagcgaaggcagcgccccaggcaccagcaccgagcctagtgagggcggctctggcggcggcagcgcccaggagattaaacggatcaacaagatcagaagaagacttgtgaaagacagcaacaccaagaaggccggcaagacaggccccatgaaaaccctgctggttagagtgatgacacccgatctgagagagcggctggaaaacctgagaaagaagcctgaaaatatcccccagcccatcagcaatacatctagagccaacctgaataagctgctgaccgattacaccgaaatgaagaaggcgatcctgcatgtgtactgggaagagttccagaaggaccctgtgggcctgatgagccgggtggcccagcctgccagcaagaagatcgatcagaacaagctgaaacctgagatggacgagaagggcaacctgaccaccgccggctttgcctgctctcagtgtggccagcccctgttcgtgtacaagctggagcaggtgtctgagaagggcaaggcttacaccaactacttcggacggtgcaatgtggccgagcacgaaaagctgatcctgctggcccagctgaagcccgagaaggatagcgacgaagccgtgacatatagcctgggaaagtttgggcagagggccctggatttctacagcattcatgtgaccaaggagtccacccaccccgtgaagcccctggcccagatcgccggaaacagatacgcctccggacctgtgggaaaggccctgagcgacgcatgtatgggcacaatcgcctccttcctgtctaagtaccaggacatcatcatcgaacaccagaaggtggtgaagggcaaccagaagagactggagagcctgcgggagctggccggcaaggaaaacctggaataccctagcgtgaccctgccacctcagcctcacaccaaggagggcgttgatgcctacaacgaagtgatcgcccgggtgcgaatgtgggtgaacctgaacctgtggcagaagctgaagctaagcagagatgatgccaagcctctgctgagactgaagggattcccttcctttcctctggtcgagagacaggccaacgaagtggactggtgggacatggtgtgtaacgtgaagaagctgatcaacgagaaaaaggaggatggcaaggtgttttggcagaatctggctggctacaagagacaggaagccctgagaccatacctgagcagcgaggaagatcggaagaagggaaagaaattcgctcggtaccagctgggcgacctgctgctgcacctggaaaagaagcacggcgaggactggggaaaggtgtacgacgaggcctgggagcggattgacaagaaagtggaaggcctgagcaagcacatcaagctggaagaggaacggagaagcgaggacgcccagagcaaggccgccctgaccgactggctgcgggctaaggccagcttcgtgatcgagggcctgaaggaggccgacaaggacgagttctgcagatgcgagctgaagctgcagaagtggtacggggacctgcggggaaagcccttcgccatcgaagccgagaacagcatcctggacatcagcggcttcagcaagcagtacaactgtgccttcatctggcagaaggacggcgtgaagaagctgaacctgtacctgatcatcaactacttcaagggcggcaagctgcggttcaagaagatcaaacctgaagccttcgaagccaacagattctacaccgtgatcaacaaaaagagcggcgagatcgtgcccatggaggtgaacttcaacttcgacgaccccaacctgatcatcctgcctctggcctttggcaagagacagggcagagaattcatctggaacgacctgctgtccctggaaaccggcagcctgaagctggccaacggaagagtgatcgagaagacactgtacaacagaagaacccggcaggatgagcctgccctgttcgtggccctgaccttcgagcggcgggaggtcctggactcctccaatatcaaaccaatgaacctgatcggcgtggcaagaggcgaaaacatccccgccgtgatcgccctgaccgaccccgagggctgcccactgagccggtttaaggatagcctgggaaacccaacccacatcctgagaatcggcgagagctataaggagaagcagcggaccatccaggccaagaaggaggtggagcagcggagagccggcggctacagccggaagtacgccagcaaagccaagaatctggcagacgatatggtgagaaacaccgctagagatctgctgtactacgccgtgacccaggatgccatgctgatcttcgccaacctgagccggggcttcggccggcagggcaagcggaccttcatggccgagagacagtacacacggatggaggactggctgaccgccaagctggcctacgagggcctgagcaagacctacctgtccaagacactggcccagtacacctccaagacatgcagcaactgtgggtttaccatcaccagcgccgactacgacagggtgctggagaagctgaagaagacagcaacaggctggatgaccacaattaacggcaaggagctgaaggtggagggccagattacctactacaacagatacaagagacagaacgtagtcaaggacctgtccgtcgagctggatagactgagcgaagaatctgtgaacaacgacatctcctcctggacaaagggcagaagcggagaagctctgagcctcctgaagaaaagattctcccatagacccgtgcaggagaagttcgtgtgcctgaactgcggcttcgagacacacgcagccgagcaagccgccctgaacatcgccagatcctggctgttcctgcggagccaggagtacaagaaataccagacaaacaagacaaccggcaacaccgataagagagccttcgtcgagacctggcagtccttttaccggaagaagcttaaggaggtgtggaaacctgccgtgcggtctggcggatctggcggaggctccacaagccccctggagagcgtgaccttcgaggacgtggccatcaacttcacccaggaggagtgggccctgctggacaccagccagaggaacctgttcaggaacgtgatgctggagaacatcagccacctggtgagcatcggctaccagatcagcaagagcgacgtgatcagccagctgaagcagggcaaggagctgaggaagagcaccgtgagcaagcagtgcggcaagagcctgagccagggcagcttcaccagccccaagaaaaagagaaaagtctaagctgccttctgcggggcttgccttctggccatgcccttcttctctcccttgcacctgtacctcttggtctttgaataaagcctgagtaggaaggctagcaaaaaaaaaaaaaaaaaaaaaaaaaaaaaaaaaaaaaaaaaaaaaaaaaaaaaaaaaaaaaaaaaaaaaaaaaaaaaaaa

SEQ ID NO: 6908 - RNA, 5797 nt, synthetic construct
  source 1..5797: mol_type = other RNA
aggaaataagagagaaaagaagagtaagaagaaatataagagccaccatggcccctaagaagaagcgtaaagtgagccggatggaacgcctcgtctacgaggtgcggcagaagtgcagaaacatcgaggacatctgcatctcctgcggatctctgaacgtgaccctggagcacccactgttcatcggcggcatgtgccagaactgtaaaaactgttttctggagtgtgcctatcaatacgacgatgacggctaccagagctactgcaccatctgttgcggcggaagagaggtgctgatgtgtggaaataacaactgctgccggtgcttctgcgtggaatgcgtggacctgctggtgggccccggcgccgcccaggccgctattaaggaagatccttggaactgctacatgtgcggccacaagggcacatacggcctgctgagacggagagaggactggcctagcagactgcagatgttcttcgccaataaccacgaccaggagttcgacccccctaaggtgtaccctcccgtccccgccgagaagagaaagcccatccgggtcctgagcctgttcgatggcatcgccaccggtctgctggtgctgaaggacctgggcatccaggtggataggtacattgcctccgaggtgtgcgaggactccatcaccgtgggaatggtgcgtcatcagggcaagatcatgtacgtgggcgacgtgcggagcgtgacacagaagcatatccaggagtggggccctttcgacctggtgatcggcggcagcccttgcaatgacctgagcatcgtgaacccagcccggaagggcctgtacgagggaaccggcagactgttcttcgagttttacagactgctgcacgacgcccggcctaaggaaggcgacgaccggcccttcttttggctgttcgagaatgtggtggccatgggagtcagcgacaagcgggatattagccggttcctggagagcaaccccgtgatgatcgatgccaaggaagtgagcgccgcccaccgggccagatacttctggggcaatctgcctggcatgaacagacccctggccagcaccgtgaacgacaagctggagctgcaggagtgcctggagcacggccggatcgccaagttcagcaaggtgagaaccatcaccacccgaagcaacagcatcaaacaaggcaaggaccagcactttcctgtgttcatgaacgagaaggaggacatcctgtggtgtaccgagatggagagagtgttcgggttcccagtccactacacagatgtcagcaacatgtctagactggccagacagagactgctgggaagaagctggtccgtccctgtgatcagacacctgttcgcccctctgaaggagtacttcgcctgcgtgagcagcggcaacagcaacgccaacagccggggccccagcttctctagcggcctggtgccactgtccctgagagggagccacatgggccccatggagatctacaaaaccgtgagcgcctggaagcggcagcctgtgcgcgtgctgagcctgtttcggaatatcgataaagtcctgaaaagcctgggattcctggagagcggctctggctccggcggtggcaccctgaagtacgtggaggatgtgacaaacgtggtcagacgggatgtggagaagtggggccccttcgatctggtgtacggcagcacccaacccctgggcagctcttgtgaccggtgccctggctggtacatgtttcagttccaccggatcctgcagtacgccctgccgagacaggagtcccagcggccattcttttggattttcatggacaacttgctgctgaccgaggatgaccaggaaactaccactcggttcctgcagaccgaagccgtgaccctgcaggacgtgagaggccgggactaccagaacgccatgcgggtgtggtccaacatccctggactgaaaagcaagcacgcacctctgacccctaaagaagaggagtacctgcaggcccaggtgcggagcagaagcaagctggacgcccctaaggtggatctgctggtgaagaattgcctcctgcccctgagagagtacttcaagtatttcagccagaatagtctgcccctgggcggcccaagcagcggcgcccctcctcccagcggcggcagcccagccggctccccaacctctaccgaggagggcacctctgagtccgccacccccgagagcggccctggcacctccaccgagcccagcgagggcagcgcacccggcagccctgccggcagccccacctccacagaggagggaaccagcaccgagcccagcgaaggcagcgccccaggcaccagcaccgagcctagtgagggcggctctggcggcggcagcgcccaggagattaaacggatcaacaagatcagaagaagacttgtgaaagacagcaacaccaagaaggccggcaagacaggccccatgaaaaccctgctggttagagtgatgacacccgatctgagagagcggctggaaaacctgagaaagaagcctgaaaatatcccccagcccatcagcaatacatctagagccaacctgaataagctgctgaccgattacaccgaaatgaagaaggcgatcctgcatgtgtactgggaagagttccagaaggaccctgtgggcctgatgagccgggtggcccagcctgccagcaagaagatcgatcagaacaagctgaaacctgagatggacgagaagggcaacctgaccaccgccggctttgcctgctctcagtgtggccagcccctgttcgtgtacaagctggagcaggtgtctgagaagggcaaggcttacaccaactacttcggacggtgcaatgtggccgagcacgaaaagctgatcctgctggcccagctgaagcccgagaaggatagcgacgaagccgtgacatatagcctgggaaagtttgggcagagggccctggatttctacagcattcatgtgaccaaggagtccacccaccccgtgaagcccctggcccagatcgccggaaacagatacgcctccggacctgtgggaaaggccctgagcgacgcatgtatgggcacaatcgcctccttcctgtctaagtaccaggacatcatcatcgaacaccagaaggtggtgaagggcaaccagaagagactggagagcctgcgggagctggccggcaaggaaaacctggaataccctagcgtgaccctgccacctcagcctcacaccaaggagggcgttgatgcctacaacgaagtgatcgcccgggtgcgaatgtgggtgaacctgaacctgtggcagaagctgaagctaagcagagatgatgccaagcctctgctgagactgaagggattcccttcctttcctctggtcgagagacaggccaacgaagtggactggtgggacatggtgtgtaacgtgaagaagctgatcaacgagaaaaaggaggatggcaaggtgttttggcagaatctggctggctacaagagacaggaagccctgagaccatacctgagcagcgaggaagatcggaagaagggaaagaaattcgctcggtaccagctgggcgacctgctgctgcacctggaaaagaagcacggcgaggactggggaaaggtgtacgacgaggcctgggagcggattgacaagaaagtggaaggcctgagcaagcacatcaagctggaagaggaacggagaagcgaggacgcccagagcaaggccgccctgaccgactggctgcgggctaaggccagcttcgtgatcgagggcctgaaggaggccgacaaggacgagttctgcagatgcgagctgaagctgcagaagtggtacggggacctgcggggaaagcccttcgccatcgaagccgagaacagcatcctggacatcagcggcttcagcaagcagtacaactgtgccttcatctggcagaaggacggcgtgaagaagctgaacctgtacctgatcatcaactacttcaagggcggcaagctgcggttcaagaagatcaaacctgaagccttcgaagccaacagattctacaccgtgatcaacaaaaagagcggcgagatcgtgcccatggaggtgaacttcaacttcgacgaccccaacctgatcatcctgcctctggcctttggcaagagacagggcagagaattcatctggaacgacctgctgtccctggaaaccggcagcctgaagctggccaacggaagagtgatcgagaagacactgtacaacagaagaacccggcaggatgagcctgccctgttcgtggccctgaccttcgagcggcgggaggtcctggactcctccaatatcaaaccaatgaacctgatcggcgtggcaagaggcgaaaacatccccgccgtgatcgccctgaccgaccccgagggctgcccactgagccggtttaaggatagcctgggaaacccaacccacatcctgagaatcggcgagagctataaggagaagcagcggaccatccaggccaagaaggaggtggagcagcggagagccggcggctacagccggaagtacgccagcaaagccaagaatctggcagacgatatggtgagaaacaccgctagagatctgctgtactacgccgtgacccaggatgccatgctgatcttcgccaacctgagccggggcttcggccggcagggcaagcggaccttcatggccgagagacagtacacacggatggaggactggctgaccgccaagctggcctacgagggcctgagcaagacctacctgtccaagacactggcccagtacacctccaagacatgcagcaactgtgggtttaccatcaccagcgccgactacgacagggtgctggagaagctgaagaagacagcaacaggctggatgaccacaattaacggcaaggagctgaaggtggagggccagattacctactacaacagatacaagagacagaacgtagtcaaggacctgtccgtcgagctggatagactgagcgaagaatctgtgaacaacgacatctcctcctggacaaagggcagaagcggagaagctctgagcctcctgaagaaaagattctcccatagacccgtgcaggagaagttcgtgtgcctgaactgcggcttcgagacacacgcagccgagcaagccgccctgaacatcgccagatcctggctgttcctgcggagccaggagtacaagaaataccagacaaacaagacaaccggcaacaccgataagagagccttcgtcgagacctggcagtccttttaccggaagaagcttaaggaggtgtggaaacctgccgtgcggtctggcggatctggcggaggctccacaagcatgagcctgggcagcgagctgttcagggacgtggccatcgtgttcagccaggaggagtggcagtgcctggcccccgcccagagggacctgtacagggacgtgatgctggagacctacaacaacctggtgagcctgggcctggccatcagcaagcccgacgtgatcagcttcctggagcagggcaaggagccctggatggtggagagggtggtgagcggcggcctgtgccccgtgctggagagcaccagccccaagaaaaagagaaaagtctaagctgccttctgcggggcttgccttctggccatgcccttcttctctcccttgcacctgtacctcttggtctttgaataaagcctgagtaggaaggctagcaaaaaaaaaaaaaaaaaaaaaaaaaaaaaaaaaaaaaaaaaaaaaaaaaaaaaaaaaaaaaaaaaaaaaaaaaaaaaaaa

SEQ ID NO: 6909 - RNA, 5797 nt, synthetic construct
  source 1..5797: mol_type = other RNA
aggaaataagagagaaaagaagagtaagaagaaatataagagccaccatggcccctaagaagaagcgtaaagtgagccggatggaacgcctcgtctacgaggtgcggcagaagtgcagaaacatcgaggacatctgcatctcctgcggatctctgaacgtgaccctggagcacccactgttcatcggcggcatgtgccagaactgtaaaaactgttttctggagtgtgcctatcaatacgacgatgacggctaccagagctactgcaccatctgttgcggcggaagagaggtgctgatgtgtggaaataacaactgctgccggtgcttctgcgtggaatgcgtggacctgctggtgggccccggcgccgcccaggccgctattaaggaagatccttggaactgctacatgtgcggccacaagggcacatacggcctgctgagacggagagaggactggcctagcagactgcagatgttcttcgccaataaccacgaccaggagttcgacccccctaaggtgtaccctcccgtccccgccgagaagagaaagcccatccgggtcctgagcctgttcgatggcatcgccaccggtctgctggtgctgaaggacctgggcatccaggtggataggtacattgcctccgaggtgtgcgaggactccatcaccgtgggaatggtgcgtcatcagggcaagatcatgtacgtgggcgacgtgcggagcgtgacacagaagcatatccaggagtggggccctttcgacctggtgatcggcggcagcccttgcaatgacctgagcatcgtgaacccagcccggaagggcctgtacgagggaaccggcagactgttcttcgagttttacagactgctgcacgacgcccggcctaaggaaggcgacgaccggcccttcttttggctgttcgagaatgtggtggccatgggagtcagcgacaagcgggatattagccggttcctggagagcaaccccgtgatgatcgatgccaaggaagtgagcgccgcccaccgggccagatacttctggggcaatctgcctggcatgaacagacccctggccagcaccgtgaacgacaagctggagctgcaggagtgcctggagcacggccggatcgccaagttcagcaaggtgagaaccatcaccacccgaagcaacagcatcaaacaaggcaaggaccagcactttcctgtgttcatgaacgagaaggaggacatcctgtggtgtaccgagatggagagagtgttcgggttcccagtccactacacagatgtcagcaacatgtctagactggccagacagagactgctgggaagaagctggtccgtccctgtgatcagacacctgttcgcccctctgaaggagtacttcgcctgcgtgagcagcggcaacagcaacgccaacagccggggccccagcttctctagcggcctggtgccactgtccctgagagggagccacatgggccccatggagatctacaaaaccgtgagcgcctggaagcggcagcctgtgcgcgtgctgagcctgtttcggaatatcgataaagtcctgaaaagcctgggattcctggagagcggctctggctccggcggtggcaccctgaagtacgtggaggatgtgacaaacgtggtcagacgggatgtggagaagtggggccccttcgatctggtgtacggcagcacccaacccctgggcagctcttgtgaccggtgccctggctggtacatgtttcagttccaccggatcctgcagtacgccctgccgagacaggagtcccagcggccattcttttggattttcatggacaacttgctgctgaccgaggatgaccaggaaactaccactcggttcctgcagaccgaagccgtgaccctgcaggacgtgagaggccgggactaccagaacgccatgcgggtgtggtccaacatccctggactgaaaagcaagcacgcacctctgacccctaaagaagaggagtacctgcaggcccaggtgcggagcagaagcaagctggacgcccctaaggtggatctgctggtgaagaattgcctcctgcccctgagagagtacttcaagtatttcagccagaatagtctgcccctgggcggcccaagcagcggcgcccctcctcccagcggcggcagcccagccggctccccaacctctaccgaggagggcacctctgagtccgccacccccgagagcggccctggcacctccaccgagcccagcgagggcagcgcacccggcagccctgccggcagccccacctccacagaggagggaaccagcaccgagcccagcgaaggcagcgccccaggcaccagcaccgagcctagtgagggcggctctggcggcggcagcgcccaggagattaaacggatcaacaagatcagaagaagacttgtgaaagacagcaacaccaagaaggccggcaagacaggccccatgaaaaccctgctggttagagtgatgacacccgatctgagagagcggctggaaaacctgagaaagaagcctgaaaatatcccccagcccatcagcaatacatctagagccaacctgaataagctgctgaccgattacaccgaaatgaagaaggcgatcctgcatgtgtactgggaagagttccagaaggaccctgtgggcctgatgagccgggtggcccagcctgccagcaagaagatcgatcagaacaagctgaaacctgagatggacgagaagggcaacctgaccaccgccggctttgcctgctctcagtgtggccagcccctgttcgtgtacaagctggagcaggtgtctgagaagggcaaggcttacaccaactacttcggacggtgcaatgtggccgagcacgaaaagctgatcctgctggcccagctgaagcccgagaaggatagcgacgaagccgtgacatatagcctgggaaagtttgggcagagggccctggatttctacagcattcatgtgaccaaggagtccacccaccccgtgaagcccctggcccagatcgccggaaacagatacgcctccggacctgtgggaaaggccctgagcgacgcatgtatgggcacaatcgcctccttcctgtctaagtaccaggacatcatcatcgaacaccagaaggtggtgaagggcaaccagaagagactggagagcctgcgggagctggccggcaaggaaaacctggaataccctagcgtgaccctgccacctcagcctcacaccaaggagggcgttgatgcctacaacgaagtgatcgcccgggtgcgaatgtgggtgaacctgaacctgtggcagaagctgaagctaagcagagatgatgccaagcctctgctgagactgaagggattcccttcctttcctctggtcgagagacaggccaacgaagtggactggtgggacatggtgtgtaacgtgaagaagctgatcaacgagaaaaaggaggatggcaaggtgttttggcagaatctggctggctacaagagacaggaagccctgagaccatacctgagcagcgaggaagatcggaagaagggaaagaaattcgctcggtaccagctgggcgacctgctgctgcacctggaaaagaagcacggcgaggactggggaaaggtgtacgacgaggcctgggagcggattgacaagaaagtggaaggcctgagcaagcacatcaagctggaagaggaacggagaagcgaggacgcccagagcaaggccgccctgaccgactggctgcgggctaaggccagcttcgtgatcgagggcctgaaggaggccgacaaggacgagttctgcagatgcgagctgaagctgcagaagtggtacggggacctgcggggaaagcccttcgccatcgaagccgagaacagcatcctggacatcagcggcttcagcaagcagtacaactgtgccttcatctggcagaaggacggcgtgaagaagctgaacctgtacctgatcatcaactacttcaagggcggcaagctgcggttcaagaagatcaaacctgaagccttcgaagccaacagattctacaccgtgatcaacaaaaagagcggcgagatcgtgcccatggaggtgaacttcaacttcgacgaccccaacctgatcatcctgcctctggcctttggcaagagacagggcagagaattcatctggaacgacctgctgtccctggaaaccggcagcctgaagctggccaacggaagagtgatcgagaagacactgtacaacagaagaacccggcaggatgagcctgccctgttcgtggccctgaccttcgagcggcgggaggtcctggactcctccaatatcaaaccaatgaacctgatcggcgtggcaagaggcgaaaacatccccgccgtgatcgccctgaccgaccccgagggctgcccactgagccggtttaaggatagcctgggaaacccaacccacatcctgagaatcggcgagagctataaggagaagcagcggaccatccaggccaagaaggaggtggagcagcggagagccggcggctacagccggaagtacgccagcaaagccaagaatctggcagacgatatggtgagaaacaccgctagagatctgctgtactacgccgtgacccaggatgccatgctgatcttcgccaacctgagccggggcttcggccggcagggcaagcggaccttcatggccgagagacagtacacacggatggaggactggctgaccgccaagctggcctacgagggcctgagcaagacctacctgtccaagacactggcccagtacacctccaagacatgcagcaactgtgggtttaccatcaccagcgccgactacgacagggtgctggagaagctgaagaagacagcaacaggctggatgaccacaattaacggcaaggagctgaaggtggagggccagattacctactacaacagatacaagagacagaacgtagtcaaggacctgtccgtcgagctggatagactgagcgaagaatctgtgaacaacgacatctcctcctggacaaagggcagaagcggagaagctctgagcctcctgaagaaaagattctcccatagacccgtgcaggagaagttcgtgtgcctgaactgcggcttcgagacacacgcagccgagcaagccgccctgaacatcgccagatcctggctgttcctgcggagccaggagtacaagaaataccagacaaacaagacaaccggcaacaccgataagagagccttcgtcgagacctggcagtccttttaccggaagaagcttaaggaggtgtggaaacctgccgtgcggtctggcggatctggcggaggctccacaagcatgctgcagaccgtgtggttccaggagcccgtgaccttcgaggacgtggccgtgtacttcacccagaacgagtgggccagcctgcaccccacccagagggccctgtacagggaggtgatgctggagaactacgccaacgtgaccagcctgagcgccttccccttccccaagcccgacctgatcttccagctggagcagggcgaggccgcctggggccccgacccctggaccctggccggcggcaccagccccaagaaaaagagaaaagtctaagctgccttctgcggggcttgccttctggccatgcccttcttctctcccttgcacctgtacctcttggtctttgaataaagcctgagtaggaaggctagcaaaaaaaaaaaaaaaaaaaaaaaaaaaaaaaaaaaaaaaaaaaaaaaaaaaaaaaaaaaaaaaaaaaaaaaaaaaaaaaa

SEQ ID NO: 6910 - RNA, 5797 nt, synthetic construct
  source 1..5797: mol_type = other RNA
aggaaataagagagaaaagaagagtaagaagaaatataagagccaccatggcccctaagaagaagcgtaaagtgagccggatggaacgcctcgtctacgaggtgcggcagaagtgcagaaacatcgaggacatctgcatctcctgcggatctctgaacgtgaccctggagcacccactgttcatcggcggcatgtgccagaactgtaaaaactgttttctggagtgtgcctatcaatacgacgatgacggctaccagagctactgcaccatctgttgcggcggaagagaggtgctgatgtgtggaaataacaactgctgccggtgcttctgcgtggaatgcgtggacctgctggtgggccccggcgccgcccaggccgctattaaggaagatccttggaactgctacatgtgcggccacaagggcacatacggcctgctgagacggagagaggactggcctagcagactgcagatgttcttcgccaataaccacgaccaggagttcgacccccctaaggtgtaccctcccgtccccgccgagaagagaaagcccatccgggtcctgagcctgttcgatggcatcgccaccggtctgctggtgctgaaggacctgggcatccaggtggataggtacattgcctccgaggtgtgcgaggactccatcaccgtgggaatggtgcgtcatcagggcaagatcatgtacgtgggcgacgtgcggagcgtgacacagaagcatatccaggagtggggccctttcgacctggtgatcggcggcagcccttgcaatgacctgagcatcgtgaacccagcccggaagggcctgtacgagggaaccggcagactgttcttcgagttttacagactgctgcacgacgcccggcctaaggaaggcgacgaccggcccttcttttggctgttcgagaatgtggtggccatgggagtcagcgacaagcgggatattagccggttcctggagagcaaccccgtgatgatcgatgccaaggaagtgagcgccgcccaccgggccagatacttctggggcaatctgcctggcatgaacagacccctggccagcaccgtgaacgacaagctggagctgcaggagtgcctggagcacggccggatcgccaagttcagcaaggtgagaaccatcaccacccgaagcaacagcatcaaacaaggcaaggaccagcactttcctgtgttcatgaacgagaaggaggacatcctgtggtgtaccgagatggagagagtgttcgggttcccagtccactacacagatgtcagcaacatgtctagactggccagacagagactgctgggaagaagctggtccgtccctgtgatcagacacctgttcgcccctctgaaggagtacttcgcctgcgtgagcagcggcaacagcaacgccaacagccggggccccagcttctctagcggcctggtgccactgtccctgagagggagccacatgggccccatggagatctacaaaaccgtgagcgcctggaagcggcagcctgtgcgcgtgctgagcctgtttcggaatatcgataaagtcctgaaaagcctgggattcctggagagcggctctggctccggcggtggcaccctgaagtacgtggaggatgtgacaaacgtggtcagacgggatgtggagaagtggggccccttcgatctggtgtacggcagcacccaacccctgggcagctcttgtgaccggtgccctggctggtacatgtttcagttccaccggatcctgcagtacgccctgccgagacaggagtcccagcggccattcttttggattttcatggacaacttgctgctgaccgaggatgaccaggaaactaccactcggttcctgcagaccgaagccgtgaccctgcaggacgtgagaggccgggactaccagaacgccatgcgggtgtggtccaacatccctggactgaaaagcaagcacgcacctctgacccctaaagaagaggagtacctgcaggcccaggtgcggagcagaagcaagctggacgcccctaaggtggatctgctggtgaagaattgcctcctgcccctgagagagtacttcaagtatttcagccagaatagtctgcccctgggcggcccaagcagcggcgcccctcctcccagcggcggcagcccagccggctccccaacctctaccgaggagggcacctctgagtccgccacccccgagagcggccctggcacctccaccgagcccagcgagggcagcgcacccggcagccctgccggcagccccacctccacagaggagggaaccagcaccgagcccagcgaaggcagcgccccaggcaccagcaccgagcctagtgagggcggctctggcggcggcagcgcccaggagattaaacggatcaacaagatcagaagaagacttgtgaaagacagcaacaccaagaaggccggcaagacaggccccatgaaaaccctgctggttagagtgatgacacccgatctgagagagcggctggaaaacctgagaaagaagcctgaaaatatcccccagcccatcagcaatacatctagagccaacctgaataagctgctgaccgattacaccgaaatgaagaaggcgatcctgcatgtgtactgggaagagttccagaaggaccctgtgggcctgatgagccgggtggcccagcctgccagcaagaagatcgatcagaacaagctgaaacctgagatggacgagaagggcaacctgaccaccgccggctttgcctgctctcagtgtggccagcccctgttcgtgtacaagctggagcaggtgtctgagaagggcaaggcttacaccaactacttcggacggtgcaatgtggccgagcacgaaaagctgatcctgctggcccagctgaagcccgagaaggatagcgacgaagccgtgacatatagcctgggaaagtttgggcagagggccctggatttctacagcattcatgtgaccaaggagtccacccaccccgtgaagcccctggcccagatcgccggaaacagatacgcctccggacctgtgggaaaggccctgagcgacgcatgtatgggcacaatcgcctccttcctgtctaagtaccaggacatcatcatcgaacaccagaaggtggtgaagggcaaccagaagagactggagagcctgcgggagctggccggcaaggaaaacctggaataccctagcgtgaccctgccacctcagcctcacaccaaggagggcgttgatgcctacaacgaagtgatcgcccgggtgcgaatgtgggtgaacctgaacctgtggcagaagctgaagctaagcagagatgatgccaagcctctgctgagactgaagggattcccttcctttcctctggtcgagagacaggccaacgaagtggactggtgggacatggtgtgtaacgtgaagaagctgatcaacgagaaaaaggaggatggcaaggtgttttggcagaatctggctggctacaagagacaggaagccctgagaccatacctgagcagcgaggaagatcggaagaagggaaagaaattcgctcggtaccagctgggcgacctgctgctgcacctggaaaagaagcacggcgaggactggggaaaggtgtacgacgaggcctgggagcggattgacaagaaagtggaaggcctgagcaagcacatcaagctggaagaggaacggagaagcgaggacgcccagagcaaggccgccctgaccgactggctgcgggctaaggccagcttcgtgatcgagggcctgaaggaggccgacaaggacgagttctgcagatgcgagctgaagctgcagaagtggtacggggacctgcggggaaagcccttcgccatcgaagccgagaacagcatcctggacatcagcggcttcagcaagcagtacaactgtgccttcatctggcagaaggacggcgtgaagaagctgaacctgtacctgatcatcaactacttcaagggcggcaagctgcggttcaagaagatcaaacctgaagccttcgaagccaacagattctacaccgtgatcaacaaaaagagcggcgagatcgtgcccatggaggtgaacttcaacttcgacgaccccaacctgatcatcctgcctctggcctttggcaagagacagggcagagaattcatctggaacgacctgctgtccctggaaaccggcagcctgaagctggccaacggaagagtgatcgagaagacactgtacaacagaagaacccggcaggatgagcctgccctgttcgtggccctgaccttcgagcggcgggaggtcctggactcctccaatatcaaaccaatgaacctgatcggcgtggcaagaggcgaaaacatccccgccgtgatcgccctgaccgaccccgagggctgcccactgagccggtttaaggatagcctgggaaacccaacccacatcctgagaatcggcgagagctataaggagaagcagcggaccatccaggccaagaaggaggtggagcagcggagagccggcggctacagccggaagtacgccagcaaagccaagaatctggcagacgatatggtgagaaacaccgctagagatctgctgtactacgccgtgacccaggatgccatgctgatcttcgccaacctgagccggggcttcggccggcagggcaagcggaccttcatggccgagagacagtacacacggatggaggactggctgaccgccaagctggcctacgagggcctgagcaagacctacctgtccaagacactggcccagtacacctccaagacatgcagcaactgtgggtttaccatcaccagcgccgactacgacagggtgctggagaagctgaagaagacagcaacaggctggatgaccacaattaacggcaaggagctgaaggtggagggccagattacctactacaacagatacaagagacagaacgtagtcaaggacctgtccgtcgagctggatagactgagcgaagaatctgtgaacaacgacatctcctcctggacaaagggcagaagcggagaagctctgagcctcctgaagaaaagattctcccatagacccgtgcaggagaagttcgtgtgcctgaactgcggcttcgagacacacgcagccgagcaagccgccctgaacatcgccagatcctggctgttcctgcggagccaggagtacaagaaataccagacaaacaagacaaccggcaacaccgataagagagccttcgtcgagacctggcagtccttttaccggaagaagcttaaggaggtgtggaaacctgccgtgcggtctggcggatctggcggaggctccacaagcttccaggagctggtgaccttcgaggacgtgtgcgtggacttcaccagcgaggagctgagctgcctgagcaccagccagaggaccctgtacagggaggtgatgctggagaactacaggaacctggtgagcctgggccaccagttcagcaagcccgagctgatcagcaggctggaggaggaggagttccaggccatggccgccgacagcagcgccgtggccggcgacagcggcgccgtggccggcaccagccccaagaaaaagagaaaagtctaagctgccttctgcggggcttgccttctggccatgcccttcttctctcccttgcacctgtacctcttggtctttgaataaagcctgagtaggaaggctagcaaaaaaaaaaaaaaaaaaaaaaaaaaaaaaaaaaaaaaaaaaaaaaaaaaaaaaaaaaaaaaaaaaaaaaaaaaaaaaaa

SEQ ID NO: 6911 - RNA, 5797 nt, synthetic construct
  source 1..5797: mol_type = other RNA
aggaaataagagagaaaagaagagtaagaagaaatataagagccaccatggcccctaagaagaagcgtaaagtgagccggatggaacgcctcgtctacgaggtgcggcagaagtgcagaaacatcgaggacatctgcatctcctgcggatctctgaacgtgaccctggagcacccactgttcatcggcggcatgtgccagaactgtaaaaactgttttctggagtgtgcctatcaatacgacgatgacggctaccagagctactgcaccatctgttgcggcggaagagaggtgctgatgtgtggaaataacaactgctgccggtgcttctgcgtggaatgcgtggacctgctggtgggccccggcgccgcccaggccgctattaaggaagatccttggaactgctacatgtgcggccacaagggcacatacggcctgctgagacggagagaggactggcctagcagactgcagatgttcttcgccaataaccacgaccaggagttcgacccccctaaggtgtaccctcccgtccccgccgagaagagaaagcccatccgggtcctgagcctgttcgatggcatcgccaccggtctgctggtgctgaaggacctgggcatccaggtggataggtacattgcctccgaggtgtgcgaggactccatcaccgtgggaatggtgcgtcatcagggcaagatcatgtacgtgggcgacgtgcggagcgtgacacagaagcatatccaggagtggggccctttcgacctggtgatcggcggcagcccttgcaatgacctgagcatcgtgaacccagcccggaagggcctgtacgagggaaccggcagactgttcttcgagttttacagactgctgcacgacgcccggcctaaggaaggcgacgaccggcccttcttttggctgttcgagaatgtggtggccatgggagtcagcgacaagcgggatattagccggttcctggagagcaaccccgtgatgatcgatgccaaggaagtgagcgccgcccaccgggccagatacttctggggcaatctgcctggcatgaacagacccctggccagcaccgtgaacgacaagctggagctgcaggagtgcctggagcacggccggatcgccaagttcagcaaggtgagaaccatcaccacccgaagcaacagcatcaaacaaggcaaggaccagcactttcctgtgttcatgaacgagaaggaggacatcctgtggtgtaccgagatggagagagtgttcgggttcccagtccactacacagatgtcagcaacatgtctagactggccagacagagactgctgggaagaagctggtccgtccctgtgatcagacacctgttcgcccctctgaaggagtacttcgcctgcgtgagcagcggcaacagcaacgccaacagccggggccccagcttctctagcggcctggtgccactgtccctgagagggagccacatgggccccatggagatctacaaaaccgtgagcgcctggaagcggcagcctgtgcgcgtgctgagcctgtttcggaatatcgataaagtcctgaaaagcctgggattcctggagagcggctctggctccggcggtggcaccctgaagtacgtggaggatgtgacaaacgtggtcagacgggatgtggagaagtggggccccttcgatctggtgtacggcagcacccaacccctgggcagctcttgtgaccggtgccctggctggtacatgtttcagttccaccggatcctgcagtacgccctgccgagacaggagtcccagcggccattcttttggattttcatggacaacttgctgctgaccgaggatgaccaggaaactaccactcggttcctgcagaccgaagccgtgaccctgcaggacgtgagaggccgggactaccagaacgccatgcgggtgtggtccaacatccctggactgaaaagcaagcacgcacctctgacccctaaagaagaggagtacctgcaggcccaggtgcggagcagaagcaagctggacgcccctaaggtggatctgctggtgaagaattgcctcctgcccctgagagagtacttcaagtatttcagccagaatagtctgcccctgggcggcccaagcagcggcgcccctcctcccagcggcggcagcccagccggctccccaacctctaccgaggagggcacctctgagtccgccacccccgagagcggccctggcacctccaccgagcccagcgagggcagcgcacccggcagccctgccggcagccccacctccacagaggagggaaccagcaccgagcccagcgaaggcagcgccccaggcaccagcaccgagcctagtgagggcggctctggcggcggcagcgcccaggagattaaacggatcaacaagatcagaagaagacttgtgaaagacagcaacaccaagaaggccggcaagacaggccccatgaaaaccctgctggttagagtgatgacacccgatctgagagagcggctggaaaacctgagaaagaagcctgaaaatatcccccagcccatcagcaatacatctagagccaacctgaataagctgctgaccgattacaccgaaatgaagaaggcgatcctgcatgtgtactgggaagagttccagaaggaccctgtgggcctgatgagccgggtggcccagcctgccagcaagaagatcgatcagaacaagctgaaacctgagatggacgagaagggcaacctgaccaccgccggctttgcctgctctcagtgtggccagcccctgttcgtgtacaagctggagcaggtgtctgagaagggcaaggcttacaccaactacttcggacggtgcaatgtggccgagcacgaaaagctgatcctgctggcccagctgaagcccgagaaggatagcgacgaagccgtgacatatagcctgggaaagtttgggcagagggccctggatttctacagcattcatgtgaccaaggagtccacccaccccgtgaagcccctggcccagatcgccggaaacagatacgcctccggacctgtgggaaaggccctgagcgacgcatgtatgggcacaatcgcctccttcctgtctaagtaccaggacatcatcatcgaacaccagaaggtggtgaagggcaaccagaagagactggagagcctgcgggagctggccggcaaggaaaacctggaataccctagcgtgaccctgccacctcagcctcacaccaaggagggcgttgatgcctacaacgaagtgatcgcccgggtgcgaatgtgggtgaacctgaacctgtggcagaagctgaagctaagcagagatgatgccaagcctctgctgagactgaagggattcccttcctttcctctggtcgagagacaggccaacgaagtggactggtgggacatggtgtgtaacgtgaagaagctgatcaacgagaaaaaggaggatggcaaggtgttttggcagaatctggctggctacaagagacaggaagccctgagaccatacctgagcagcgaggaagatcggaagaagggaaagaaattcgctcggtaccagctgggcgacctgctgctgcacctggaaaagaagcacggcgaggactggggaaaggtgtacgacgaggcctgggagcggattgacaagaaagtggaaggcctgagcaagcacatcaagctggaagaggaacggagaagcgaggacgcccagagcaaggccgccctgaccgactggctgcgggctaaggccagcttcgtgatcgagggcctgaaggaggccgacaaggacgagttctgcagatgcgagctgaagctgcagaagtggtacggggacctgcggggaaagcccttcgccatcgaagccgagaacagcatcctggacatcagcggcttcagcaagcagtacaactgtgccttcatctggcagaaggacggcgtgaagaagctgaacctgtacctgatcatcaactacttcaagggcggcaagctgcggttcaagaagatcaaacctgaagccttcgaagccaacagattctacaccgtgatcaacaaaaagagcggcgagatcgtgcccatggaggtgaacttcaacttcgacgaccccaacctgatcatcctgcctctggcctttggcaagagacagggcagagaattcatctggaacgacctgctgtccctggaaaccggcagcctgaagctggccaacggaagagtgatcgagaagacactgtacaacagaagaacccggcaggatgagcctgccctgttcgtggccctgaccttcgagcggcgggaggtcctggactcctccaatatcaaaccaatgaacctgatcggcgtggcaagaggcgaaaacatccccgccgtgatcgccctgaccgaccccgagggctgcccactgagccggtttaaggatagcctgggaaacccaacccacatcctgagaatcggcgagagctataaggagaagcagcggaccatccaggccaagaaggaggtggagcagcggagagccggcggctacagccggaagtacgccagcaaagccaagaatctggcagacgatatggtgagaaacaccgctagagatctgctgtactacgccgtgacccaggatgccatgctgatcttcgccaacctgagccggggcttcggccggcagggcaagcggaccttcatggccgagagacagtacacacggatggaggactggctgaccgccaagctggcctacgagggcctgagcaagacctacctgtccaagacactggcccagtacacctccaagacatgcagcaactgtgggtttaccatcaccagcgccgactacgacagggtgctggagaagctgaagaagacagcaacaggctggatgaccacaattaacggcaaggagctgaaggtggagggccagattacctactacaacagatacaagagacagaacgtagtcaaggacctgtccgtcgagctggatagactgagcgaagaatctgtgaacaacgacatctcctcctggacaaagggcagaagcggagaagctctgagcctcctgaagaaaagattctcccatagacccgtgcaggagaagttcgtgtgcctgaactgcggcttcgagacacacgcagccgagcaagccgccctgaacatcgccagatcctggctgttcctgcggagccaggagtacaagaaataccagacaaacaagacaaccggcaacaccgataagagagccttcgtcgagacctggcagtccttttaccggaagaagcttaaggaggtgtggaaacctgccgtgcggtctggcggatctggcggaggctccacaagcatgaacatggagggcctggtgatgttccaggacctgagcatcgacttcagccaggaggagtgggagtgcctggacgccgcccagaaggacctgtacagggacgtgatgatggagaactacagcagcctggtgagcctgggcctgagcatccccaagcccgacgtgatcagcctgctggagcagggcaaggagccctggatggtgagcagggacatgctgggcggctggtgccccgacagcgagaccagccccaagaaaaagagaaaagtctaagctgccttctgcggggcttgccttctggccatgcccttcttctctcccttgcacctgtacctcttggtctttgaataaagcctgagtaggaaggctagcaaaaaaaaaaaaaaaaaaaaaaaaaaaaaaaaaaaaaaaaaaaaaaaaaaaaaaaaaaaaaaaaaaaaaaaaaaaaaaaa

SEQ ID NO: 6912 - RNA, 5797 nt, synthetic construct
  source 1..5797: mol_type = other RNA
aggaaataagagagaaaagaagagtaagaagaaatataagagccaccatggcccctaagaagaagcgtaaagtgagccggatggaacgcctcgtctacgaggtgcggcagaagtgcagaaacatcgaggacatctgcatctcctgcggatctctgaacgtgaccctggagcacccactgttcatcggcggcatgtgccagaactgtaaaaactgttttctggagtgtgcctatcaatacgacgatgacggctaccagagctactgcaccatctgttgcggcggaagagaggtgctgatgtgtggaaataacaactgctgccggtgcttctgcgtggaatgcgtggacctgctggtgggccccggcgccgcccaggccgctattaaggaagatccttggaactgctacatgtgcggccacaagggcacatacggcctgctgagacggagagaggactggcctagcagactgcagatgttcttcgccaataaccacgaccaggagttcgacccccctaaggtgtaccctcccgtccccgccgagaagagaaagcccatccgggtcctgagcctgttcgatggcatcgccaccggtctgctggtgctgaaggacctgggcatccaggtggataggtacattgcctccgaggtgtgcgaggactccatcaccgtgggaatggtgcgtcatcagggcaagatcatgtacgtgggcgacgtgcggagcgtgacacagaagcatatccaggagtggggccctttcgacctggtgatcggcggcagcccttgcaatgacctgagcatcgtgaacccagcccggaagggcctgtacgagggaaccggcagactgttcttcgagttttacagactgctgcacgacgcccggcctaaggaaggcgacgaccggcccttcttttggctgttcgagaatgtggtggccatgggagtcagcgacaagcgggatattagccggttcctggagagcaaccccgtgatgatcgatgccaaggaagtgagcgccgcccaccgggccagatacttctggggcaatctgcctggcatgaacagacccctggccagcaccgtgaacgacaagctggagctgcaggagtgcctggagcacggccggatcgccaagttcagcaaggtgagaaccatcaccacccgaagcaacagcatcaaacaaggcaaggaccagcactttcctgtgttcatgaacgagaaggaggacatcctgtggtgtaccgagatggagagagtgttcgggttcccagtccactacacagatgtcagcaacatgtctagactggccagacagagactgctgggaagaagctggtccgtccctgtgatcagacacctgttcgcccctctgaaggagtacttcgcctgcgtgagcagcggcaacagcaacgccaacagccggggccccagcttctctagcggcctggtgccactgtccctgagagggagccacatgggccccatggagatctacaaaaccgtgagcgcctggaagcggcagcctgtgcgcgtgctgagcctgtttcggaatatcgataaagtcctgaaaagcctgggattcctggagagcggctctggctccggcggtggcaccctgaagtacgtggaggatgtgacaaacgtggtcagacgggatgtggagaagtggggccccttcgatctggtgtacggcagcacccaacccctgggcagctcttgtgaccggtgccctggctggtacatgtttcagttccaccggatcctgcagtacgccctgccgagacaggagtcccagcggccattcttttggattttcatggacaacttgctgctgaccgaggatgaccaggaaactaccactcggttcctgcagaccgaagccgtgaccctgcaggacgtgagaggccgggactaccagaacgccatgcgggtgtggtccaacatccctggactgaaaagcaagcacgcacctctgacccctaaagaagaggagtacctgcaggcccaggtgcggagcagaagcaagctggacgcccctaaggtggatctgctggtgaagaattgcctcctgcccctgagagagtacttcaagtatttcagccagaatagtctgcccctgggcggcccaagcagcggcgcccctcctcccagcggcggcagcccagccggctccccaacctctaccgaggagggcacctctgagtccgccacccccgagagcggccctggcacctccaccgagcccagcgagggcagcgcacccggcagccctgccggcagccccacctccacagaggagggaaccagcaccgagcccagcgaaggcagcgccccaggcaccagcaccgagcctagtgagggcggctctggcggcggcagcgcccaggagattaaacggatcaacaagatcagaagaagacttgtgaaagacagcaacaccaagaaggccggcaagacaggccccatgaaaaccctgctggttagagtgatgacacccgatctgagagagcggctggaaaacctgagaaagaagcctgaaaatatcccccagcccatcagcaatacatctagagccaacctgaataagctgctgaccgattacaccgaaatgaagaaggcgatcctgcatgtgtactgggaagagttccagaaggaccctgtgggcctgatgagccgggtggcccagcctgccagcaagaagatcgatcagaacaagctgaaacctgagatggacgagaagggcaacctgaccaccgccggctttgcctgctctcagtgtggccagcccctgttcgtgtacaagctggagcaggtgtctgagaagggcaaggcttacaccaactacttcggacggtgcaatgtggccgagcacgaaaagctgatcctgctggcccagctgaagcccgagaaggatagcgacgaagccgtgacatatagcctgggaaagtttgggcagagggccctggatttctacagcattcatgtgaccaaggagtccacccaccccgtgaagcccctggcccagatcgccggaaacagatacgcctccggacctgtgggaaaggccctgagcgacgcatgtatgggcacaatcgcctccttcctgtctaagtaccaggacatcatcatcgaacaccagaaggtggtgaagggcaaccagaagagactggagagcctgcgggagctggccggcaaggaaaacctggaataccctagcgtgaccctgccacctcagcctcacaccaaggagggcgttgatgcctacaacgaagtgatcgcccgggtgcgaatgtgggtgaacctgaacctgtggcagaagctgaagctaagcagagatgatgccaagcctctgctgagactgaagggattcccttcctttcctctggtcgagagacaggccaacgaagtggactggtgggacatggtgtgtaacgtgaagaagctgatcaacgagaaaaaggaggatggcaaggtgttttggcagaatctggctggctacaagagacaggaagccctgagaccatacctgagcagcgaggaagatcggaagaagggaaagaaattcgctcggtaccagctgggcgacctgctgctgcacctggaaaagaagcacggcgaggactggggaaaggtgtacgacgaggcctgggagcggattgacaagaaagtggaaggcctgagcaagcacatcaagctggaagaggaacggagaagcgaggacgcccagagcaaggccgccctgaccgactggctgcgggctaaggccagcttcgtgatcgagggcctgaaggaggccgacaaggacgagttctgcagatgcgagctgaagctgcagaagtggtacggggacctgcggggaaagcccttcgccatcgaagccgagaacagcatcctggacatcagcggcttcagcaagcagtacaactgtgccttcatctggcagaaggacggcgtgaagaagctgaacctgtacctgatcatcaactacttcaagggcggcaagctgcggttcaagaagatcaaacctgaagccttcgaagccaacagattctacaccgtgatcaacaaaaagagcggcgagatcgtgcccatggaggtgaacttcaacttcgacgaccccaacctgatcatcctgcctctggcctttggcaagagacagggcagagaattcatctggaacgacctgctgtccctggaaaccggcagcctgaagctggccaacggaagagtgatcgagaagacactgtacaacagaagaacccggcaggatgagcctgccctgttcgtggccctgaccttcgagcggcgggaggtcctggactcctccaatatcaaaccaatgaacctgatcggcgtggcaagaggcgaaaacatccccgccgtgatcgccctgaccgaccccgagggctgcccactgagccggtttaaggatagcctgggaaacccaacccacatcctgagaatcggcgagagctataaggagaagcagcggaccatccaggccaagaaggaggtggagcagcggagagccggcggctacagccggaagtacgccagcaaagccaagaatctggcagacgatatggtgagaaacaccgctagagatctgctgtactacgccgtgacccaggatgccatgctgatcttcgccaacctgagccggggcttcggccggcagggcaagcggaccttcatggccgagagacagtacacacggatggaggactggctgaccgccaagctggcctacgagggcctgagcaagacctacctgtccaagacactggcccagtacacctccaagacatgcagcaactgtgggtttaccatcaccagcgccgactacgacagggtgctggagaagctgaagaagacagcaacaggctggatgaccacaattaacggcaaggagctgaaggtggagggccagattacctactacaacagatacaagagacagaacgtagtcaaggacctgtccgtcgagctggatagactgagcgaagaatctgtgaacaacgacatctcctcctggacaaagggcagaagcggagaagctctgagcctcctgaagaaaagattctcccatagacccgtgcaggagaagttcgtgtgcctgaactgcggcttcgagacacacgcagccgagcaagccgccctgaacatcgccagatcctggctgttcctgcggagccaggagtacaagaaataccagacaaacaagacaaccggcaacaccgataagagagccttcgtcgagacctggcagtccttttaccggaagaagcttaaggaggtgtggaaacctgccgtgcggtctggcggatctggcggaggctccacaagcagccagggcagcgtgaccttcagggacgtggccgtggacttcagcagggaggagtgggagtggctgcagcccgcccagagggacctgtacaggcacgtgatgctggagaactacggccacctggtgagcctgggcctgaacatcagcaagccccacgtggtgagcctgctggagcagggcaaggagccctggctgggcaaggacgccagcaggggcctgttcagcgccagcgagagcaacggcaccagccccaagaaaaagagaaaagtctaagctgccttctgcggggcttgccttctggccatgcccttcttctctcccttgcacctgtacctcttggtctttgaataaagcctgagtaggaaggctagcaaaaaaaaaaaaaaaaaaaaaaaaaaaaaaaaaaaaaaaaaaaaaaaaaaaaaaaaaaaaaaaaaaaaaaaaaaaaaaaa

SEQ ID NO: 6913 - RNA, 5797 nt, synthetic construct
  source 1..5797: mol_type = other RNA
aggaaataagagagaaaagaagagtaagaagaaatataagagccaccatggcccctaagaagaagcgtaaagtgagccggatggaacgcctcgtctacgaggtgcggcagaagtgcagaaacatcgaggacatctgcatctcctgcggatctctgaacgtgaccctggagcacccactgttcatcggcggcatgtgccagaactgtaaaaactgttttctggagtgtgcctatcaatacgacgatgacggctaccagagctactgcaccatctgttgcggcggaagagaggtgctgatgtgtggaaataacaactgctgccggtgcttctgcgtggaatgcgtggacctgctggtgggccccggcgccgcccaggccgctattaaggaagatccttggaactgctacatgtgcggccacaagggcacatacggcctgctgagacggagagaggactggcctagcagactgcagatgttcttcgccaataaccacgaccaggagttcgacccccctaaggtgtaccctcccgtccccgccgagaagagaaagcccatccgggtcctgagcctgttcgatggcatcgccaccggtctgctggtgctgaaggacctgggcatccaggtggataggtacattgcctccgaggtgtgcgaggactccatcaccgtgggaatggtgcgtcatcagggcaagatcatgtacgtgggcgacgtgcggagcgtgacacagaagcatatccaggagtggggccctttcgacctggtgatcggcggcagcccttgcaatgacctgagcatcgtgaacccagcccggaagggcctgtacgagggaaccggcagactgttcttcgagttttacagactgctgcacgacgcccggcctaaggaaggcgacgaccggcccttcttttggctgttcgagaatgtggtggccatgggagtcagcgacaagcgggatattagccggttcctggagagcaaccccgtgatgatcgatgccaaggaagtgagcgccgcccaccgggccagatacttctggggcaatctgcctggcatgaacagacccctggccagcaccgtgaacgacaagctggagctgcaggagtgcctggagcacggccggatcgccaagttcagcaaggtgagaaccatcaccacccgaagcaacagcatcaaacaaggcaaggaccagcactttcctgtgttcatgaacgagaaggaggacatcctgtggtgtaccgagatggagagagtgttcgggttcccagtccactacacagatgtcagcaacatgtctagactggccagacagagactgctgggaagaagctggtccgtccctgtgatcagacacctgttcgcccctctgaaggagtacttcgcctgcgtgagcagcggcaacagcaacgccaacagccggggccccagcttctctagcggcctggtgccactgtccctgagagggagccacatgggccccatggagatctacaaaaccgtgagcgcctggaagcggcagcctgtgcgcgtgctgagcctgtttcggaatatcgataaagtcctgaaaagcctgggattcctggagagcggctctggctccggcggtggcaccctgaagtacgtggaggatgtgacaaacgtggtcagacgggatgtggagaagtggggccccttcgatctggtgtacggcagcacccaacccctgggcagctcttgtgaccggtgccctggctggtacatgtttcagttccaccggatcctgcagtacgccctgccgagacaggagtcccagcggccattcttttggattttcatggacaacttgctgctgaccgaggatgaccaggaaactaccactcggttcctgcagaccgaagccgtgaccctgcaggacgtgagaggccgggactaccagaacgccatgcgggtgtggtccaacatccctggactgaaaagcaagcacgcacctctgacccctaaagaagaggagtacctgcaggcccaggtgcggagcagaagcaagctggacgcccctaaggtggatctgctggtgaagaattgcctcctgcccctgagagagtacttcaagtatttcagccagaatagtctgcccctgggcggcccaagcagcggcgcccctcctcccagcggcggcagcccagccggctccccaacctctaccgaggagggcacctctgagtccgccacccccgagagcggccctggcacctccaccgagcccagcgagggcagcgcacccggcagccctgccggcagccccacctccacagaggagggaaccagcaccgagcccagcgaaggcagcgccccaggcaccagcaccgagcctagtgagggcggctctggcggcggcagcgcccaggagattaaacggatcaacaagatcagaagaagacttgtgaaagacagcaacaccaagaaggccggcaagacaggccccatgaaaaccctgctggttagagtgatgacacccgatctgagagagcggctggaaaacctgagaaagaagcctgaaaatatcccccagcccatcagcaatacatctagagccaacctgaataagctgctgaccgattacaccgaaatgaagaaggcgatcctgcatgtgtactgggaagagttccagaaggaccctgtgggcctgatgagccgggtggcccagcctgccagcaagaagatcgatcagaacaagctgaaacctgagatggacgagaagggcaacctgaccaccgccggctttgcctgctctcagtgtggccagcccctgttcgtgtacaagctggagcaggtgtctgagaagggcaaggcttacaccaactacttcggacggtgcaatgtggccgagcacgaaaagctgatcctgctggcccagctgaagcccgagaaggatagcgacgaagccgtgacatatagcctgggaaagtttgggcagagggccctggatttctacagcattcatgtgaccaaggagtccacccaccccgtgaagcccctggcccagatcgccggaaacagatacgcctccggacctgtgggaaaggccctgagcgacgcatgtatgggcacaatcgcctccttcctgtctaagtaccaggacatcatcatcgaacaccagaaggtggtgaagggcaaccagaagagactggagagcctgcgggagctggccggcaaggaaaacctggaataccctagcgtgaccctgccacctcagcctcacaccaaggagggcgttgatgcctacaacgaagtgatcgcccgggtgcgaatgtgggtgaacctgaacctgtggcagaagctgaagctaagcagagatgatgccaagcctctgctgagactgaagggattcccttcctttcctctggtcgagagacaggccaacgaagtggactggtgggacatggtgtgtaacgtgaagaagctgatcaacgagaaaaaggaggatggcaaggtgttttggcagaatctggctggctacaagagacaggaagccctgagaccatacctgagcagcgaggaagatcggaagaagggaaagaaattcgctcggtaccagctgggcgacctgctgctgcacctggaaaagaagcacggcgaggactggggaaaggtgtacgacgaggcctgggagcggattgacaagaaagtggaaggcctgagcaagcacatcaagctggaagaggaacggagaagcgaggacgcccagagcaaggccgccctgaccgactggctgcgggctaaggccagcttcgtgatcgagggcctgaaggaggccgacaaggacgagttctgcagatgcgagctgaagctgcagaagtggtacggggacctgcggggaaagcccttcgccatcgaagccgagaacagcatcctggacatcagcggcttcagcaagcagtacaactgtgccttcatctggcagaaggacggcgtgaagaagctgaacctgtacctgatcatcaactacttcaagggcggcaagctgcggttcaagaagatcaaacctgaagccttcgaagccaacagattctacaccgtgatcaacaaaaagagcggcgagatcgtgcccatggaggtgaacttcaacttcgacgaccccaacctgatcatcctgcctctggcctttggcaagagacagggcagagaattcatctggaacgacctgctgtccctggaaaccggcagcctgaagctggccaacggaagagtgatcgagaagacactgtacaacagaagaacccggcaggatgagcctgccctgttcgtggccctgaccttcgagcggcgggaggtcctggactcctccaatatcaaaccaatgaacctgatcggcgtggcaagaggcgaaaacatccccgccgtgatcgccctgaccgaccccgagggctgcccactgagccggtttaaggatagcctgggaaacccaacccacatcctgagaatcggcgagagctataaggagaagcagcggaccatccaggccaagaaggaggtggagcagcggagagccggcggctacagccggaagtacgccagcaaagccaagaatctggcagacgatatggtgagaaacaccgctagagatctgctgtactacgccgtgacccaggatgccatgctgatcttcgccaacctgagccggggcttcggccggcagggcaagcggaccttcatggccgagagacagtacacacggatggaggactggctgaccgccaagctggcctacgagggcctgagcaagacctacctgtccaagacactggcccagtacacctccaagacatgcagcaactgtgggtttaccatcaccagcgccgactacgacagggtgctggagaagctgaagaagacagcaacaggctggatgaccacaattaacggcaaggagctgaaggtggagggccagattacctactacaacagatacaagagacagaacgtagtcaaggacctgtccgtcgagctggatagactgagcgaagaatctgtgaacaacgacatctcctcctggacaaagggcagaagcggagaagctctgagcctcctgaagaaaagattctcccatagacccgtgcaggagaagttcgtgtgcctgaactgcggcttcgagacacacgcagccgagcaagccgccctgaacatcgccagatcctggctgttcctgcggagccaggagtacaagaaataccagacaaacaagacaaccggcaacaccgataagagagccttcgtcgagacctggcagtccttttaccggaagaagcttaaggaggtgtggaaacctgccgtgcggtctggcggatctggcggaggctccacaagcatggccgccggccagagggaggccaggccccaggtgagcctgaccttcgaggacgtggccgtgctgttcaccagggacgagtggaggaagctggcccccagccagaggaacctgtacagggacgtgatgctggagaactacaggaacctggtgagcctgggcctgcccttcaccaagcccaaggtgatcagcctgctgcagcagggcgaggacccctggaaggtggagaaggacagcagcggcaccagccccaagaaaaagagaaaagtctaagctgccttctgcggggcttgccttctggccatgcccttcttctctcccttgcacctgtacctcttggtctttgaataaagcctgagtaggaaggctagcaaaaaaaaaaaaaaaaaaaaaaaaaaaaaaaaaaaaaaaaaaaaaaaaaaaaaaaaaaaaaaaaaaaaaaaaaaaaaaaa

SEQ ID NO: 6914 - RNA, 5797 nt, synthetic construct
  source 1..5797: mol_type = other RNA
aggaaataagagagaaaagaagagtaagaagaaatataagagccaccatggcccctaagaagaagcgtaaagtgagccggatggaacgcctcgtctacgaggtgcggcagaagtgcagaaacatcgaggacatctgcatctcctgcggatctctgaacgtgaccctggagcacccactgttcatcggcggcatgtgccagaactgtaaaaactgttttctggagtgtgcctatcaatacgacgatgacggctaccagagctactgcaccatctgttgcggcggaagagaggtgctgatgtgtggaaataacaactgctgccggtgcttctgcgtggaatgcgtggacctgctggtgggccccggcgccgcccaggccgctattaaggaagatccttggaactgctacatgtgcggccacaagggcacatacggcctgctgagacggagagaggactggcctagcagactgcagatgttcttcgccaataaccacgaccaggagttcgacccccctaaggtgtaccctcccgtccccgccgagaagagaaagcccatccgggtcctgagcctgttcgatggcatcgccaccggtctgctggtgctgaaggacctgggcatccaggtggataggtacattgcctccgaggtgtgcgaggactccatcaccgtgggaatggtgcgtcatcagggcaagatcatgtacgtgggcgacgtgcggagcgtgacacagaagcatatccaggagtggggccctttcgacctggtgatcggcggcagcccttgcaatgacctgagcatcgtgaacccagcccggaagggcctgtacgagggaaccggcagactgttcttcgagttttacagactgctgcacgacgcccggcctaaggaaggcgacgaccggcccttcttttggctgttcgagaatgtggtggccatgggagtcagcgacaagcgggatattagccggttcctggagagcaaccccgtgatgatcgatgccaaggaagtgagcgccgcccaccgggccagatacttctggggcaatctgcctggcatgaacagacccctggccagcaccgtgaacgacaagctggagctgcaggagtgcctggagcacggccggatcgccaagttcagcaaggtgagaaccatcaccacccgaagcaacagcatcaaacaaggcaaggaccagcactttcctgtgttcatgaacgagaaggaggacatcctgtggtgtaccgagatggagagagtgttcgggttcccagtccactacacagatgtcagcaacatgtctagactggccagacagagactgctgggaagaagctggtccgtccctgtgatcagacacctgttcgcccctctgaaggagtacttcgcctgcgtgagcagcggcaacagcaacgccaacagccggggccccagcttctctagcggcctggtgccactgtccctgagagggagccacatgggccccatggagatctacaaaaccgtgagcgcctggaagcggcagcctgtgcgcgtgctgagcctgtttcggaatatcgataaagtcctgaaaagcctgggattcctggagagcggctctggctccggcggtggcaccctgaagtacgtggaggatgtgacaaacgtggtcagacgggatgtggagaagtggggccccttcgatctggtgtacggcagcacccaacccctgggcagctcttgtgaccggtgccctggctggtacatgtttcagttccaccggatcctgcagtacgccctgccgagacaggagtcccagcggccattcttttggattttcatggacaacttgctgctgaccgaggatgaccaggaaactaccactcggttcctgcagaccgaagccgtgaccctgcaggacgtgagaggccgggactaccagaacgccatgcgggtgtggtccaacatccctggactgaaaagcaagcacgcacctctgacccctaaagaagaggagtacctgcaggcccaggtgcggagcagaagcaagctggacgcccctaaggtggatctgctggtgaagaattgcctcctgcccctgagagagtacttcaagtatttcagccagaatagtctgcccctgggcggcccaagcagcggcgcccctcctcccagcggcggcagcccagccggctccccaacctctaccgaggagggcacctctgagtccgccacccccgagagcggccctggcacctccaccgagcccagcgagggcagcgcacccggcagccctgccggcagccccacctccacagaggagggaaccagcaccgagcccagcgaaggcagcgccccaggcaccagcaccgagcctagtgagggcggctctggcggcggcagcgcccaggagattaaacggatcaacaagatcagaagaagacttgtgaaagacagcaacaccaagaaggccggcaagacaggccccatgaaaaccctgctggttagagtgatgacacccgatctgagagagcggctggaaaacctgagaaagaagcctgaaaatatcccccagcccatcagcaatacatctagagccaacctgaataagctgctgaccgattacaccgaaatgaagaaggcgatcctgcatgtgtactgggaagagttccagaaggaccctgtgggcctgatgagccgggtggcccagcctgccagcaagaagatcgatcagaacaagctgaaacctgagatggacgagaagggcaacctgaccaccgccggctttgcctgctctcagtgtggccagcccctgttcgtgtacaagctggagcaggtgtctgagaagggcaaggcttacaccaactacttcggacggtgcaatgtggccgagcacgaaaagctgatcctgctggcccagctgaagcccgagaaggatagcgacgaagccgtgacatatagcctgggaaagtttgggcagagggccctggatttctacagcattcatgtgaccaaggagtccacccaccccgtgaagcccctggcccagatcgccggaaacagatacgcctccggacctgtgggaaaggccctgagcgacgcatgtatgggcacaatcgcctccttcctgtctaagtaccaggacatcatcatcgaacaccagaaggtggtgaagggcaaccagaagagactggagagcctgcgggagctggccggcaaggaaaacctggaataccctagcgtgaccctgccacctcagcctcacaccaaggagggcgttgatgcctacaacgaagtgatcgcccgggtgcgaatgtgggtgaacctgaacctgtggcagaagctgaagctaagcagagatgatgccaagcctctgctgagactgaagggattcccttcctttcctctggtcgagagacaggccaacgaagtggactggtgggacatggtgtgtaacgtgaagaagctgatcaacgagaaaaaggaggatggcaaggtgttttggcagaatctggctggctacaagagacaggaagccctgagaccatacctgagcagcgaggaagatcggaagaagggaaagaaattcgctcggtaccagctgggcgacctgctgctgcacctggaaaagaagcacggcgaggactggggaaaggtgtacgacgaggcctgggagcggattgacaagaaagtggaaggcctgagcaagcacatcaagctggaagaggaacggagaagcgaggacgcccagagcaaggccgccctgaccgactggctgcgggctaaggccagcttcgtgatcgagggcctgaaggaggccgacaaggacgagttctgcagatgcgagctgaagctgcagaagtggtacggggacctgcggggaaagcccttcgccatcgaagccgagaacagcatcctggacatcagcggcttcagcaagcagtacaactgtgccttcatctggcagaaggacggcgtgaagaagctgaacctgtacctgatcatcaactacttcaagggcggcaagctgcggttcaagaagatcaaacctgaagccttcgaagccaacagattctacaccgtgatcaacaaaaagagcggcgagatcgtgcccatggaggtgaacttcaacttcgacgaccccaacctgatcatcctgcctctggcctttggcaagagacagggcagagaattcatctggaacgacctgctgtccctggaaaccggcagcctgaagctggccaacggaagagtgatcgagaagacactgtacaacagaagaacccggcaggatgagcctgccctgttcgtggccctgaccttcgagcggcgggaggtcctggactcctccaatatcaaaccaatgaacctgatcggcgtggcaagaggcgaaaacatccccgccgtgatcgccctgaccgaccccgagggctgcccactgagccggtttaaggatagcctgggaaacccaacccacatcctgagaatcggcgagagctataaggagaagcagcggaccatccaggccaagaaggaggtggagcagcggagagccggcggctacagccggaagtacgccagcaaagccaagaatctggcagacgatatggtgagaaacaccgctagagatctgctgtactacgccgtgacccaggatgccatgctgatcttcgccaacctgagccggggcttcggccggcagggcaagcggaccttcatggccgagagacagtacacacggatggaggactggctgaccgccaagctggcctacgagggcctgagcaagacctacctgtccaagacactggcccagtacacctccaagacatgcagcaactgtgggtttaccatcaccagcgccgactacgacagggtgctggagaagctgaagaagacagcaacaggctggatgaccacaattaacggcaaggagctgaaggtggagggccagattacctactacaacagatacaagagacagaacgtagtcaaggacctgtccgtcgagctggatagactgagcgaagaatctgtgaacaacgacatctcctcctggacaaagggcagaagcggagaagctctgagcctcctgaagaaaagattctcccatagacccgtgcaggagaagttcgtgtgcctgaactgcggcttcgagacacacgcagccgagcaagccgccctgaacatcgccagatcctggctgttcctgcggagccaggagtacaagaaataccagacaaacaagacaaccggcaacaccgataagagagccttcgtcgagacctggcagtccttttaccggaagaagcttaaggaggtgtggaaacctgccgtgcggtctggcggatctggcggaggctccacaagcagcagccagaccctgctgaccttcagggacgtggccatcgagttcagccaggaggagtggggctgcctgaaccacagccagagggagctgtacagggacgtgatgctggagacctacggccacctgctgttcctgggcctggtgagcaagcccgacctggtgatcgtgctggagcagaagaaggagctgtggggcgtgaagaggaaggagaccgtggccagccaccccgccgtgagcagccagaccagccccaagaaaaagagaaaagtctaagctgccttctgcggggcttgccttctggccatgcccttcttctctcccttgcacctgtacctcttggtctttgaataaagcctgagtaggaaggctagcaaaaaaaaaaaaaaaaaaaaaaaaaaaaaaaaaaaaaaaaaaaaaaaaaaaaaaaaaaaaaaaaaaaaaaaaaaaaaaaa

SEQ ID NO: 6915 - RNA, 5797 nt, synthetic construct
  source 1..5797: mol_type = other RNA
aggaaataagagagaaaagaagagtaagaagaaatataagagccaccatggcccctaagaagaagcgtaaagtgagccggatggaacgcctcgtctacgaggtgcggcagaagtgcagaaacatcgaggacatctgcatctcctgcggatctctgaacgtgaccctggagcacccactgttcatcggcggcatgtgccagaactgtaaaaactgttttctggagtgtgcctatcaatacgacgatgacggctaccagagctactgcaccatctgttgcggcggaagagaggtgctgatgtgtggaaataacaactgctgccggtgcttctgcgtggaatgcgtggacctgctggtgggccccggcgccgcccaggccgctattaaggaagatccttggaactgctacatgtgcggccacaagggcacatacggcctgctgagacggagagaggactggcctagcagactgcagatgttcttcgccaataaccacgaccaggagttcgacccccctaaggtgtaccctcccgtccccgccgagaagagaaagcccatccgggtcctgagcctgttcgatggcatcgccaccggtctgctggtgctgaaggacctgggcatccaggtggataggtacattgcctccgaggtgtgcgaggactccatcaccgtgggaatggtgcgtcatcagggcaagatcatgtacgtgggcgacgtgcggagcgtgacacagaagcatatccaggagtggggccctttcgacctggtgatcggcggcagcccttgcaatgacctgagcatcgtgaacccagcccggaagggcctgtacgagggaaccggcagactgttcttcgagttttacagactgctgcacgacgcccggcctaaggaaggcgacgaccggcccttcttttggctgttcgagaatgtggtggccatgggagtcagcgacaagcgggatattagccggttcctggagagcaaccccgtgatgatcgatgccaaggaagtgagcgccgcccaccgggccagatacttctggggcaatctgcctggcatgaacagacccctggccagcaccgtgaacgacaagctggagctgcaggagtgcctggagcacggccggatcgccaagttcagcaaggtgagaaccatcaccacccgaagcaacagcatcaaacaaggcaaggaccagcactttcctgtgttcatgaacgagaaggaggacatcctgtggtgtaccgagatggagagagtgttcgggttcccagtccactacacagatgtcagcaacatgtctagactggccagacagagactgctgggaagaagctggtccgtccctgtgatcagacacctgttcgcccctctgaaggagtacttcgcctgcgtgagcagcggcaacagcaacgccaacagccggggccccagcttctctagcggcctggtgccactgtccctgagagggagccacatgggccccatggagatctacaaaaccgtgagcgcctggaagcggcagcctgtgcgcgtgctgagcctgtttcggaatatcgataaagtcctgaaaagcctgggattcctggagagcggctctggctccggcggtggcaccctgaagtacgtggaggatgtgacaaacgtggtcagacgggatgtggagaagtggggccccttcgatctggtgtacggcagcacccaacccctgggcagctcttgtgaccggtgccctggctggtacatgtttcagttccaccggatcctgcagtacgccctgccgagacaggagtcccagcggccattcttttggattttcatggacaacttgctgctgaccgaggatgaccaggaaactaccactcggttcctgcagaccgaagccgtgaccctgcaggacgtgagaggccgggactaccagaacgccatgcgggtgtggtccaacatccctggactgaaaagcaagcacgcacctctgacccctaaagaagaggagtacctgcaggcccaggtgcggagcagaagcaagctggacgcccctaaggtggatctgctggtgaagaattgcctcctgcccctgagagagtacttcaagtatttcagccagaatagtctgcccctgggcggcccaagcagcggcgcccctcctcccagcggcggcagcccagccggctccccaacctctaccgaggagggcacctctgagtccgccacccccgagagcggccctggcacctccaccgagcccagcgagggcagcgcacccggcagccctgccggcagccccacctccacagaggagggaaccagcaccgagcccagcgaaggcagcgccccaggcaccagcaccgagcctagtgagggcggctctggcggcggcagcgcccaggagattaaacggatcaacaagatcagaagaagacttgtgaaagacagcaacaccaagaaggccggcaagacaggccccatgaaaaccctgctggttagagtgatgacacccgatctgagagagcggctggaaaacctgagaaagaagcctgaaaatatcccccagcccatcagcaatacatctagagccaacctgaataagctgctgaccgattacaccgaaatgaagaaggcgatcctgcatgtgtactgggaagagttccagaaggaccctgtgggcctgatgagccgggtggcccagcctgccagcaagaagatcgatcagaacaagctgaaacctgagatggacgagaagggcaacctgaccaccgccggctttgcctgctctcagtgtggccagcccctgttcgtgtacaagctggagcaggtgtctgagaagggcaaggcttacaccaactacttcggacggtgcaatgtggccgagcacgaaaagctgatcctgctggcccagctgaagcccgagaaggatagcgacgaagccgtgacatatagcctgggaaagtttgggcagagggccctggatttctacagcattcatgtgaccaaggagtccacccaccccgtgaagcccctggcccagatcgccggaaacagatacgcctccggacctgtgggaaaggccctgagcgacgcatgtatgggcacaatcgcctccttcctgtctaagtaccaggacatcatcatcgaacaccagaaggtggtgaagggcaaccagaagagactggagagcctgcgggagctggccggcaaggaaaacctggaataccctagcgtgaccctgccacctcagcctcacaccaaggagggcgttgatgcctacaacgaagtgatcgcccgggtgcgaatgtgggtgaacctgaacctgtggcagaagctgaagctaagcagagatgatgccaagcctctgctgagactgaagggattcccttcctttcctctggtcgagagacaggccaacgaagtggactggtgggacatggtgtgtaacgtgaagaagctgatcaacgagaaaaaggaggatggcaaggtgttttggcagaatctggctggctacaagagacaggaagccctgagaccatacctgagcagcgaggaagatcggaagaagggaaagaaattcgctcggtaccagctgggcgacctgctgctgcacctggaaaagaagcacggcgaggactggggaaaggtgtacgacgaggcctgggagcggattgacaagaaagtggaaggcctgagcaagcacatcaagctggaagaggaacggagaagcgaggacgcccagagcaaggccgccctgaccgactggctgcgggctaaggccagcttcgtgatcgagggcctgaaggaggccgacaaggacgagttctgcagatgcgagctgaagctgcagaagtggtacggggacctgcggggaaagcccttcgccatcgaagccgagaacagcatcctggacatcagcggcttcagcaagcagtacaactgtgccttcatctggcagaaggacggcgtgaagaagctgaacctgtacctgatcatcaactacttcaagggcggcaagctgcggttcaagaagatcaaacctgaagccttcgaagccaacagattctacaccgtgatcaacaaaaagagcggcgagatcgtgcccatggaggtgaacttcaacttcgacgaccccaacctgatcatcctgcctctggcctttggcaagagacagggcagagaattcatctggaacgacctgctgtccctggaaaccggcagcctgaagctggccaacggaagagtgatcgagaagacactgtacaacagaagaacccggcaggatgagcctgccctgttcgtggccctgaccttcgagcggcgggaggtcctggactcctccaatatcaaaccaatgaacctgatcggcgtggcaagaggcgaaaacatccccgccgtgatcgccctgaccgaccccgagggctgcccactgagccggtttaaggatagcctgggaaacccaacccacatcctgagaatcggcgagagctataaggagaagcagcggaccatccaggccaagaaggaggtggagcagcggagagccggcggctacagccggaagtacgccagcaaagccaagaatctggcagacgatatggtgagaaacaccgctagagatctgctgtactacgccgtgacccaggatgccatgctgatcttcgccaacctgagccggggcttcggccggcagggcaagcggaccttcatggccgagagacagtacacacggatggaggactggctgaccgccaagctggcctacgagggcctgagcaagacctacctgtccaagacactggcccagtacacctccaagacatgcagcaactgtgggtttaccatcaccagcgccgactacgacagggtgctggagaagctgaagaagacagcaacaggctggatgaccacaattaacggcaaggagctgaaggtggagggccagattacctactacaacagatacaagagacagaacgtagtcaaggacctgtccgtcgagctggatagactgagcgaagaatctgtgaacaacgacatctcctcctggacaaagggcagaagcggagaagctctgagcctcctgaagaaaagattctcccatagacccgtgcaggagaagttcgtgtgcctgaactgcggcttcgagacacacgcagccgagcaagccgccctgaacatcgccagatcctggctgttcctgcggagccaggagtacaagaaataccagacaaacaagacaaccggcaacaccgataagagagccttcgtcgagacctggcagtccttttaccggaagaagcttaaggaggtgtggaaacctgccgtgcggtctggcggatctggcggaggctccacaagctggaaggaggagctgagcttcgaggacgtggccgtgaacttcaccagggaggagtggaacaagctggactggacccagagggacctgtacagggacgtgatgctggagaactacaggaacatgatcctgctgggcttccagttccccaagcccgaggtgatctgccagctggagcagtgggaggacccctggatcctggacctgcccagggccggcaccaggaaggccagcagcaacgcctgcaccagccccaagaaaaagagaaaagtctaagctgccttctgcggggcttgccttctggccatgcccttcttctctcccttgcacctgtacctcttggtctttgaataaagcctgagtaggaaggctagcaaaaaaaaaaaaaaaaaaaaaaaaaaaaaaaaaaaaaaaaaaaaaaaaaaaaaaaaaaaaaaaaaaaaaaaaaaaaaaaa

SEQ ID NO: 6916 - RNA, 5797 nt, synthetic construct
  source 1..5797: mol_type = other RNA
aggaaataagagagaaaagaagagtaagaagaaatataagagccaccatggcccctaagaagaagcgtaaagtgagccggatggaacgcctcgtctacgaggtgcggcagaagtgcagaaacatcgaggacatctgcatctcctgcggatctctgaacgtgaccctggagcacccactgttcatcggcggcatgtgccagaactgtaaaaactgttttctggagtgtgcctatcaatacgacgatgacggctaccagagctactgcaccatctgttgcggcggaagagaggtgctgatgtgtggaaataacaactgctgccggtgcttctgcgtggaatgcgtggacctgctggtgggccccggcgccgcccaggccgctattaaggaagatccttggaactgctacatgtgcggccacaagggcacatacggcctgctgagacggagagaggactggcctagcagactgcagatgttcttcgccaataaccacgaccaggagttcgacccccctaaggtgtaccctcccgtccccgccgagaagagaaagcccatccgggtcctgagcctgttcgatggcatcgccaccggtctgctggtgctgaaggacctgggcatccaggtggataggtacattgcctccgaggtgtgcgaggactccatcaccgtgggaatggtgcgtcatcagggcaagatcatgtacgtgggcgacgtgcggagcgtgacacagaagcatatccaggagtggggccctttcgacctggtgatcggcggcagcccttgcaatgacctgagcatcgtgaacccagcccggaagggcctgtacgagggaaccggcagactgttcttcgagttttacagactgctgcacgacgcccggcctaaggaaggcgacgaccggcccttcttttggctgttcgagaatgtggtggccatgggagtcagcgacaagcgggatattagccggttcctggagagcaaccccgtgatgatcgatgccaaggaagtgagcgccgcccaccgggccagatacttctggggcaatctgcctggcatgaacagacccctggccagcaccgtgaacgacaagctggagctgcaggagtgcctggagcacggccggatcgccaagttcagcaaggtgagaaccatcaccacccgaagcaacagcatcaaacaaggcaaggaccagcactttcctgtgttcatgaacgagaaggaggacatcctgtggtgtaccgagatggagagagtgttcgggttcccagtccactacacagatgtcagcaacatgtctagactggccagacagagactgctgggaagaagctggtccgtccctgtgatcagacacctgttcgcccctctgaaggagtacttcgcctgcgtgagcagcggcaacagcaacgccaacagccggggccccagcttctctagcggcctggtgccactgtccctgagagggagccacatgggccccatggagatctacaaaaccgtgagcgcctggaagcggcagcctgtgcgcgtgctgagcctgtttcggaatatcgataaagtcctgaaaagcctgggattcctggagagcggctctggctccggcggtggcaccctgaagtacgtggaggatgtgacaaacgtggtcagacgggatgtggagaagtggggccccttcgatctggtgtacggcagcacccaacccctgggcagctcttgtgaccggtgccctggctggtacatgtttcagttccaccggatcctgcagtacgccctgccgagacaggagtcccagcggccattcttttggattttcatggacaacttgctgctgaccgaggatgaccaggaaactaccactcggttcctgcagaccgaagccgtgaccctgcaggacgtgagaggccgggactaccagaacgccatgcgggtgtggtccaacatccctggactgaaaagcaagcacgcacctctgacccctaaagaagaggagtacctgcaggcccaggtgcggagcagaagcaagctggacgcccctaaggtggatctgctggtgaagaattgcctcctgcccctgagagagtacttcaagtatttcagccagaatagtctgcccctgggcggcccaagcagcggcgcccctcctcccagcggcggcagcccagccggctccccaacctctaccgaggagggcacctctgagtccgccacccccgagagcggccctggcacctccaccgagcccagcgagggcagcgcacccggcagccctgccggcagccccacctccacagaggagggaaccagcaccgagcccagcgaaggcagcgccccaggcaccagcaccgagcctagtgagggcggctctggcggcggcagcgcccaggagattaaacggatcaacaagatcagaagaagacttgtgaaagacagcaacaccaagaaggccggcaagacaggccccatgaaaaccctgctggttagagtgatgacacccgatctgagagagcggctggaaaacctgagaaagaagcctgaaaatatcccccagcccatcagcaatacatctagagccaacctgaataagctgctgaccgattacaccgaaatgaagaaggcgatcctgcatgtgtactgggaagagttccagaaggaccctgtgggcctgatgagccgggtggcccagcctgccagcaagaagatcgatcagaacaagctgaaacctgagatggacgagaagggcaacctgaccaccgccggctttgcctgctctcagtgtggccagcccctgttcgtgtacaagctggagcaggtgtctgagaagggcaaggcttacaccaactacttcggacggtgcaatgtggccgagcacgaaaagctgatcctgctggcccagctgaagcccgagaaggatagcgacgaagccgtgacatatagcctgggaaagtttgggcagagggccctggatttctacagcattcatgtgaccaaggagtccacccaccccgtgaagcccctggcccagatcgccggaaacagatacgcctccggacctgtgggaaaggccctgagcgacgcatgtatgggcacaatcgcctccttcctgtctaagtaccaggacatcatcatcgaacaccagaaggtggtgaagggcaaccagaagagactggagagcctgcgggagctggccggcaaggaaaacctggaataccctagcgtgaccctgccacctcagcctcacaccaaggagggcgttgatgcctacaacgaagtgatcgcccgggtgcgaatgtgggtgaacctgaacctgtggcagaagctgaagctaagcagagatgatgccaagcctctgctgagactgaagggattcccttcctttcctctggtcgagagacaggccaacgaagtggactggtgggacatggtgtgtaacgtgaagaagctgatcaacgagaaaaaggaggatggcaaggtgttttggcagaatctggctggctacaagagacaggaagccctgagaccatacctgagcagcgaggaagatcggaagaagggaaagaaattcgctcggtaccagctgggcgacctgctgctgcacctggaaaagaagcacggcgaggactggggaaaggtgtacgacgaggcctgggagcggattgacaagaaagtggaaggcctgagcaagcacatcaagctggaagaggaacggagaagcgaggacgcccagagcaaggccgccctgaccgactggctgcgggctaaggccagcttcgtgatcgagggcctgaaggaggccgacaaggacgagttctgcagatgcgagctgaagctgcagaagtggtacggggacctgcggggaaagcccttcgccatcgaagccgagaacagcatcctggacatcagcggcttcagcaagcagtacaactgtgccttcatctggcagaaggacggcgtgaagaagctgaacctgtacctgatcatcaactacttcaagggcggcaagctgcggttcaagaagatcaaacctgaagccttcgaagccaacagattctacaccgtgatcaacaaaaagagcggcgagatcgtgcccatggaggtgaacttcaacttcgacgaccccaacctgatcatcctgcctctggcctttggcaagagacagggcagagaattcatctggaacgacctgctgtccctggaaaccggcagcctgaagctggccaacggaagagtgatcgagaagacactgtacaacagaagaacccggcaggatgagcctgccctgttcgtggccctgaccttcgagcggcgggaggtcctggactcctccaatatcaaaccaatgaacctgatcggcgtggcaagaggcgaaaacatccccgccgtgatcgccctgaccgaccccgagggctgcccactgagccggtttaaggatagcctgggaaacccaacccacatcctgagaatcggcgagagctataaggagaagcagcggaccatccaggccaagaaggaggtggagcagcggagagccggcggctacagccggaagtacgccagcaaagccaagaatctggcagacgatatggtgagaaacaccgctagagatctgctgtactacgccgtgacccaggatgccatgctgatcttcgccaacctgagccggggcttcggccggcagggcaagcggaccttcatggccgagagacagtacacacggatggaggactggctgaccgccaagctggcctacgagggcctgagcaagacctacctgtccaagacactggcccagtacacctccaagacatgcagcaactgtgggtttaccatcaccagcgccgactacgacagggtgctggagaagctgaagaagacagcaacaggctggatgaccacaattaacggcaaggagctgaaggtggagggccagattacctactacaacagatacaagagacagaacgtagtcaaggacctgtccgtcgagctggatagactgagcgaagaatctgtgaacaacgacatctcctcctggacaaagggcagaagcggagaagctctgagcctcctgaagaaaagattctcccatagacccgtgcaggagaagttcgtgtgcctgaactgcggcttcgagacacacgcagccgagcaagccgccctgaacatcgccagatcctggctgttcctgcggagccaggagtacaagaaataccagacaaacaagacaaccggcaacaccgataagagagccttcgtcgagacctggcagtccttttaccggaagaagcttaaggaggtgtggaaacctgccgtgcggtctggcggatctggcggaggctccacaagcgtgcccgtgaccttcgaggacgtggccgtgaggttcagcgccgaggagtgggagatcctggagggctggcagaaggagctgcacaaggaggtgatggaggagaactaccagctgctgatcagcctgggccagcccgtgcccaccctggccctgctggccctgaccgccgagagggaggccgccggcggccagatcaggagcgtgagcggcgagagggagctggccagcaagggcggcagcagcaccagccccaagaaaaagagaaaagtctaagctgccttctgcggggcttgccttctggccatgcccttcttctctcccttgcacctgtacctcttggtctttgaataaagcctgagtaggaaggctagcaaaaaaaaaaaaaaaaaaaaaaaaaaaaaaaaaaaaaaaaaaaaaaaaaaaaaaaaaaaaaaaaaaaaaaaaaaaaaaaa

SEQ ID NO: 6917 - RNA, 5797 nt, synthetic construct
  source 1..5797: mol_type = other RNA
aggaaataagagagaaaagaagagtaagaagaaatataagagccaccatggcccctaagaagaagcgtaaagtgagccggatggaacgcctcgtctacgaggtgcggcagaagtgcagaaacatcgaggacatctgcatctcctgcggatctctgaacgtgaccctggagcacccactgttcatcggcggcatgtgccagaactgtaaaaactgttttctggagtgtgcctatcaatacgacgatgacggctaccagagctactgcaccatctgttgcggcggaagagaggtgctgatgtgtggaaataacaactgctgccggtgcttctgcgtggaatgcgtggacctgctggtgggccccggcgccgcccaggccgctattaaggaagatccttggaactgctacatgtgcggccacaagggcacatacggcctgctgagacggagagaggactggcctagcagactgcagatgttcttcgccaataaccacgaccaggagttcgacccccctaaggtgtaccctcccgtccccgccgagaagagaaagcccatccgggtcctgagcctgttcgatggcatcgccaccggtctgctggtgctgaaggacctgggcatccaggtggataggtacattgcctccgaggtgtgcgaggactccatcaccgtgggaatggtgcgtcatcagggcaagatcatgtacgtgggcgacgtgcggagcgtgacacagaagcatatccaggagtggggccctttcgacctggtgatcggcggcagcccttgcaatgacctgagcatcgtgaacccagcccggaagggcctgtacgagggaaccggcagactgttcttcgagttttacagactgctgcacgacgcccggcctaaggaaggcgacgaccggcccttcttttggctgttcgagaatgtggtggccatgggagtcagcgacaagcgggatattagccggttcctggagagcaaccccgtgatgatcgatgccaaggaagtgagcgccgcccaccgggccagatacttctggggcaatctgcctggcatgaacagacccctggccagcaccgtgaacgacaagctggagctgcaggagtgcctggagcacggccggatcgccaagttcagcaaggtgagaaccatcaccacccgaagcaacagcatcaaacaaggcaaggaccagcactttcctgtgttcatgaacgagaaggaggacatcctgtggtgtaccgagatggagagagtgttcgggttcccagtccactacacagatgtcagcaacatgtctagactggccagacagagactgctgggaagaagctggtccgtccctgtgatcagacacctgttcgcccctctgaaggagtacttcgcctgcgtgagcagcggcaacagcaacgccaacagccggggccccagcttctctagcggcctggtgccactgtccctgagagggagccacatgggccccatggagatctacaaaaccgtgagcgcctggaagcggcagcctgtgcgcgtgctgagcctgtttcggaatatcgataaagtcctgaaaagcctgggattcctggagagcggctctggctccggcggtggcaccctgaagtacgtggaggatgtgacaaacgtggtcagacgggatgtggagaagtggggccccttcgatctggtgtacggcagcacccaacccctgggcagctcttgtgaccggtgccctggctggtacatgtttcagttccaccggatcctgcagtacgccctgccgagacaggagtcccagcggccattcttttggattttcatggacaacttgctgctgaccgaggatgaccaggaaactaccactcggttcctgcagaccgaagccgtgaccctgcaggacgtgagaggccgggactaccagaacgccatgcgggtgtggtccaacatccctggactgaaaagcaagcacgcacctctgacccctaaagaagaggagtacctgcaggcccaggtgcggagcagaagcaagctggacgcccctaaggtggatctgctggtgaagaattgcctcctgcccctgagagagtacttcaagtatttcagccagaatagtctgcccctgggcggcccaagcagcggcgcccctcctcccagcggcggcagcccagccggctccccaacctctaccgaggagggcacctctgagtccgccacccccgagagcggccctggcacctccaccgagcccagcgagggcagcgcacccggcagccctgccggcagccccacctccacagaggagggaaccagcaccgagcccagcgaaggcagcgccccaggcaccagcaccgagcctagtgagggcggctctggcggcggcagcgcccaggagattaaacggatcaacaagatcagaagaagacttgtgaaagacagcaacaccaagaaggccggcaagacaggccccatgaaaaccctgctggttagagtgatgacacccgatctgagagagcggctggaaaacctgagaaagaagcctgaaaatatcccccagcccatcagcaatacatctagagccaacctgaataagctgctgaccgattacaccgaaatgaagaaggcgatcctgcatgtgtactgggaagagttccagaaggaccctgtgggcctgatgagccgggtggcccagcctgccagcaagaagatcgatcagaacaagctgaaacctgagatggacgagaagggcaacctgaccaccgccggctttgcctgctctcagtgtggccagcccctgttcgtgtacaagctggagcaggtgtctgagaagggcaaggcttacaccaactacttcggacggtgcaatgtggccgagcacgaaaagctgatcctgctggcccagctgaagcccgagaaggatagcgacgaagccgtgacatatagcctgggaaagtttgggcagagggccctggatttctacagcattcatgtgaccaaggagtccacccaccccgtgaagcccctggcccagatcgccggaaacagatacgcctccggacctgtgggaaaggccctgagcgacgcatgtatgggcacaatcgcctccttcctgtctaagtaccaggacatcatcatcgaacaccagaaggtggtgaagggcaaccagaagagactggagagcctgcgggagctggccggcaaggaaaacctggaataccctagcgtgaccctgccacctcagcctcacaccaaggagggcgttgatgcctacaacgaagtgatcgcccgggtgcgaatgtgggtgaacctgaacctgtggcagaagctgaagctaagcagagatgatgccaagcctctgctgagactgaagggattcccttcctttcctctggtcgagagacaggccaacgaagtggactggtgggacatggtgtgtaacgtgaagaagctgatcaacgagaaaaaggaggatggcaaggtgttttggcagaatctggctggctacaagagacaggaagccctgagaccatacctgagcagcgaggaagatcggaagaagggaaagaaattcgctcggtaccagctgggcgacctgctgctgcacctggaaaagaagcacggcgaggactggggaaaggtgtacgacgaggcctgggagcggattgacaagaaagtggaaggcctgagcaagcacatcaagctggaagaggaacggagaagcgaggacgcccagagcaaggccgccctgaccgactggctgcgggctaaggccagcttcgtgatcgagggcctgaaggaggccgacaaggacgagttctgcagatgcgagctgaagctgcagaagtggtacggggacctgcggggaaagcccttcgccatcgaagccgagaacagcatcctggacatcagcggcttcagcaagcagtacaactgtgccttcatctggcagaaggacggcgtgaagaagctgaacctgtacctgatcatcaactacttcaagggcggcaagctgcggttcaagaagatcaaacctgaagccttcgaagccaacagattctacaccgtgatcaacaaaaagagcggcgagatcgtgcccatggaggtgaacttcaacttcgacgaccccaacctgatcatcctgcctctggcctttggcaagagacagggcagagaattcatctggaacgacctgctgtccctggaaaccggcagcctgaagctggccaacggaagagtgatcgagaagacactgtacaacagaagaacccggcaggatgagcctgccctgttcgtggccctgaccttcgagcggcgggaggtcctggactcctccaatatcaaaccaatgaacctgatcggcgtggcaagaggcgaaaacatccccgccgtgatcgccctgaccgaccccgagggctgcccactgagccggtttaaggatagcctgggaaacccaacccacatcctgagaatcggcgagagctataaggagaagcagcggaccatccaggccaagaaggaggtggagcagcggagagccggcggctacagccggaagtacgccagcaaagccaagaatctggcagacgatatggtgagaaacaccgctagagatctgctgtactacgccgtgacccaggatgccatgctgatcttcgccaacctgagccggggcttcggccggcagggcaagcggaccttcatggccgagagacagtacacacggatggaggactggctgaccgccaagctggcctacgagggcctgagcaagacctacctgtccaagacactggcccagtacacctccaagacatgcagcaactgtgggtttaccatcaccagcgccgactacgacagggtgctggagaagctgaagaagacagcaacaggctggatgaccacaattaacggcaaggagctgaaggtggagggccagattacctactacaacagatacaagagacagaacgtagtcaaggacctgtccgtcgagctggatagactgagcgaagaatctgtgaacaacgacatctcctcctggacaaagggcagaagcggagaagctctgagcctcctgaagaaaagattctcccatagacccgtgcaggagaagttcgtgtgcctgaactgcggcttcgagacacacgcagccgagcaagccgccctgaacatcgccagatcctggctgttcctgcggagccaggagtacaagaaataccagacaaacaagacaaccggcaacaccgataagagagccttcgtcgagacctggcagtccttttaccggaagaagcttaaggaggtgtggaaacctgccgtgcggtctggcggatctggcggaggctccacaagcatggccttcaaggacgtggccgtggccttcacccagaaggagtggaagctgctgagccccgcccagaggaccctgtacagggacgtgatgctggagaactacagccacatggtgagcctgggcatcgccttccccaagcccaagctgatcatccagctggagcagggcgacgagccctggagggaggagagcgagagcctgctggacctgtgccccgagcccaggaccgagttccagccccacaccagccccaagaaaaagagaaaagtctaagctgccttctgcggggcttgccttctggccatgcccttcttctctcccttgcacctgtacctcttggtctttgaataaagcctgagtaggaaggctagcaaaaaaaaaaaaaaaaaaaaaaaaaaaaaaaaaaaaaaaaaaaaaaaaaaaaaaaaaaaaaaaaaaaaaaaaaaaaaaaa

SEQ ID NO: 6918 - RNA, 5797 nt, synthetic construct
  source 1..5797: mol_type = other RNA
aggaaataagagagaaaagaagagtaagaagaaatataagagccaccatggcccctaagaagaagcgtaaagtgagccggatggaacgcctcgtctacgaggtgcggcagaagtgcagaaacatcgaggacatctgcatctcctgcggatctctgaacgtgaccctggagcacccactgttcatcggcggcatgtgccagaactgtaaaaactgttttctggagtgtgcctatcaatacgacgatgacggctaccagagctactgcaccatctgttgcggcggaagagaggtgctgatgtgtggaaataacaactgctgccggtgcttctgcgtggaatgcgtggacctgctggtgggccccggcgccgcccaggccgctattaaggaagatccttggaactgctacatgtgcggccacaagggcacatacggcctgctgagacggagagaggactggcctagcagactgcagatgttcttcgccaataaccacgaccaggagttcgacccccctaaggtgtaccctcccgtccccgccgagaagagaaagcccatccgggtcctgagcctgttcgatggcatcgccaccggtctgctggtgctgaaggacctgggcatccaggtggataggtacattgcctccgaggtgtgcgaggactccatcaccgtgggaatggtgcgtcatcagggcaagatcatgtacgtgggcgacgtgcggagcgtgacacagaagcatatccaggagtggggccctttcgacctggtgatcggcggcagcccttgcaatgacctgagcatcgtgaacccagcccggaagggcctgtacgagggaaccggcagactgttcttcgagttttacagactgctgcacgacgcccggcctaaggaaggcgacgaccggcccttcttttggctgttcgagaatgtggtggccatgggagtcagcgacaagcgggatattagccggttcctggagagcaaccccgtgatgatcgatgccaaggaagtgagcgccgcccaccgggccagatacttctggggcaatctgcctggcatgaacagacccctggccagcaccgtgaacgacaagctggagctgcaggagtgcctggagcacggccggatcgccaagttcagcaaggtgagaaccatcaccacccgaagcaacagcatcaaacaaggcaaggaccagcactttcctgtgttcatgaacgagaaggaggacatcctgtggtgtaccgagatggagagagtgttcgggttcccagtccactacacagatgtcagcaacatgtctagactggccagacagagactgctgggaagaagctggtccgtccctgtgatcagacacctgttcgcccctctgaaggagtacttcgcctgcgtgagcagcggcaacagcaacgccaacagccggggccccagcttctctagcggcctggtgccactgtccctgagagggagccacatgggccccatggagatctacaaaaccgtgagcgcctggaagcggcagcctgtgcgcgtgctgagcctgtttcggaatatcgataaagtcctgaaaagcctgggattcctggagagcggctctggctccggcggtggcaccctgaagtacgtggaggatgtgacaaacgtggtcagacgggatgtggagaagtggggccccttcgatctggtgtacggcagcacccaacccctgggcagctcttgtgaccggtgccctggctggtacatgtttcagttccaccggatcctgcagtacgccctgccgagacaggagtcccagcggccattcttttggattttcatggacaacttgctgctgaccgaggatgaccaggaaactaccactcggttcctgcagaccgaagccgtgaccctgcaggacgtgagaggccgggactaccagaacgccatgcgggtgtggtccaacatccctggactgaaaagcaagcacgcacctctgacccctaaagaagaggagtacctgcaggcccaggtgcggagcagaagcaagctggacgcccctaaggtggatctgctggtgaagaattgcctcctgcccctgagagagtacttcaagtatttcagccagaatagtctgcccctgggcggcccaagcagcggcgcccctcctcccagcggcggcagcccagccggctccccaacctctaccgaggagggcacctctgagtccgccacccccgagagcggccctggcacctccaccgagcccagcgagggcagcgcacccggcagccctgccggcagccccacctccacagaggagggaaccagcaccgagcccagcgaaggcagcgccccaggcaccagcaccgagcctagtgagggcggctctggcggcggcagcgcccaggagattaaacggatcaacaagatcagaagaagacttgtgaaagacagcaacaccaagaaggccggcaagacaggccccatgaaaaccctgctggttagagtgatgacacccgatctgagagagcggctggaaaacctgagaaagaagcctgaaaatatcccccagcccatcagcaatacatctagagccaacctgaataagctgctgaccgattacaccgaaatgaagaaggcgatcctgcatgtgtactgggaagagttccagaaggaccctgtgggcctgatgagccgggtggcccagcctgccagcaagaagatcgatcagaacaagctgaaacctgagatggacgagaagggcaacctgaccaccgccggctttgcctgctctcagtgtggccagcccctgttcgtgtacaagctggagcaggtgtctgagaagggcaaggcttacaccaactacttcggacggtgcaatgtggccgagcacgaaaagctgatcctgctggcccagctgaagcccgagaaggatagcgacgaagccgtgacatatagcctgggaaagtttgggcagagggccctggatttctacagcattcatgtgaccaaggagtccacccaccccgtgaagcccctggcccagatcgccggaaacagatacgcctccggacctgtgggaaaggccctgagcgacgcatgtatgggcacaatcgcctccttcctgtctaagtaccaggacatcatcatcgaacaccagaaggtggtgaagggcaaccagaagagactggagagcctgcgggagctggccggcaaggaaaacctggaataccctagcgtgaccctgccacctcagcctcacaccaaggagggcgttgatgcctacaacgaagtgatcgcccgggtgcgaatgtgggtgaacctgaacctgtggcagaagctgaagctaagcagagatgatgccaagcctctgctgagactgaagggattcccttcctttcctctggtcgagagacaggccaacgaagtggactggtgggacatggtgtgtaacgtgaagaagctgatcaacgagaaaaaggaggatggcaaggtgttttggcagaatctggctggctacaagagacaggaagccctgagaccatacctgagcagcgaggaagatcggaagaagggaaagaaattcgctcggtaccagctgggcgacctgctgctgcacctggaaaagaagcacggcgaggactggggaaaggtgtacgacgaggcctgggagcggattgacaagaaagtggaaggcctgagcaagcacatcaagctggaagaggaacggagaagcgaggacgcccagagcaaggccgccctgaccgactggctgcgggctaaggccagcttcgtgatcgagggcctgaaggaggccgacaaggacgagttctgcagatgcgagctgaagctgcagaagtggtacggggacctgcggggaaagcccttcgccatcgaagccgagaacagcatcctggacatcagcggcttcagcaagcagtacaactgtgccttcatctggcagaaggacggcgtgaagaagctgaacctgtacctgatcatcaactacttcaagggcggcaagctgcggttcaagaagatcaaacctgaagccttcgaagccaacagattctacaccgtgatcaacaaaaagagcggcgagatcgtgcccatggaggtgaacttcaacttcgacgaccccaacctgatcatcctgcctctggcctttggcaagagacagggcagagaattcatctggaacgacctgctgtccctggaaaccggcagcctgaagctggccaacggaagagtgatcgagaagacactgtacaacagaagaacccggcaggatgagcctgccctgttcgtggccctgaccttcgagcggcgggaggtcctggactcctccaatatcaaaccaatgaacctgatcggcgtggcaagaggcgaaaacatccccgccgtgatcgccctgaccgaccccgagggctgcccactgagccggtttaaggatagcctgggaaacccaacccacatcctgagaatcggcgagagctataaggagaagcagcggaccatccaggccaagaaggaggtggagcagcggagagccggcggctacagccggaagtacgccagcaaagccaagaatctggcagacgatatggtgagaaacaccgctagagatctgctgtactacgccgtgacccaggatgccatgctgatcttcgccaacctgagccggggcttcggccggcagggcaagcggaccttcatggccgagagacagtacacacggatggaggactggctgaccgccaagctggcctacgagggcctgagcaagacctacctgtccaagacactggcccagtacacctccaagacatgcagcaactgtgggtttaccatcaccagcgccgactacgacagggtgctggagaagctgaagaagacagcaacaggctggatgaccacaattaacggcaaggagctgaaggtggagggccagattacctactacaacagatacaagagacagaacgtagtcaaggacctgtccgtcgagctggatagactgagcgaagaatctgtgaacaacgacatctcctcctggacaaagggcagaagcggagaagctctgagcctcctgaagaaaagattctcccatagacccgtgcaggagaagttcgtgtgcctgaactgcggcttcgagacacacgcagccgagcaagccgccctgaacatcgccagatcctggctgttcctgcggagccaggagtacaagaaataccagacaaacaagacaaccggcaacaccgataagagagccttcgtcgagacctggcagtccttttaccggaagaagcttaaggaggtgtggaaacctgccgtgcggtctggcggatctggcggaggctccacaagcagccaggagagcgtgagcttcgaggacgtggccgtgtacttcacccagaaccagtgggccagcctggacagcgcccagaggaccctgtacaggaaggtgatgctggagaactacgccaacgtgaccagcctggccgccttccccttccccaagcccgacctgatcctgcagctggagcagggcgaggcccccggcggcctggacccctggacccccatcaggagggaggtgaggggcgtgtgcaccagccccaagaaaaagagaaaagtctaagctgccttctgcggggcttgccttctggccatgcccttcttctctcccttgcacctgtacctcttggtctttgaataaagcctgagtaggaaggctagcaaaaaaaaaaaaaaaaaaaaaaaaaaaaaaaaaaaaaaaaaaaaaaaaaaaaaaaaaaaaaaaaaaaaaaaaaaaaaaaa

SEQ ID NO: 6919 - RNA, 5797 nt, synthetic construct
  source 1..5797: mol_type = other RNA
aggaaataagagagaaaagaagagtaagaagaaatataagagccaccatggcccctaagaagaagcgtaaagtgagccggatggaacgcctcgtctacgaggtgcggcagaagtgcagaaacatcgaggacatctgcatctcctgcggatctctgaacgtgaccctggagcacccactgttcatcggcggcatgtgccagaactgtaaaaactgttttctggagtgtgcctatcaatacgacgatgacggctaccagagctactgcaccatctgttgcggcggaagagaggtgctgatgtgtggaaataacaactgctgccggtgcttctgcgtggaatgcgtggacctgctggtgggccccggcgccgcccaggccgctattaaggaagatccttggaactgctacatgtgcggccacaagggcacatacggcctgctgagacggagagaggactggcctagcagactgcagatgttcttcgccaataaccacgaccaggagttcgacccccctaaggtgtaccctcccgtccccgccgagaagagaaagcccatccgggtcctgagcctgttcgatggcatcgccaccggtctgctggtgctgaaggacctgggcatccaggtggataggtacattgcctccgaggtgtgcgaggactccatcaccgtgggaatggtgcgtcatcagggcaagatcatgtacgtgggcgacgtgcggagcgtgacacagaagcatatccaggagtggggccctttcgacctggtgatcggcggcagcccttgcaatgacctgagcatcgtgaacccagcccggaagggcctgtacgagggaaccggcagactgttcttcgagttttacagactgctgcacgacgcccggcctaaggaaggcgacgaccggcccttcttttggctgttcgagaatgtggtggccatgggagtcagcgacaagcgggatattagccggttcctggagagcaaccccgtgatgatcgatgccaaggaagtgagcgccgcccaccgggccagatacttctggggcaatctgcctggcatgaacagacccctggccagcaccgtgaacgacaagctggagctgcaggagtgcctggagcacggccggatcgccaagttcagcaaggtgagaaccatcaccacccgaagcaacagcatcaaacaaggcaaggaccagcactttcctgtgttcatgaacgagaaggaggacatcctgtggtgtaccgagatggagagagtgttcgggttcccagtccactacacagatgtcagcaacatgtctagactggccagacagagactgctgggaagaagctggtccgtccctgtgatcagacacctgttcgcccctctgaaggagtacttcgcctgcgtgagcagcggcaacagcaacgccaacagccggggccccagcttctctagcggcctggtgccactgtccctgagagggagccacatgggccccatggagatctacaaaaccgtgagcgcctggaagcggcagcctgtgcgcgtgctgagcctgtttcggaatatcgataaagtcctgaaaagcctgggattcctggagagcggctctggctccggcggtggcaccctgaagtacgtggaggatgtgacaaacgtggtcagacgggatgtggagaagtggggccccttcgatctggtgtacggcagcacccaacccctgggcagctcttgtgaccggtgccctggctggtacatgtttcagttccaccggatcctgcagtacgccctgccgagacaggagtcccagcggccattcttttggattttcatggacaacttgctgctgaccgaggatgaccaggaaactaccactcggttcctgcagaccgaagccgtgaccctgcaggacgtgagaggccgggactaccagaacgccatgcgggtgtggtccaacatccctggactgaaaagcaagcacgcacctctgacccctaaagaagaggagtacctgcaggcccaggtgcggagcagaagcaagctggacgcccctaaggtggatctgctggtgaagaattgcctcctgcccctgagagagtacttcaagtatttcagccagaatagtctgcccctgggcggcccaagcagcggcgcccctcctcccagcggcggcagcccagccggctccccaacctctaccgaggagggcacctctgagtccgccacccccgagagcggccctggcacctccaccgagcccagcgagggcagcgcacccggcagccctgccggcagccccacctccacagaggagggaaccagcaccgagcccagcgaaggcagcgccccaggcaccagcaccgagcctagtgagggcggctctggcggcggcagcgcccaggagattaaacggatcaacaagatcagaagaagacttgtgaaagacagcaacaccaagaaggccggcaagacaggccccatgaaaaccctgctggttagagtgatgacacccgatctgagagagcggctggaaaacctgagaaagaagcctgaaaatatcccccagcccatcagcaatacatctagagccaacctgaataagctgctgaccgattacaccgaaatgaagaaggcgatcctgcatgtgtactgggaagagttccagaaggaccctgtgggcctgatgagccgggtggcccagcctgccagcaagaagatcgatcagaacaagctgaaacctgagatggacgagaagggcaacctgaccaccgccggctttgcctgctctcagtgtggccagcccctgttcgtgtacaagctggagcaggtgtctgagaagggcaaggcttacaccaactacttcggacggtgcaatgtggccgagcacgaaaagctgatcctgctggcccagctgaagcccgagaaggatagcgacgaagccgtgacatatagcctgggaaagtttgggcagagggccctggatttctacagcattcatgtgaccaaggagtccacccaccccgtgaagcccctggcccagatcgccggaaacagatacgcctccggacctgtgggaaaggccctgagcgacgcatgtatgggcacaatcgcctccttcctgtctaagtaccaggacatcatcatcgaacaccagaaggtggtgaagggcaaccagaagagactggagagcctgcgggagctggccggcaaggaaaacctggaataccctagcgtgaccctgccacctcagcctcacaccaaggagggcgttgatgcctacaacgaagtgatcgcccgggtgcgaatgtgggtgaacctgaacctgtggcagaagctgaagctaagcagagatgatgccaagcctctgctgagactgaagggattcccttcctttcctctggtcgagagacaggccaacgaagtggactggtgggacatggtgtgtaacgtgaagaagctgatcaacgagaaaaaggaggatggcaaggtgttttggcagaatctggctggctacaagagacaggaagccctgagaccatacctgagcagcgaggaagatcggaagaagggaaagaaattcgctcggtaccagctgggcgacctgctgctgcacctggaaaagaagcacggcgaggactggggaaaggtgtacgacgaggcctgggagcggattgacaagaaagtggaaggcctgagcaagcacatcaagctggaagaggaacggagaagcgaggacgcccagagcaaggccgccctgaccgactggctgcgggctaaggccagcttcgtgatcgagggcctgaaggaggccgacaaggacgagttctgcagatgcgagctgaagctgcagaagtggtacggggacctgcggggaaagcccttcgccatcgaagccgagaacagcatcctggacatcagcggcttcagcaagcagtacaactgtgccttcatctggcagaaggacggcgtgaagaagctgaacctgtacctgatcatcaactacttcaagggcggcaagctgcggttcaagaagatcaaacctgaagccttcgaagccaacagattctacaccgtgatcaacaaaaagagcggcgagatcgtgcccatggaggtgaacttcaacttcgacgaccccaacctgatcatcctgcctctggcctttggcaagagacagggcagagaattcatctggaacgacctgctgtccctggaaaccggcagcctgaagctggccaacggaagagtgatcgagaagacactgtacaacagaagaacccggcaggatgagcctgccctgttcgtggccctgaccttcgagcggcgggaggtcctggactcctccaatatcaaaccaatgaacctgatcggcgtggcaagaggcgaaaacatccccgccgtgatcgccctgaccgaccccgagggctgcccactgagccggtttaaggatagcctgggaaacccaacccacatcctgagaatcggcgagagctataaggagaagcagcggaccatccaggccaagaaggaggtggagcagcggagagccggcggctacagccggaagtacgccagcaaagccaagaatctggcagacgatatggtgagaaacaccgctagagatctgctgtactacgccgtgacccaggatgccatgctgatcttcgccaacctgagccggggcttcggccggcagggcaagcggaccttcatggccgagagacagtacacacggatggaggactggctgaccgccaagctggcctacgagggcctgagcaagacctacctgtccaagacactggcccagtacacctccaagacatgcagcaactgtgggtttaccatcaccagcgccgactacgacagggtgctggagaagctgaagaagacagcaacaggctggatgaccacaattaacggcaaggagctgaaggtggagggccagattacctactacaacagatacaagagacagaacgtagtcaaggacctgtccgtcgagctggatagactgagcgaagaatctgtgaacaacgacatctcctcctggacaaagggcagaagcggagaagctctgagcctcctgaagaaaagattctcccatagacccgtgcaggagaagttcgtgtgcctgaactgcggcttcgagacacacgcagccgagcaagccgccctgaacatcgccagatcctggctgttcctgcggagccaggagtacaagaaataccagacaaacaagacaaccggcaacaccgataagagagccttcgtcgagacctggcagtccttttaccggaagaagcttaaggaggtgtggaaacctgccgtgcggtctggcggatctggcggaggctccacaagcgtgcaggagagcgtgaccttcagggacctggccgtggacttcgacatggaggagtggggctacctgtgccccagccagaaggagctgtacagggaggtgatgctggagaactacaggcacctggtgagcctgggcctgctggaggccaagcccgacctgatcagcaggctggagcaggaggagccccaggtgtgggaggtgcaggagggcgccagcggcagcgtgtgcgcctgcaccggcggcaccagccccaagaaaaagagaaaagtctaagctgccttctgcggggcttgccttctggccatgcccttcttctctcccttgcacctgtacctcttggtctttgaataaagcctgagtaggaaggctagcaaaaaaaaaaaaaaaaaaaaaaaaaaaaaaaaaaaaaaaaaaaaaaaaaaaaaaaaaaaaaaaaaaaaaaaaaaaaaaaa

SEQ ID NO: 6920 - RNA, 5797 nt, synthetic construct
  source 1..5797: mol_type = other RNA
aggaaataagagagaaaagaagagtaagaagaaatataagagccaccatggcccctaagaagaagcgtaaagtgagccggatggaacgcctcgtctacgaggtgcggcagaagtgcagaaacatcgaggacatctgcatctcctgcggatctctgaacgtgaccctggagcacccactgttcatcggcggcatgtgccagaactgtaaaaactgttttctggagtgtgcctatcaatacgacgatgacggctaccagagctactgcaccatctgttgcggcggaagagaggtgctgatgtgtggaaataacaactgctgccggtgcttctgcgtggaatgcgtggacctgctggtgggccccggcgccgcccaggccgctattaaggaagatccttggaactgctacatgtgcggccacaagggcacatacggcctgctgagacggagagaggactggcctagcagactgcagatgttcttcgccaataaccacgaccaggagttcgacccccctaaggtgtaccctcccgtccccgccgagaagagaaagcccatccgggtcctgagcctgttcgatggcatcgccaccggtctgctggtgctgaaggacctgggcatccaggtggataggtacattgcctccgaggtgtgcgaggactccatcaccgtgggaatggtgcgtcatcagggcaagatcatgtacgtgggcgacgtgcggagcgtgacacagaagcatatccaggagtggggccctttcgacctggtgatcggcggcagcccttgcaatgacctgagcatcgtgaacccagcccggaagggcctgtacgagggaaccggcagactgttcttcgagttttacagactgctgcacgacgcccggcctaaggaaggcgacgaccggcccttcttttggctgttcgagaatgtggtggccatgggagtcagcgacaagcgggatattagccggttcctggagagcaaccccgtgatgatcgatgccaaggaagtgagcgccgcccaccgggccagatacttctggggcaatctgcctggcatgaacagacccctggccagcaccgtgaacgacaagctggagctgcaggagtgcctggagcacggccggatcgccaagttcagcaaggtgagaaccatcaccacccgaagcaacagcatcaaacaaggcaaggaccagcactttcctgtgttcatgaacgagaaggaggacatcctgtggtgtaccgagatggagagagtgttcgggttcccagtccactacacagatgtcagcaacatgtctagactggccagacagagactgctgggaagaagctggtccgtccctgtgatcagacacctgttcgcccctctgaaggagtacttcgcctgcgtgagcagcggcaacagcaacgccaacagccggggccccagcttctctagcggcctggtgccactgtccctgagagggagccacatgggccccatggagatctacaaaaccgtgagcgcctggaagcggcagcctgtgcgcgtgctgagcctgtttcggaatatcgataaagtcctgaaaagcctgggattcctggagagcggctctggctccggcggtggcaccctgaagtacgtggaggatgtgacaaacgtggtcagacgggatgtggagaagtggggccccttcgatctggtgtacggcagcacccaacccctgggcagctcttgtgaccggtgccctggctggtacatgtttcagttccaccggatcctgcagtacgccctgccgagacaggagtcccagcggccattcttttggattttcatggacaacttgctgctgaccgaggatgaccaggaaactaccactcggttcctgcagaccgaagccgtgaccctgcaggacgtgagaggccgggactaccagaacgccatgcgggtgtggtccaacatccctggactgaaaagcaagcacgcacctctgacccctaaagaagaggagtacctgcaggcccaggtgcggagcagaagcaagctggacgcccctaaggtggatctgctggtgaagaattgcctcctgcccctgagagagtacttcaagtatttcagccagaatagtctgcccctgggcggcccaagcagcggcgcccctcctcccagcggcggcagcccagccggctccccaacctctaccgaggagggcacctctgagtccgccacccccgagagcggccctggcacctccaccgagcccagcgagggcagcgcacccggcagccctgccggcagccccacctccacagaggagggaaccagcaccgagcccagcgaaggcagcgccccaggcaccagcaccgagcctagtgagggcggctctggcggcggcagcgcccaggagattaaacggatcaacaagatcagaagaagacttgtgaaagacagcaacaccaagaaggccggcaagacaggccccatgaaaaccctgctggttagagtgatgacacccgatctgagagagcggctggaaaacctgagaaagaagcctgaaaatatcccccagcccatcagcaatacatctagagccaacctgaataagctgctgaccgattacaccgaaatgaagaaggcgatcctgcatgtgtactgggaagagttccagaaggaccctgtgggcctgatgagccgggtggcccagcctgccagcaagaagatcgatcagaacaagctgaaacctgagatggacgagaagggcaacctgaccaccgccggctttgcctgctctcagtgtggccagcccctgttcgtgtacaagctggagcaggtgtctgagaagggcaaggcttacaccaactacttcggacggtgcaatgtggccgagcacgaaaagctgatcctgctggcccagctgaagcccgagaaggatagcgacgaagccgtgacatatagcctgggaaagtttgggcagagggccctggatttctacagcattcatgtgaccaaggagtccacccaccccgtgaagcccctggcccagatcgccggaaacagatacgcctccggacctgtgggaaaggccctgagcgacgcatgtatgggcacaatcgcctccttcctgtctaagtaccaggacatcatcatcgaacaccagaaggtggtgaagggcaaccagaagagactggagagcctgcgggagctggccggcaaggaaaacctggaataccctagcgtgaccctgccacctcagcctcacaccaaggagggcgttgatgcctacaacgaagtgatcgcccgggtgcgaatgtgggtgaacctgaacctgtggcagaagctgaagctaagcagagatgatgccaagcctctgctgagactgaagggattcccttcctttcctctggtcgagagacaggccaacgaagtggactggtgggacatggtgtgtaacgtgaagaagctgatcaacgagaaaaaggaggatggcaaggtgttttggcagaatctggctggctacaagagacaggaagccctgagaccatacctgagcagcgaggaagatcggaagaagggaaagaaattcgctcggtaccagctgggcgacctgctgctgcacctggaaaagaagcacggcgaggactggggaaaggtgtacgacgaggcctgggagcggattgacaagaaagtggaaggcctgagcaagcacatcaagctggaagaggaacggagaagcgaggacgcccagagcaaggccgccctgaccgactggctgcgggctaaggccagcttcgtgatcgagggcctgaaggaggccgacaaggacgagttctgcagatgcgagctgaagctgcagaagtggtacggggacctgcggggaaagcccttcgccatcgaagccgagaacagcatcctggacatcagcggcttcagcaagcagtacaactgtgccttcatctggcagaaggacggcgtgaagaagctgaacctgtacctgatcatcaactacttcaagggcggcaagctgcggttcaagaagatcaaacctgaagccttcgaagccaacagattctacaccgtgatcaacaaaaagagcggcgagatcgtgcccatggaggtgaacttcaacttcgacgaccccaacctgatcatcctgcctctggcctttggcaagagacagggcagagaattcatctggaacgacctgctgtccctggaaaccggcagcctgaagctggccaacggaagagtgatcgagaagacactgtacaacagaagaacccggcaggatgagcctgccctgttcgtggccctgaccttcgagcggcgggaggtcctggactcctccaatatcaaaccaatgaacctgatcggcgtggcaagaggcgaaaacatccccgccgtgatcgccctgaccgaccccgagggctgcccactgagccggtttaaggatagcctgggaaacccaacccacatcctgagaatcggcgagagctataaggagaagcagcggaccatccaggccaagaaggaggtggagcagcggagagccggcggctacagccggaagtacgccagcaaagccaagaatctggcagacgatatggtgagaaacaccgctagagatctgctgtactacgccgtgacccaggatgccatgctgatcttcgccaacctgagccggggcttcggccggcagggcaagcggaccttcatggccgagagacagtacacacggatggaggactggctgaccgccaagctggcctacgagggcctgagcaagacctacctgtccaagacactggcccagtacacctccaagacatgcagcaactgtgggtttaccatcaccagcgccgactacgacagggtgctggagaagctgaagaagacagcaacaggctggatgaccacaattaacggcaaggagctgaaggtggagggccagattacctactacaacagatacaagagacagaacgtagtcaaggacctgtccgtcgagctggatagactgagcgaagaatctgtgaacaacgacatctcctcctggacaaagggcagaagcggagaagctctgagcctcctgaagaaaagattctcccatagacccgtgcaggagaagttcgtgtgcctgaactgcggcttcgagacacacgcagccgagcaagccgccctgaacatcgccagatcctggctgttcctgcggagccaggagtacaagaaataccagacaaacaagacaaccggcaacaccgataagagagccttcgtcgagacctggcagtccttttaccggaagaagcttaaggaggtgtggaaacctgccgtgcggtctggcggatctggcggaggctccacaagcagccaggagctgctgaccttcaaggacgtgagcgtggacttcacccaggaggagtggggccagctgagcctggcccacaggaacctgtacagggaggtgatgctggagaactacggcaacctggtgagcgtggccggctaccagctgagcaagcccagcgtgatcagccagctggagaagggccaggagccctggatgaccgagaagaagggccccggcgaccccagccccgacctgaagaacaccagccccaagaaaaagagaaaagtctaagctgccttctgcggggcttgccttctggccatgcccttcttctctcccttgcacctgtacctcttggtctttgaataaagcctgagtaggaaggctagcaaaaaaaaaaaaaaaaaaaaaaaaaaaaaaaaaaaaaaaaaaaaaaaaaaaaaaaaaaaaaaaaaaaaaaaaaaaaaaaa

SEQ ID NO: 6921 - RNA, 5797 nt, synthetic construct
  source 1..5797: mol_type = other RNA
aggaaataagagagaaaagaagagtaagaagaaatataagagccaccatggcccctaagaagaagcgtaaagtgagccggatggaacgcctcgtctacgaggtgcggcagaagtgcagaaacatcgaggacatctgcatctcctgcggatctctgaacgtgaccctggagcacccactgttcatcggcggcatgtgccagaactgtaaaaactgttttctggagtgtgcctatcaatacgacgatgacggctaccagagctactgcaccatctgttgcggcggaagagaggtgctgatgtgtggaaataacaactgctgccggtgcttctgcgtggaatgcgtggacctgctggtgggccccggcgccgcccaggccgctattaaggaagatccttggaactgctacatgtgcggccacaagggcacatacggcctgctgagacggagagaggactggcctagcagactgcagatgttcttcgccaataaccacgaccaggagttcgacccccctaaggtgtaccctcccgtccccgccgagaagagaaagcccatccgggtcctgagcctgttcgatggcatcgccaccggtctgctggtgctgaaggacctgggcatccaggtggataggtacattgcctccgaggtgtgcgaggactccatcaccgtgggaatggtgcgtcatcagggcaagatcatgtacgtgggcgacgtgcggagcgtgacacagaagcatatccaggagtggggccctttcgacctggtgatcggcggcagcccttgcaatgacctgagcatcgtgaacccagcccggaagggcctgtacgagggaaccggcagactgttcttcgagttttacagactgctgcacgacgcccggcctaaggaaggcgacgaccggcccttcttttggctgttcgagaatgtggtggccatgggagtcagcgacaagcgggatattagccggttcctggagagcaaccccgtgatgatcgatgccaaggaagtgagcgccgcccaccgggccagatacttctggggcaatctgcctggcatgaacagacccctggccagcaccgtgaacgacaagctggagctgcaggagtgcctggagcacggccggatcgccaagttcagcaaggtgagaaccatcaccacccgaagcaacagcatcaaacaaggcaaggaccagcactttcctgtgttcatgaacgagaaggaggacatcctgtggtgtaccgagatggagagagtgttcgggttcccagtccactacacagatgtcagcaacatgtctagactggccagacagagactgctgggaagaagctggtccgtccctgtgatcagacacctgttcgcccctctgaaggagtacttcgcctgcgtgagcagcggcaacagcaacgccaacagccggggccccagcttctctagcggcctggtgccactgtccctgagagggagccacatgggccccatggagatctacaaaaccgtgagcgcctggaagcggcagcctgtgcgcgtgctgagcctgtttcggaatatcgataaagtcctgaaaagcctgggattcctggagagcggctctggctccggcggtggcaccctgaagtacgtggaggatgtgacaaacgtggtcagacgggatgtggagaagtggggccccttcgatctggtgtacggcagcacccaacccctgggcagctcttgtgaccggtgccctggctggtacatgtttcagttccaccggatcctgcagtacgccctgccgagacaggagtcccagcggccattcttttggattttcatggacaacttgctgctgaccgaggatgaccaggaaactaccactcggttcctgcagaccgaagccgtgaccctgcaggacgtgagaggccgggactaccagaacgccatgcgggtgtggtccaacatccctggactgaaaagcaagcacgcacctctgacccctaaagaagaggagtacctgcaggcccaggtgcggagcagaagcaagctggacgcccctaaggtggatctgctggtgaagaattgcctcctgcccctgagagagtacttcaagtatttcagccagaatagtctgcccctgggcggcccaagcagcggcgcccctcctcccagcggcggcagcccagccggctccccaacctctaccgaggagggcacctctgagtccgccacccccgagagcggccctggcacctccaccgagcccagcgagggcagcgcacccggcagccctgccggcagccccacctccacagaggagggaaccagcaccgagcccagcgaaggcagcgccccaggcaccagcaccgagcctagtgagggcggctctggcggcggcagcgcccaggagattaaacggatcaacaagatcagaagaagacttgtgaaagacagcaacaccaagaaggccggcaagacaggccccatgaaaaccctgctggttagagtgatgacacccgatctgagagagcggctggaaaacctgagaaagaagcctgaaaatatcccccagcccatcagcaatacatctagagccaacctgaataagctgctgaccgattacaccgaaatgaagaaggcgatcctgcatgtgtactgggaagagttccagaaggaccctgtgggcctgatgagccgggtggcccagcctgccagcaagaagatcgatcagaacaagctgaaacctgagatggacgagaagggcaacctgaccaccgccggctttgcctgctctcagtgtggccagcccctgttcgtgtacaagctggagcaggtgtctgagaagggcaaggcttacaccaactacttcggacggtgcaatgtggccgagcacgaaaagctgatcctgctggcccagctgaagcccgagaaggatagcgacgaagccgtgacatatagcctgggaaagtttgggcagagggccctggatttctacagcattcatgtgaccaaggagtccacccaccccgtgaagcccctggcccagatcgccggaaacagatacgcctccggacctgtgggaaaggccctgagcgacgcatgtatgggcacaatcgcctccttcctgtctaagtaccaggacatcatcatcgaacaccagaaggtggtgaagggcaaccagaagagactggagagcctgcgggagctggccggcaaggaaaacctggaataccctagcgtgaccctgccacctcagcctcacaccaaggagggcgttgatgcctacaacgaagtgatcgcccgggtgcgaatgtgggtgaacctgaacctgtggcagaagctgaagctaagcagagatgatgccaagcctctgctgagactgaagggattcccttcctttcctctggtcgagagacaggccaacgaagtggactggtgggacatggtgtgtaacgtgaagaagctgatcaacgagaaaaaggaggatggcaaggtgttttggcagaatctggctggctacaagagacaggaagccctgagaccatacctgagcagcgaggaagatcggaagaagggaaagaaattcgctcggtaccagctgggcgacctgctgctgcacctggaaaagaagcacggcgaggactggggaaaggtgtacgacgaggcctgggagcggattgacaagaaagtggaaggcctgagcaagcacatcaagctggaagaggaacggagaagcgaggacgcccagagcaaggccgccctgaccgactggctgcgggctaaggccagcttcgtgatcgagggcctgaaggaggccgacaaggacgagttctgcagatgcgagctgaagctgcagaagtggtacggggacctgcggggaaagcccttcgccatcgaagccgagaacagcatcctggacatcagcggcttcagcaagcagtacaactgtgccttcatctggcagaaggacggcgtgaagaagctgaacctgtacctgatcatcaactacttcaagggcggcaagctgcggttcaagaagatcaaacctgaagccttcgaagccaacagattctacaccgtgatcaacaaaaagagcggcgagatcgtgcccatggaggtgaacttcaacttcgacgaccccaacctgatcatcctgcctctggcctttggcaagagacagggcagagaattcatctggaacgacctgctgtccctggaaaccggcagcctgaagctggccaacggaagagtgatcgagaagacactgtacaacagaagaacccggcaggatgagcctgccctgttcgtggccctgaccttcgagcggcgggaggtcctggactcctccaatatcaaaccaatgaacctgatcggcgtggcaagaggcgaaaacatccccgccgtgatcgccctgaccgaccccgagggctgcccactgagccggtttaaggatagcctgggaaacccaacccacatcctgagaatcggcgagagctataaggagaagcagcggaccatccaggccaagaaggaggtggagcagcggagagccggcggctacagccggaagtacgccagcaaagccaagaatctggcagacgatatggtgagaaacaccgctagagatctgctgtactacgccgtgacccaggatgccatgctgatcttcgccaacctgagccggggcttcggccggcagggcaagcggaccttcatggccgagagacagtacacacggatggaggactggctgaccgccaagctggcctacgagggcctgagcaagacctacctgtccaagacactggcccagtacacctccaagacatgcagcaactgtgggtttaccatcaccagcgccgactacgacagggtgctggagaagctgaagaagacagcaacaggctggatgaccacaattaacggcaaggagctgaaggtggagggccagattacctactacaacagatacaagagacagaacgtagtcaaggacctgtccgtcgagctggatagactgagcgaagaatctgtgaacaacgacatctcctcctggacaaagggcagaagcggagaagctctgagcctcctgaagaaaagattctcccatagacccgtgcaggagaagttcgtgtgcctgaactgcggcttcgagacacacgcagccgagcaagccgccctgaacatcgccagatcctggctgttcctgcggagccaggagtacaagaaataccagacaaacaagacaaccggcaacaccgataagagagccttcgtcgagacctggcagtccttttaccggaagaagcttaaggaggtgtggaaacctgccgtgcggtctggcggatctggcggaggctccacaagcgaggtgcaggagaccctgaccttcgacgacgtggccgtggccttcacctgggaggagtggcagctgctggcccccgcccagaaggccctgtacagggacgtgatgctggagaaccacagcaacctggtgagcgtgggcttccaggccagcacccccgaggtgctgagcaagctggaccagggcgagccctggaccatggacgacgaggtgcactgcaggaccaggagcgaggtgtggaagttcaccagccccaagaaaaagagaaaagtctaagctgccttctgcggggcttgccttctggccatgcccttcttctctcccttgcacctgtacctcttggtctttgaataaagcctgagtaggaaggctagcaaaaaaaaaaaaaaaaaaaaaaaaaaaaaaaaaaaaaaaaaaaaaaaaaaaaaaaaaaaaaaaaaaaaaaaaaaaaaaaa

SEQ ID NO: 6922 - RNA, 5797 nt, synthetic construct
  source 1..5797: mol_type = other RNA
aggaaataagagagaaaagaagagtaagaagaaatataagagccaccatggcccctaagaagaagcgtaaagtgagccggatggaacgcctcgtctacgaggtgcggcagaagtgcagaaacatcgaggacatctgcatctcctgcggatctctgaacgtgaccctggagcacccactgttcatcggcggcatgtgccagaactgtaaaaactgttttctggagtgtgcctatcaatacgacgatgacggctaccagagctactgcaccatctgttgcggcggaagagaggtgctgatgtgtggaaataacaactgctgccggtgcttctgcgtggaatgcgtggacctgctggtgggccccggcgccgcccaggccgctattaaggaagatccttggaactgctacatgtgcggccacaagggcacatacggcctgctgagacggagagaggactggcctagcagactgcagatgttcttcgccaataaccacgaccaggagttcgacccccctaaggtgtaccctcccgtccccgccgagaagagaaagcccatccgggtcctgagcctgttcgatggcatcgccaccggtctgctggtgctgaaggacctgggcatccaggtggataggtacattgcctccgaggtgtgcgaggactccatcaccgtgggaatggtgcgtcatcagggcaagatcatgtacgtgggcgacgtgcggagcgtgacacagaagcatatccaggagtggggccctttcgacctggtgatcggcggcagcccttgcaatgacctgagcatcgtgaacccagcccggaagggcctgtacgagggaaccggcagactgttcttcgagttttacagactgctgcacgacgcccggcctaaggaaggcgacgaccggcccttcttttggctgttcgagaatgtggtggccatgggagtcagcgacaagcgggatattagccggttcctggagagcaaccccgtgatgatcgatgccaaggaagtgagcgccgcccaccgggccagatacttctggggcaatctgcctggcatgaacagacccctggccagcaccgtgaacgacaagctggagctgcaggagtgcctggagcacggccggatcgccaagttcagcaaggtgagaaccatcaccacccgaagcaacagcatcaaacaaggcaaggaccagcactttcctgtgttcatgaacgagaaggaggacatcctgtggtgtaccgagatggagagagtgttcgggttcccagtccactacacagatgtcagcaacatgtctagactggccagacagagactgctgggaagaagctggtccgtccctgtgatcagacacctgttcgcccctctgaaggagtacttcgcctgcgtgagcagcggcaacagcaacgccaacagccggggccccagcttctctagcggcctggtgccactgtccctgagagggagccacatgggccccatggagatctacaaaaccgtgagcgcctggaagcggcagcctgtgcgcgtgctgagcctgtttcggaatatcgataaagtcctgaaaagcctgggattcctggagagcggctctggctccggcggtggcaccctgaagtacgtggaggatgtgacaaacgtggtcagacgggatgtggagaagtggggccccttcgatctggtgtacggcagcacccaacccctgggcagctcttgtgaccggtgccctggctggtacatgtttcagttccaccggatcctgcagtacgccctgccgagacaggagtcccagcggccattcttttggattttcatggacaacttgctgctgaccgaggatgaccaggaaactaccactcggttcctgcagaccgaagccgtgaccctgcaggacgtgagaggccgggactaccagaacgccatgcgggtgtggtccaacatccctggactgaaaagcaagcacgcacctctgacccctaaagaagaggagtacctgcaggcccaggtgcggagcagaagcaagctggacgcccctaaggtggatctgctggtgaagaattgcctcctgcccctgagagagtacttcaagtatttcagccagaatagtctgcccctgggcggcccaagcagcggcgcccctcctcccagcggcggcagcccagccggctccccaacctctaccgaggagggcacctctgagtccgccacccccgagagcggccctggcacctccaccgagcccagcgagggcagcgcacccggcagccctgccggcagccccacctccacagaggagggaaccagcaccgagcccagcgaaggcagcgccccaggcaccagcaccgagcctagtgagggcggctctggcggcggcagcgcccaggagattaaacggatcaacaagatcagaagaagacttgtgaaagacagcaacaccaagaaggccggcaagacaggccccatgaaaaccctgctggttagagtgatgacacccgatctgagagagcggctggaaaacctgagaaagaagcctgaaaatatcccccagcccatcagcaatacatctagagccaacctgaataagctgctgaccgattacaccgaaatgaagaaggcgatcctgcatgtgtactgggaagagttccagaaggaccctgtgggcctgatgagccgggtggcccagcctgccagcaagaagatcgatcagaacaagctgaaacctgagatggacgagaagggcaacctgaccaccgccggctttgcctgctctcagtgtggccagcccctgttcgtgtacaagctggagcaggtgtctgagaagggcaaggcttacaccaactacttcggacggtgcaatgtggccgagcacgaaaagctgatcctgctggcccagctgaagcccgagaaggatagcgacgaagccgtgacatatagcctgggaaagtttgggcagagggccctggatttctacagcattcatgtgaccaaggagtccacccaccccgtgaagcccctggcccagatcgccggaaacagatacgcctccggacctgtgggaaaggccctgagcgacgcatgtatgggcacaatcgcctccttcctgtctaagtaccaggacatcatcatcgaacaccagaaggtggtgaagggcaaccagaagagactggagagcctgcgggagctggccggcaaggaaaacctggaataccctagcgtgaccctgccacctcagcctcacaccaaggagggcgttgatgcctacaacgaagtgatcgcccgggtgcgaatgtgggtgaacctgaacctgtggcagaagctgaagctaagcagagatgatgccaagcctctgctgagactgaagggattcccttcctttcctctggtcgagagacaggccaacgaagtggactggtgggacatggtgtgtaacgtgaagaagctgatcaacgagaaaaaggaggatggcaaggtgttttggcagaatctggctggctacaagagacaggaagccctgagaccatacctgagcagcgaggaagatcggaagaagggaaagaaattcgctcggtaccagctgggcgacctgctgctgcacctggaaaagaagcacggcgaggactggggaaaggtgtacgacgaggcctgggagcggattgacaagaaagtggaaggcctgagcaagcacatcaagctggaagaggaacggagaagcgaggacgcccagagcaaggccgccctgaccgactggctgcgggctaaggccagcttcgtgatcgagggcctgaaggaggccgacaaggacgagttctgcagatgcgagctgaagctgcagaagtggtacggggacctgcggggaaagcccttcgccatcgaagccgagaacagcatcctggacatcagcggcttcagcaagcagtacaactgtgccttcatctggcagaaggacggcgtgaagaagctgaacctgtacctgatcatcaactacttcaagggcggcaagctgcggttcaagaagatcaaacctgaagccttcgaagccaacagattctacaccgtgatcaacaaaaagagcggcgagatcgtgcccatggaggtgaacttcaacttcgacgaccccaacctgatcatcctgcctctggcctttggcaagagacagggcagagaattcatctggaacgacctgctgtccctggaaaccggcagcctgaagctggccaacggaagagtgatcgagaagacactgtacaacagaagaacccggcaggatgagcctgccctgttcgtggccctgaccttcgagcggcgggaggtcctggactcctccaatatcaaaccaatgaacctgatcggcgtggcaagaggcgaaaacatccccgccgtgatcgccctgaccgaccccgagggctgcccactgagccggtttaaggatagcctgggaaacccaacccacatcctgagaatcggcgagagctataaggagaagcagcggaccatccaggccaagaaggaggtggagcagcggagagccggcggctacagccggaagtacgccagcaaagccaagaatctggcagacgatatggtgagaaacaccgctagagatctgctgtactacgccgtgacccaggatgccatgctgatcttcgccaacctgagccggggcttcggccggcagggcaagcggaccttcatggccgagagacagtacacacggatggaggactggctgaccgccaagctggcctacgagggcctgagcaagacctacctgtccaagacactggcccagtacacctccaagacatgcagcaactgtgggtttaccatcaccagcgccgactacgacagggtgctggagaagctgaagaagacagcaacaggctggatgaccacaattaacggcaaggagctgaaggtggagggccagattacctactacaacagatacaagagacagaacgtagtcaaggacctgtccgtcgagctggatagactgagcgaagaatctgtgaacaacgacatctcctcctggacaaagggcagaagcggagaagctctgagcctcctgaagaaaagattctcccatagacccgtgcaggagaagttcgtgtgcctgaactgcggcttcgagacacacgcagccgagcaagccgccctgaacatcgccagatcctggctgttcctgcggagccaggagtacaagaaataccagacaaacaagacaaccggcaacaccgataagagagccttcgtcgagacctggcagtccttttaccggaagaagcttaaggaggtgtggaaacctgccgtgcggtctggcggatctggcggaggctccacaagcagccagggcctggtgaccttcgaggacgtggccgtgtacttcagcctggaggagtggcagaggctggacgccgcccagagggacctgtacaaggaggtgatgcaggagaactacggcatcctggtgagcctgggctaccccatccccaagcccgacctgatcttcaggctggagcagggcgaggagccctgggtgcccgacagccccagccccgaggagggcgacatcgtgaccggcgtgtacaccagccccaagaaaaagagaaaagtctaagctgccttctgcggggcttgccttctggccatgcccttcttctctcccttgcacctgtacctcttggtctttgaataaagcctgagtaggaaggctagcaaaaaaaaaaaaaaaaaaaaaaaaaaaaaaaaaaaaaaaaaaaaaaaaaaaaaaaaaaaaaaaaaaaaaaaaaaaaaaaa

SEQ ID NO: 6923 - RNA, 5797 nt, synthetic construct
  source 1..5797: mol_type = other RNA
aggaaataagagagaaaagaagagtaagaagaaatataagagccaccatggcccctaagaagaagcgtaaagtgagccggatggaacgcctcgtctacgaggtgcggcagaagtgcagaaacatcgaggacatctgcatctcctgcggatctctgaacgtgaccctggagcacccactgttcatcggcggcatgtgccagaactgtaaaaactgttttctggagtgtgcctatcaatacgacgatgacggctaccagagctactgcaccatctgttgcggcggaagagaggtgctgatgtgtggaaataacaactgctgccggtgcttctgcgtggaatgcgtggacctgctggtgggccccggcgccgcccaggccgctattaaggaagatccttggaactgctacatgtgcggccacaagggcacatacggcctgctgagacggagagaggactggcctagcagactgcagatgttcttcgccaataaccacgaccaggagttcgacccccctaaggtgtaccctcccgtccccgccgagaagagaaagcccatccgggtcctgagcctgttcgatggcatcgccaccggtctgctggtgctgaaggacctgggcatccaggtggataggtacattgcctccgaggtgtgcgaggactccatcaccgtgggaatggtgcgtcatcagggcaagatcatgtacgtgggcgacgtgcggagcgtgacacagaagcatatccaggagtggggccctttcgacctggtgatcggcggcagcccttgcaatgacctgagcatcgtgaacccagcccggaagggcctgtacgagggaaccggcagactgttcttcgagttttacagactgctgcacgacgcccggcctaaggaaggcgacgaccggcccttcttttggctgttcgagaatgtggtggccatgggagtcagcgacaagcgggatattagccggttcctggagagcaaccccgtgatgatcgatgccaaggaagtgagcgccgcccaccgggccagatacttctggggcaatctgcctggcatgaacagacccctggccagcaccgtgaacgacaagctggagctgcaggagtgcctggagcacggccggatcgccaagttcagcaaggtgagaaccatcaccacccgaagcaacagcatcaaacaaggcaaggaccagcactttcctgtgttcatgaacgagaaggaggacatcctgtggtgtaccgagatggagagagtgttcgggttcccagtccactacacagatgtcagcaacatgtctagactggccagacagagactgctgggaagaagctggtccgtccctgtgatcagacacctgttcgcccctctgaaggagtacttcgcctgcgtgagcagcggcaacagcaacgccaacagccggggccccagcttctctagcggcctggtgccactgtccctgagagggagccacatgggccccatggagatctacaaaaccgtgagcgcctggaagcggcagcctgtgcgcgtgctgagcctgtttcggaatatcgataaagtcctgaaaagcctgggattcctggagagcggctctggctccggcggtggcaccctgaagtacgtggaggatgtgacaaacgtggtcagacgggatgtggagaagtggggccccttcgatctggtgtacggcagcacccaacccctgggcagctcttgtgaccggtgccctggctggtacatgtttcagttccaccggatcctgcagtacgccctgccgagacaggagtcccagcggccattcttttggattttcatggacaacttgctgctgaccgaggatgaccaggaaactaccactcggttcctgcagaccgaagccgtgaccctgcaggacgtgagaggccgggactaccagaacgccatgcgggtgtggtccaacatccctggactgaaaagcaagcacgcacctctgacccctaaagaagaggagtacctgcaggcccaggtgcggagcagaagcaagctggacgcccctaaggtggatctgctggtgaagaattgcctcctgcccctgagagagtacttcaagtatttcagccagaatagtctgcccctgggcggcccaagcagcggcgcccctcctcccagcggcggcagcccagccggctccccaacctctaccgaggagggcacctctgagtccgccacccccgagagcggccctggcacctccaccgagcccagcgagggcagcgcacccggcagccctgccggcagccccacctccacagaggagggaaccagcaccgagcccagcgaaggcagcgccccaggcaccagcaccgagcctagtgagggcggctctggcggcggcagcgcccaggagattaaacggatcaacaagatcagaagaagacttgtgaaagacagcaacaccaagaaggccggcaagacaggccccatgaaaaccctgctggttagagtgatgacacccgatctgagagagcggctggaaaacctgagaaagaagcctgaaaatatcccccagcccatcagcaatacatctagagccaacctgaataagctgctgaccgattacaccgaaatgaagaaggcgatcctgcatgtgtactgggaagagttccagaaggaccctgtgggcctgatgagccgggtggcccagcctgccagcaagaagatcgatcagaacaagctgaaacctgagatggacgagaagggcaacctgaccaccgccggctttgcctgctctcagtgtggccagcccctgttcgtgtacaagctggagcaggtgtctgagaagggcaaggcttacaccaactacttcggacggtgcaatgtggccgagcacgaaaagctgatcctgctggcccagctgaagcccgagaaggatagcgacgaagccgtgacatatagcctgggaaagtttgggcagagggccctggatttctacagcattcatgtgaccaaggagtccacccaccccgtgaagcccctggcccagatcgccggaaacagatacgcctccggacctgtgggaaaggccctgagcgacgcatgtatgggcacaatcgcctccttcctgtctaagtaccaggacatcatcatcgaacaccagaaggtggtgaagggcaaccagaagagactggagagcctgcgggagctggccggcaaggaaaacctggaataccctagcgtgaccctgccacctcagcctcacaccaaggagggcgttgatgcctacaacgaagtgatcgcccgggtgcgaatgtgggtgaacctgaacctgtggcagaagctgaagctaagcagagatgatgccaagcctctgctgagactgaagggattcccttcctttcctctggtcgagagacaggccaacgaagtggactggtgggacatggtgtgtaacgtgaagaagctgatcaacgagaaaaaggaggatggcaaggtgttttggcagaatctggctggctacaagagacaggaagccctgagaccatacctgagcagcgaggaagatcggaagaagggaaagaaattcgctcggtaccagctgggcgacctgctgctgcacctggaaaagaagcacggcgaggactggggaaaggtgtacgacgaggcctgggagcggattgacaagaaagtggaaggcctgagcaagcacatcaagctggaagaggaacggagaagcgaggacgcccagagcaaggccgccctgaccgactggctgcgggctaaggccagcttcgtgatcgagggcctgaaggaggccgacaaggacgagttctgcagatgcgagctgaagctgcagaagtggtacggggacctgcggggaaagcccttcgccatcgaagccgagaacagcatcctggacatcagcggcttcagcaagcagtacaactgtgccttcatctggcagaaggacggcgtgaagaagctgaacctgtacctgatcatcaactacttcaagggcggcaagctgcggttcaagaagatcaaacctgaagccttcgaagccaacagattctacaccgtgatcaacaaaaagagcggcgagatcgtgcccatggaggtgaacttcaacttcgacgaccccaacctgatcatcctgcctctggcctttggcaagagacagggcagagaattcatctggaacgacctgctgtccctggaaaccggcagcctgaagctggccaacggaagagtgatcgagaagacactgtacaacagaagaacccggcaggatgagcctgccctgttcgtggccctgaccttcgagcggcgggaggtcctggactcctccaatatcaaaccaatgaacctgatcggcgtggcaagaggcgaaaacatccccgccgtgatcgccctgaccgaccccgagggctgcccactgagccggtttaaggatagcctgggaaacccaacccacatcctgagaatcggcgagagctataaggagaagcagcggaccatccaggccaagaaggaggtggagcagcggagagccggcggctacagccggaagtacgccagcaaagccaagaatctggcagacgatatggtgagaaacaccgctagagatctgctgtactacgccgtgacccaggatgccatgctgatcttcgccaacctgagccggggcttcggccggcagggcaagcggaccttcatggccgagagacagtacacacggatggaggactggctgaccgccaagctggcctacgagggcctgagcaagacctacctgtccaagacactggcccagtacacctccaagacatgcagcaactgtgggtttaccatcaccagcgccgactacgacagggtgctggagaagctgaagaagacagcaacaggctggatgaccacaattaacggcaaggagctgaaggtggagggccagattacctactacaacagatacaagagacagaacgtagtcaaggacctgtccgtcgagctggatagactgagcgaagaatctgtgaacaacgacatctcctcctggacaaagggcagaagcggagaagctctgagcctcctgaagaaaagattctcccatagacccgtgcaggagaagttcgtgtgcctgaactgcggcttcgagacacacgcagccgagcaagccgccctgaacatcgccagatcctggctgttcctgcggagccaggagtacaagaaataccagacaaacaagacaaccggcaacaccgataagagagccttcgtcgagacctggcagtccttttaccggaagaagcttaaggaggtgtggaaacctgccgtgcggtctggcggatctggcggaggctccacaagcagcctggagagcgtgaccttccaggacgtggccgtgaacttcacccaggaggagtggggccacctggagcccgcccagaaggacctgtacagggaggtgatgctggagaactaccagaacttcgtgagcctgggcctgcccttcagcaagccccacgtgatcagccagctggagaggggcgaggccccctggatcaccgagagggacgtgcccagggtgagctgccaggacttcttcatccagaccagccccaagaaaaagagaaaagtctaagctgccttctgcggggcttgccttctggccatgcccttcttctctcccttgcacctgtacctcttggtctttgaataaagcctgagtaggaaggctagcaaaaaaaaaaaaaaaaaaaaaaaaaaaaaaaaaaaaaaaaaaaaaaaaaaaaaaaaaaaaaaaaaaaaaaaaaaaaaaaa

SEQ ID NO: 6924 - RNA, 5797 nt, synthetic construct
  source 1..5797: mol_type = other RNA
aggaaataagagagaaaagaagagtaagaagaaatataagagccaccatggcccctaagaagaagcgtaaagtgagccggatggaacgcctcgtctacgaggtgcggcagaagtgcagaaacatcgaggacatctgcatctcctgcggatctctgaacgtgaccctggagcacccactgttcatcggcggcatgtgccagaactgtaaaaactgttttctggagtgtgcctatcaatacgacgatgacggctaccagagctactgcaccatctgttgcggcggaagagaggtgctgatgtgtggaaataacaactgctgccggtgcttctgcgtggaatgcgtggacctgctggtgggccccggcgccgcccaggccgctattaaggaagatccttggaactgctacatgtgcggccacaagggcacatacggcctgctgagacggagagaggactggcctagcagactgcagatgttcttcgccaataaccacgaccaggagttcgacccccctaaggtgtaccctcccgtccccgccgagaagagaaagcccatccgggtcctgagcctgttcgatggcatcgccaccggtctgctggtgctgaaggacctgggcatccaggtggataggtacattgcctccgaggtgtgcgaggactccatcaccgtgggaatggtgcgtcatcagggcaagatcatgtacgtgggcgacgtgcggagcgtgacacagaagcatatccaggagtggggccctttcgacctggtgatcggcggcagcccttgcaatgacctgagcatcgtgaacccagcccggaagggcctgtacgagggaaccggcagactgttcttcgagttttacagactgctgcacgacgcccggcctaaggaaggcgacgaccggcccttcttttggctgttcgagaatgtggtggccatgggagtcagcgacaagcgggatattagccggttcctggagagcaaccccgtgatgatcgatgccaaggaagtgagcgccgcccaccgggccagatacttctggggcaatctgcctggcatgaacagacccctggccagcaccgtgaacgacaagctggagctgcaggagtgcctggagcacggccggatcgccaagttcagcaaggtgagaaccatcaccacccgaagcaacagcatcaaacaaggcaaggaccagcactttcctgtgttcatgaacgagaaggaggacatcctgtggtgtaccgagatggagagagtgttcgggttcccagtccactacacagatgtcagcaacatgtctagactggccagacagagactgctgggaagaagctggtccgtccctgtgatcagacacctgttcgcccctctgaaggagtacttcgcctgcgtgagcagcggcaacagcaacgccaacagccggggccccagcttctctagcggcctggtgccactgtccctgagagggagccacatgggccccatggagatctacaaaaccgtgagcgcctggaagcggcagcctgtgcgcgtgctgagcctgtttcggaatatcgataaagtcctgaaaagcctgggattcctggagagcggctctggctccggcggtggcaccctgaagtacgtggaggatgtgacaaacgtggtcagacgggatgtggagaagtggggccccttcgatctggtgtacggcagcacccaacccctgggcagctcttgtgaccggtgccctggctggtacatgtttcagttccaccggatcctgcagtacgccctgccgagacaggagtcccagcggccattcttttggattttcatggacaacttgctgctgaccgaggatgaccaggaaactaccactcggttcctgcagaccgaagccgtgaccctgcaggacgtgagaggccgggactaccagaacgccatgcgggtgtggtccaacatccctggactgaaaagcaagcacgcacctctgacccctaaagaagaggagtacctgcaggcccaggtgcggagcagaagcaagctggacgcccctaaggtggatctgctggtgaagaattgcctcctgcccctgagagagtacttcaagtatttcagccagaatagtctgcccctgggcggcccaagcagcggcgcccctcctcccagcggcggcagcccagccggctccccaacctctaccgaggagggcacctctgagtccgccacccccgagagcggccctggcacctccaccgagcccagcgagggcagcgcacccggcagccctgccggcagccccacctccacagaggagggaaccagcaccgagcccagcgaaggcagcgccccaggcaccagcaccgagcctagtgagggcggctctggcggcggcagcgcccaggagattaaacggatcaacaagatcagaagaagacttgtgaaagacagcaacaccaagaaggccggcaagacaggccccatgaaaaccctgctggttagagtgatgacacccgatctgagagagcggctggaaaacctgagaaagaagcctgaaaatatcccccagcccatcagcaatacatctagagccaacctgaataagctgctgaccgattacaccgaaatgaagaaggcgatcctgcatgtgtactgggaagagttccagaaggaccctgtgggcctgatgagccgggtggcccagcctgccagcaagaagatcgatcagaacaagctgaaacctgagatggacgagaagggcaacctgaccaccgccggctttgcctgctctcagtgtggccagcccctgttcgtgtacaagctggagcaggtgtctgagaagggcaaggcttacaccaactacttcggacggtgcaatgtggccgagcacgaaaagctgatcctgctggcccagctgaagcccgagaaggatagcgacgaagccgtgacatatagcctgggaaagtttgggcagagggccctggatttctacagcattcatgtgaccaaggagtccacccaccccgtgaagcccctggcccagatcgccggaaacagatacgcctccggacctgtgggaaaggccctgagcgacgcatgtatgggcacaatcgcctccttcctgtctaagtaccaggacatcatcatcgaacaccagaaggtggtgaagggcaaccagaagagactggagagcctgcgggagctggccggcaaggaaaacctggaataccctagcgtgaccctgccacctcagcctcacaccaaggagggcgttgatgcctacaacgaagtgatcgcccgggtgcgaatgtgggtgaacctgaacctgtggcagaagctgaagctaagcagagatgatgccaagcctctgctgagactgaagggattcccttcctttcctctggtcgagagacaggccaacgaagtggactggtgggacatggtgtgtaacgtgaagaagctgatcaacgagaaaaaggaggatggcaaggtgttttggcagaatctggctggctacaagagacaggaagccctgagaccatacctgagcagcgaggaagatcggaagaagggaaagaaattcgctcggtaccagctgggcgacctgctgctgcacctggaaaagaagcacggcgaggactggggaaaggtgtacgacgaggcctgggagcggattgacaagaaagtggaaggcctgagcaagcacatcaagctggaagaggaacggagaagcgaggacgcccagagcaaggccgccctgaccgactggctgcgggctaaggccagcttcgtgatcgagggcctgaaggaggccgacaaggacgagttctgcagatgcgagctgaagctgcagaagtggtacggggacctgcggggaaagcccttcgccatcgaagccgagaacagcatcctggacatcagcggcttcagcaagcagtacaactgtgccttcatctggcagaaggacggcgtgaagaagctgaacctgtacctgatcatcaactacttcaagggcggcaagctgcggttcaagaagatcaaacctgaagccttcgaagccaacagattctacaccgtgatcaacaaaaagagcggcgagatcgtgcccatggaggtgaacttcaacttcgacgaccccaacctgatcatcctgcctctggcctttggcaagagacagggcagagaattcatctggaacgacctgctgtccctggaaaccggcagcctgaagctggccaacggaagagtgatcgagaagacactgtacaacagaagaacccggcaggatgagcctgccctgttcgtggccctgaccttcgagcggcgggaggtcctggactcctccaatatcaaaccaatgaacctgatcggcgtggcaagaggcgaaaacatccccgccgtgatcgccctgaccgaccccgagggctgcccactgagccggtttaaggatagcctgggaaacccaacccacatcctgagaatcggcgagagctataaggagaagcagcggaccatccaggccaagaaggaggtggagcagcggagagccggcggctacagccggaagtacgccagcaaagccaagaatctggcagacgatatggtgagaaacaccgctagagatctgctgtactacgccgtgacccaggatgccatgctgatcttcgccaacctgagccggggcttcggccggcagggcaagcggaccttcatggccgagagacagtacacacggatggaggactggctgaccgccaagctggcctacgagggcctgagcaagacctacctgtccaagacactggcccagtacacctccaagacatgcagcaactgtgggtttaccatcaccagcgccgactacgacagggtgctggagaagctgaagaagacagcaacaggctggatgaccacaattaacggcaaggagctgaaggtggagggccagattacctactacaacagatacaagagacagaacgtagtcaaggacctgtccgtcgagctggatagactgagcgaagaatctgtgaacaacgacatctcctcctggacaaagggcagaagcggagaagctctgagcctcctgaagaaaagattctcccatagacccgtgcaggagaagttcgtgtgcctgaactgcggcttcgagacacacgcagccgagcaagccgccctgaacatcgccagatcctggctgttcctgcggagccaggagtacaagaaataccagacaaacaagacaaccggcaacaccgataagagagccttcgtcgagacctggcagtccttttaccggaagaagcttaaggaggtgtggaaacctgccgtgcggtctggcggatctggcggaggctccacaagcaagagcaagagcaaggcccccgtgaccttcggcgacctggccatctacttcagccaggaggagtgggagtggctgagccccatccagaaggacctgtacgaggacgtgatgctggagaactaccagaacctggtgagcctgggcctgagcttcaggaggcccaacgtgatcaccctgctggagaagggcaaggccccctggatggtggagcccgtgaagaggaggaggggcctgggccccctgaccagccccaagaaaaagagaaaagtctaagctgccttctgcggggcttgccttctggccatgcccttcttctctcccttgcacctgtacctcttggtctttgaataaagcctgagtaggaaggctagcaaaaaaaaaaaaaaaaaaaaaaaaaaaaaaaaaaaaaaaaaaaaaaaaaaaaaaaaaaaaaaaaaaaaaaaaaaaaaaaa

SEQ ID NO: 6925 - RNA, 5797 nt, synthetic construct
  source 1..5797: mol_type = other RNA
aggaaataagagagaaaagaagagtaagaagaaatataagagccaccatggcccctaagaagaagcgtaaagtgagccggatggaacgcctcgtctacgaggtgcggcagaagtgcagaaacatcgaggacatctgcatctcctgcggatctctgaacgtgaccctggagcacccactgttcatcggcggcatgtgccagaactgtaaaaactgttttctggagtgtgcctatcaatacgacgatgacggctaccagagctactgcaccatctgttgcggcggaagagaggtgctgatgtgtggaaataacaactgctgccggtgcttctgcgtggaatgcgtggacctgctggtgggccccggcgccgcccaggccgctattaaggaagatccttggaactgctacatgtgcggccacaagggcacatacggcctgctgagacggagagaggactggcctagcagactgcagatgttcttcgccaataaccacgaccaggagttcgacccccctaaggtgtaccctcccgtccccgccgagaagagaaagcccatccgggtcctgagcctgttcgatggcatcgccaccggtctgctggtgctgaaggacctgggcatccaggtggataggtacattgcctccgaggtgtgcgaggactccatcaccgtgggaatggtgcgtcatcagggcaagatcatgtacgtgggcgacgtgcggagcgtgacacagaagcatatccaggagtggggccctttcgacctggtgatcggcggcagcccttgcaatgacctgagcatcgtgaacccagcccggaagggcctgtacgagggaaccggcagactgttcttcgagttttacagactgctgcacgacgcccggcctaaggaaggcgacgaccggcccttcttttggctgttcgagaatgtggtggccatgggagtcagcgacaagcgggatattagccggttcctggagagcaaccccgtgatgatcgatgccaaggaagtgagcgccgcccaccgggccagatacttctggggcaatctgcctggcatgaacagacccctggccagcaccgtgaacgacaagctggagctgcaggagtgcctggagcacggccggatcgccaagttcagcaaggtgagaaccatcaccacccgaagcaacagcatcaaacaaggcaaggaccagcactttcctgtgttcatgaacgagaaggaggacatcctgtggtgtaccgagatggagagagtgttcgggttcccagtccactacacagatgtcagcaacatgtctagactggccagacagagactgctgggaagaagctggtccgtccctgtgatcagacacctgttcgcccctctgaaggagtacttcgcctgcgtgagcagcggcaacagcaacgccaacagccggggccccagcttctctagcggcctggtgccactgtccctgagagggagccacatgggccccatggagatctacaaaaccgtgagcgcctggaagcggcagcctgtgcgcgtgctgagcctgtttcggaatatcgataaagtcctgaaaagcctgggattcctggagagcggctctggctccggcggtggcaccctgaagtacgtggaggatgtgacaaacgtggtcagacgggatgtggagaagtggggccccttcgatctggtgtacggcagcacccaacccctgggcagctcttgtgaccggtgccctggctggtacatgtttcagttccaccggatcctgcagtacgccctgccgagacaggagtcccagcggccattcttttggattttcatggacaacttgctgctgaccgaggatgaccaggaaactaccactcggttcctgcagaccgaagccgtgaccctgcaggacgtgagaggccgggactaccagaacgccatgcgggtgtggtccaacatccctggactgaaaagcaagcacgcacctctgacccctaaagaagaggagtacctgcaggcccaggtgcggagcagaagcaagctggacgcccctaaggtggatctgctggtgaagaattgcctcctgcccctgagagagtacttcaagtatttcagccagaatagtctgcccctgggcggcccaagcagcggcgcccctcctcccagcggcggcagcccagccggctccccaacctctaccgaggagggcacctctgagtccgccacccccgagagcggccctggcacctccaccgagcccagcgagggcagcgcacccggcagccctgccggcagccccacctccacagaggagggaaccagcaccgagcccagcgaaggcagcgccccaggcaccagcaccgagcctagtgagggcggctctggcggcggcagcgcccaggagattaaacggatcaacaagatcagaagaagacttgtgaaagacagcaacaccaagaaggccggcaagacaggccccatgaaaaccctgctggttagagtgatgacacccgatctgagagagcggctggaaaacctgagaaagaagcctgaaaatatcccccagcccatcagcaatacatctagagccaacctgaataagctgctgaccgattacaccgaaatgaagaaggcgatcctgcatgtgtactgggaagagttccagaaggaccctgtgggcctgatgagccgggtggcccagcctgccagcaagaagatcgatcagaacaagctgaaacctgagatggacgagaagggcaacctgaccaccgccggctttgcctgctctcagtgtggccagcccctgttcgtgtacaagctggagcaggtgtctgagaagggcaaggcttacaccaactacttcggacggtgcaatgtggccgagcacgaaaagctgatcctgctggcccagctgaagcccgagaaggatagcgacgaagccgtgacatatagcctgggaaagtttgggcagagggccctggatttctacagcattcatgtgaccaaggagtccacccaccccgtgaagcccctggcccagatcgccggaaacagatacgcctccggacctgtgggaaaggccctgagcgacgcatgtatgggcacaatcgcctccttcctgtctaagtaccaggacatcatcatcgaacaccagaaggtggtgaagggcaaccagaagagactggagagcctgcgggagctggccggcaaggaaaacctggaataccctagcgtgaccctgccacctcagcctcacaccaaggagggcgttgatgcctacaacgaagtgatcgcccgggtgcgaatgtgggtgaacctgaacctgtggcagaagctgaagctaagcagagatgatgccaagcctctgctgagactgaagggattcccttcctttcctctggtcgagagacaggccaacgaagtggactggtgggacatggtgtgtaacgtgaagaagctgatcaacgagaaaaaggaggatggcaaggtgttttggcagaatctggctggctacaagagacaggaagccctgagaccatacctgagcagcgaggaagatcggaagaagggaaagaaattcgctcggtaccagctgggcgacctgctgctgcacctggaaaagaagcacggcgaggactggggaaaggtgtacgacgaggcctgggagcggattgacaagaaagtggaaggcctgagcaagcacatcaagctggaagaggaacggagaagcgaggacgcccagagcaaggccgccctgaccgactggctgcgggctaaggccagcttcgtgatcgagggcctgaaggaggccgacaaggacgagttctgcagatgcgagctgaagctgcagaagtggtacggggacctgcggggaaagcccttcgccatcgaagccgagaacagcatcctggacatcagcggcttcagcaagcagtacaactgtgccttcatctggcagaaggacggcgtgaagaagctgaacctgtacctgatcatcaactacttcaagggcggcaagctgcggttcaagaagatcaaacctgaagccttcgaagccaacagattctacaccgtgatcaacaaaaagagcggcgagatcgtgcccatggaggtgaacttcaacttcgacgaccccaacctgatcatcctgcctctggcctttggcaagagacagggcagagaattcatctggaacgacctgctgtccctggaaaccggcagcctgaagctggccaacggaagagtgatcgagaagacactgtacaacagaagaacccggcaggatgagcctgccctgttcgtggccctgaccttcgagcggcgggaggtcctggactcctccaatatcaaaccaatgaacctgatcggcgtggcaagaggcgaaaacatccccgccgtgatcgccctgaccgaccccgagggctgcccactgagccggtttaaggatagcctgggaaacccaacccacatcctgagaatcggcgagagctataaggagaagcagcggaccatccaggccaagaaggaggtggagcagcggagagccggcggctacagccggaagtacgccagcaaagccaagaatctggcagacgatatggtgagaaacaccgctagagatctgctgtactacgccgtgacccaggatgccatgctgatcttcgccaacctgagccggggcttcggccggcagggcaagcggaccttcatggccgagagacagtacacacggatggaggactggctgaccgccaagctggcctacgagggcctgagcaagacctacctgtccaagacactggcccagtacacctccaagacatgcagcaactgtgggtttaccatcaccagcgccgactacgacagggtgctggagaagctgaagaagacagcaacaggctggatgaccacaattaacggcaaggagctgaaggtggagggccagattacctactacaacagatacaagagacagaacgtagtcaaggacctgtccgtcgagctggatagactgagcgaagaatctgtgaacaacgacatctcctcctggacaaagggcagaagcggagaagctctgagcctcctgaagaaaagattctcccatagacccgtgcaggagaagttcgtgtgcctgaactgcggcttcgagacacacgcagccgagcaagccgccctgaacatcgccagatcctggctgttcctgcggagccaggagtacaagaaataccagacaaacaagacaaccggcaacaccgataagagagccttcgtcgagacctggcagtccttttaccggaagaagcttaaggaggtgtggaaacctgccgtgcggtctggcggatctggcggaggctccacaagcaagcccggcgccgtgagcttcgccgacgtggccgtgtacttcagccccgaggagtggggctgcctgaggcccgcccagagggccctgtacagggacgtgatgagggagacctacggccacctgggcgccctgggcttcaggggcaccaagcccgccctgatcagctgggtggaggaggaggccgacctgtggggccccgacgccagggaccccgaggtgggcgagtgcctgaccgccgccgacaccagccccaagaaaaagagaaaagtctaagctgccttctgcggggcttgccttctggccatgcccttcttctctcccttgcacctgtacctcttggtctttgaataaagcctgagtaggaaggctagcaaaaaaaaaaaaaaaaaaaaaaaaaaaaaaaaaaaaaaaaaaaaaaaaaaaaaaaaaaaaaaaaaaaaaaaaaaaaaaaa

SEQ ID NO: 6926 - RNA, 5797 nt, synthetic construct
  source 1..5797: mol_type = other RNA
aggaaataagagagaaaagaagagtaagaagaaatataagagccaccatggcccctaagaagaagcgtaaagtgagccggatggaacgcctcgtctacgaggtgcggcagaagtgcagaaacatcgaggacatctgcatctcctgcggatctctgaacgtgaccctggagcacccactgttcatcggcggcatgtgccagaactgtaaaaactgttttctggagtgtgcctatcaatacgacgatgacggctaccagagctactgcaccatctgttgcggcggaagagaggtgctgatgtgtggaaataacaactgctgccggtgcttctgcgtggaatgcgtggacctgctggtgggccccggcgccgcccaggccgctattaaggaagatccttggaactgctacatgtgcggccacaagggcacatacggcctgctgagacggagagaggactggcctagcagactgcagatgttcttcgccaataaccacgaccaggagttcgacccccctaaggtgtaccctcccgtccccgccgagaagagaaagcccatccgggtcctgagcctgttcgatggcatcgccaccggtctgctggtgctgaaggacctgggcatccaggtggataggtacattgcctccgaggtgtgcgaggactccatcaccgtgggaatggtgcgtcatcagggcaagatcatgtacgtgggcgacgtgcggagcgtgacacagaagcatatccaggagtggggccctttcgacctggtgatcggcggcagcccttgcaatgacctgagcatcgtgaacccagcccggaagggcctgtacgagggaaccggcagactgttcttcgagttttacagactgctgcacgacgcccggcctaaggaaggcgacgaccggcccttcttttggctgttcgagaatgtggtggccatgggagtcagcgacaagcgggatattagccggttcctggagagcaaccccgtgatgatcgatgccaaggaagtgagcgccgcccaccgggccagatacttctggggcaatctgcctggcatgaacagacccctggccagcaccgtgaacgacaagctggagctgcaggagtgcctggagcacggccggatcgccaagttcagcaaggtgagaaccatcaccacccgaagcaacagcatcaaacaaggcaaggaccagcactttcctgtgttcatgaacgagaaggaggacatcctgtggtgtaccgagatggagagagtgttcgggttcccagtccactacacagatgtcagcaacatgtctagactggccagacagagactgctgggaagaagctggtccgtccctgtgatcagacacctgttcgcccctctgaaggagtacttcgcctgcgtgagcagcggcaacagcaacgccaacagccggggccccagcttctctagcggcctggtgccactgtccctgagagggagccacatgggccccatggagatctacaaaaccgtgagcgcctggaagcggcagcctgtgcgcgtgctgagcctgtttcggaatatcgataaagtcctgaaaagcctgggattcctggagagcggctctggctccggcggtggcaccctgaagtacgtggaggatgtgacaaacgtggtcagacgggatgtggagaagtggggccccttcgatctggtgtacggcagcacccaacccctgggcagctcttgtgaccggtgccctggctggtacatgtttcagttccaccggatcctgcagtacgccctgccgagacaggagtcccagcggccattcttttggattttcatggacaacttgctgctgaccgaggatgaccaggaaactaccactcggttcctgcagaccgaagccgtgaccctgcaggacgtgagaggccgggactaccagaacgccatgcgggtgtggtccaacatccctggactgaaaagcaagcacgcacctctgacccctaaagaagaggagtacctgcaggcccaggtgcggagcagaagcaagctggacgcccctaaggtggatctgctggtgaagaattgcctcctgcccctgagagagtacttcaagtatttcagccagaatagtctgcccctgggcggcccaagcagcggcgcccctcctcccagcggcggcagcccagccggctccccaacctctaccgaggagggcacctctgagtccgccacccccgagagcggccctggcacctccaccgagcccagcgagggcagcgcacccggcagccctgccggcagccccacctccacagaggagggaaccagcaccgagcccagcgaaggcagcgccccaggcaccagcaccgagcctagtgagggcggctctggcggcggcagcgcccaggagattaaacggatcaacaagatcagaagaagacttgtgaaagacagcaacaccaagaaggccggcaagacaggccccatgaaaaccctgctggttagagtgatgacacccgatctgagagagcggctggaaaacctgagaaagaagcctgaaaatatcccccagcccatcagcaatacatctagagccaacctgaataagctgctgaccgattacaccgaaatgaagaaggcgatcctgcatgtgtactgggaagagttccagaaggaccctgtgggcctgatgagccgggtggcccagcctgccagcaagaagatcgatcagaacaagctgaaacctgagatggacgagaagggcaacctgaccaccgccggctttgcctgctctcagtgtggccagcccctgttcgtgtacaagctggagcaggtgtctgagaagggcaaggcttacaccaactacttcggacggtgcaatgtggccgagcacgaaaagctgatcctgctggcccagctgaagcccgagaaggatagcgacgaagccgtgacatatagcctgggaaagtttgggcagagggccctggatttctacagcattcatgtgaccaaggagtccacccaccccgtgaagcccctggcccagatcgccggaaacagatacgcctccggacctgtgggaaaggccctgagcgacgcatgtatgggcacaatcgcctccttcctgtctaagtaccaggacatcatcatcgaacaccagaaggtggtgaagggcaaccagaagagactggagagcctgcgggagctggccggcaaggaaaacctggaataccctagcgtgaccctgccacctcagcctcacaccaaggagggcgttgatgcctacaacgaagtgatcgcccgggtgcgaatgtgggtgaacctgaacctgtggcagaagctgaagctaagcagagatgatgccaagcctctgctgagactgaagggattcccttcctttcctctggtcgagagacaggccaacgaagtggactggtgggacatggtgtgtaacgtgaagaagctgatcaacgagaaaaaggaggatggcaaggtgttttggcagaatctggctggctacaagagacaggaagccctgagaccatacctgagcagcgaggaagatcggaagaagggaaagaaattcgctcggtaccagctgggcgacctgctgctgcacctggaaaagaagcacggcgaggactggggaaaggtgtacgacgaggcctgggagcggattgacaagaaagtggaaggcctgagcaagcacatcaagctggaagaggaacggagaagcgaggacgcccagagcaaggccgccctgaccgactggctgcgggctaaggccagcttcgtgatcgagggcctgaaggaggccgacaaggacgagttctgcagatgcgagctgaagctgcagaagtggtacggggacctgcggggaaagcccttcgccatcgaagccgagaacagcatcctggacatcagcggcttcagcaagcagtacaactgtgccttcatctggcagaaggacggcgtgaagaagctgaacctgtacctgatcatcaactacttcaagggcggcaagctgcggttcaagaagatcaaacctgaagccttcgaagccaacagattctacaccgtgatcaacaaaaagagcggcgagatcgtgcccatggaggtgaacttcaacttcgacgaccccaacctgatcatcctgcctctggcctttggcaagagacagggcagagaattcatctggaacgacctgctgtccctggaaaccggcagcctgaagctggccaacggaagagtgatcgagaagacactgtacaacagaagaacccggcaggatgagcctgccctgttcgtggccctgaccttcgagcggcgggaggtcctggactcctccaatatcaaaccaatgaacctgatcggcgtggcaagaggcgaaaacatccccgccgtgatcgccctgaccgaccccgagggctgcccactgagccggtttaaggatagcctgggaaacccaacccacatcctgagaatcggcgagagctataaggagaagcagcggaccatccaggccaagaaggaggtggagcagcggagagccggcggctacagccggaagtacgccagcaaagccaagaatctggcagacgatatggtgagaaacaccgctagagatctgctgtactacgccgtgacccaggatgccatgctgatcttcgccaacctgagccggggcttcggccggcagggcaagcggaccttcatggccgagagacagtacacacggatggaggactggctgaccgccaagctggcctacgagggcctgagcaagacctacctgtccaagacactggcccagtacacctccaagacatgcagcaactgtgggtttaccatcaccagcgccgactacgacagggtgctggagaagctgaagaagacagcaacaggctggatgaccacaattaacggcaaggagctgaaggtggagggccagattacctactacaacagatacaagagacagaacgtagtcaaggacctgtccgtcgagctggatagactgagcgaagaatctgtgaacaacgacatctcctcctggacaaagggcagaagcggagaagctctgagcctcctgaagaaaagattctcccatagacccgtgcaggagaagttcgtgtgcctgaactgcggcttcgagacacacgcagccgagcaagccgccctgaacatcgccagatcctggctgttcctgcggagccaggagtacaagaaataccagacaaacaagacaaccggcaacaccgataagagagccttcgtcgagacctggcagtccttttaccggaagaagcttaaggaggtgtggaaacctgccgtgcggtctggcggatctggcggaggctccacaagctgccaggagcccgtgagcttcgcccaggtggccgtgtacttcagcagggaggagtgggccctgctggaccccgcccagagggccctgtacagggacgtgatgctggagacctaccagtgcgtggccagcctggcccccctgcccgcccccaagcccatgctgatcagcctgctggagggcggcgaggacccctgggtgcccgacgtgtgcagccccgaggccgtgcccggcgacctgagccccaccagccccaagaaaaagagaaaagtctaagctgccttctgcggggcttgccttctggccatgcccttcttctctcccttgcacctgtacctcttggtctttgaataaagcctgagtaggaaggctagcaaaaaaaaaaaaaaaaaaaaaaaaaaaaaaaaaaaaaaaaaaaaaaaaaaaaaaaaaaaaaaaaaaaaaaaaaaaaaaaa

SEQ ID NO: 6927 - RNA, 5797 nt, synthetic construct
  source 1..5797: mol_type = other RNA
aggaaataagagagaaaagaagagtaagaagaaatataagagccaccatggcccctaagaagaagcgtaaagtgagccggatggaacgcctcgtctacgaggtgcggcagaagtgcagaaacatcgaggacatctgcatctcctgcggatctctgaacgtgaccctggagcacccactgttcatcggcggcatgtgccagaactgtaaaaactgttttctggagtgtgcctatcaatacgacgatgacggctaccagagctactgcaccatctgttgcggcggaagagaggtgctgatgtgtggaaataacaactgctgccggtgcttctgcgtggaatgcgtggacctgctggtgggccccggcgccgcccaggccgctattaaggaagatccttggaactgctacatgtgcggccacaagggcacatacggcctgctgagacggagagaggactggcctagcagactgcagatgttcttcgccaataaccacgaccaggagttcgacccccctaaggtgtaccctcccgtccccgccgagaagagaaagcccatccgggtcctgagcctgttcgatggcatcgccaccggtctgctggtgctgaaggacctgggcatccaggtggataggtacattgcctccgaggtgtgcgaggactccatcaccgtgggaatggtgcgtcatcagggcaagatcatgtacgtgggcgacgtgcggagcgtgacacagaagcatatccaggagtggggccctttcgacctggtgatcggcggcagcccttgcaatgacctgagcatcgtgaacccagcccggaagggcctgtacgagggaaccggcagactgttcttcgagttttacagactgctgcacgacgcccggcctaaggaaggcgacgaccggcccttcttttggctgttcgagaatgtggtggccatgggagtcagcgacaagcgggatattagccggttcctggagagcaaccccgtgatgatcgatgccaaggaagtgagcgccgcccaccgggccagatacttctggggcaatctgcctggcatgaacagacccctggccagcaccgtgaacgacaagctggagctgcaggagtgcctggagcacggccggatcgccaagttcagcaaggtgagaaccatcaccacccgaagcaacagcatcaaacaaggcaaggaccagcactttcctgtgttcatgaacgagaaggaggacatcctgtggtgtaccgagatggagagagtgttcgggttcccagtccactacacagatgtcagcaacatgtctagactggccagacagagactgctgggaagaagctggtccgtccctgtgatcagacacctgttcgcccctctgaaggagtacttcgcctgcgtgagcagcggcaacagcaacgccaacagccggggccccagcttctctagcggcctggtgccactgtccctgagagggagccacatgggccccatggagatctacaaaaccgtgagcgcctggaagcggcagcctgtgcgcgtgctgagcctgtttcggaatatcgataaagtcctgaaaagcctgggattcctggagagcggctctggctccggcggtggcaccctgaagtacgtggaggatgtgacaaacgtggtcagacgggatgtggagaagtggggccccttcgatctggtgtacggcagcacccaacccctgggcagctcttgtgaccggtgccctggctggtacatgtttcagttccaccggatcctgcagtacgccctgccgagacaggagtcccagcggccattcttttggattttcatggacaacttgctgctgaccgaggatgaccaggaaactaccactcggttcctgcagaccgaagccgtgaccctgcaggacgtgagaggccgggactaccagaacgccatgcgggtgtggtccaacatccctggactgaaaagcaagcacgcacctctgacccctaaagaagaggagtacctgcaggcccaggtgcggagcagaagcaagctggacgcccctaaggtggatctgctggtgaagaattgcctcctgcccctgagagagtacttcaagtatttcagccagaatagtctgcccctgggcggcccaagcagcggcgcccctcctcccagcggcggcagcccagccggctccccaacctctaccgaggagggcacctctgagtccgccacccccgagagcggccctggcacctccaccgagcccagcgagggcagcgcacccggcagccctgccggcagccccacctccacagaggagggaaccagcaccgagcccagcgaaggcagcgccccaggcaccagcaccgagcctagtgagggcggctctggcggcggcagcgcccaggagattaaacggatcaacaagatcagaagaagacttgtgaaagacagcaacaccaagaaggccggcaagacaggccccatgaaaaccctgctggttagagtgatgacacccgatctgagagagcggctggaaaacctgagaaagaagcctgaaaatatcccccagcccatcagcaatacatctagagccaacctgaataagctgctgaccgattacaccgaaatgaagaaggcgatcctgcatgtgtactgggaagagttccagaaggaccctgtgggcctgatgagccgggtggcccagcctgccagcaagaagatcgatcagaacaagctgaaacctgagatggacgagaagggcaacctgaccaccgccggctttgcctgctctcagtgtggccagcccctgttcgtgtacaagctggagcaggtgtctgagaagggcaaggcttacaccaactacttcggacggtgcaatgtggccgagcacgaaaagctgatcctgctggcccagctgaagcccgagaaggatagcgacgaagccgtgacatatagcctgggaaagtttgggcagagggccctggatttctacagcattcatgtgaccaaggagtccacccaccccgtgaagcccctggcccagatcgccggaaacagatacgcctccggacctgtgggaaaggccctgagcgacgcatgtatgggcacaatcgcctccttcctgtctaagtaccaggacatcatcatcgaacaccagaaggtggtgaagggcaaccagaagagactggagagcctgcgggagctggccggcaaggaaaacctggaataccctagcgtgaccctgccacctcagcctcacaccaaggagggcgttgatgcctacaacgaagtgatcgcccgggtgcgaatgtgggtgaacctgaacctgtggcagaagctgaagctaagcagagatgatgccaagcctctgctgagactgaagggattcccttcctttcctctggtcgagagacaggccaacgaagtggactggtgggacatggtgtgtaacgtgaagaagctgatcaacgagaaaaaggaggatggcaaggtgttttggcagaatctggctggctacaagagacaggaagccctgagaccatacctgagcagcgaggaagatcggaagaagggaaagaaattcgctcggtaccagctgggcgacctgctgctgcacctggaaaagaagcacggcgaggactggggaaaggtgtacgacgaggcctgggagcggattgacaagaaagtggaaggcctgagcaagcacatcaagctggaagaggaacggagaagcgaggacgcccagagcaaggccgccctgaccgactggctgcgggctaaggccagcttcgtgatcgagggcctgaaggaggccgacaaggacgagttctgcagatgcgagctgaagctgcagaagtggtacggggacctgcggggaaagcccttcgccatcgaagccgagaacagcatcctggacatcagcggcttcagcaagcagtacaactgtgccttcatctggcagaaggacggcgtgaagaagctgaacctgtacctgatcatcaactacttcaagggcggcaagctgcggttcaagaagatcaaacctgaagccttcgaagccaacagattctacaccgtgatcaacaaaaagagcggcgagatcgtgcccatggaggtgaacttcaacttcgacgaccccaacctgatcatcctgcctctggcctttggcaagagacagggcagagaattcatctggaacgacctgctgtccctggaaaccggcagcctgaagctggccaacggaagagtgatcgagaagacactgtacaacagaagaacccggcaggatgagcctgccctgttcgtggccctgaccttcgagcggcgggaggtcctggactcctccaatatcaaaccaatgaacctgatcggcgtggcaagaggcgaaaacatccccgccgtgatcgccctgaccgaccccgagggctgcccactgagccggtttaaggatagcctgggaaacccaacccacatcctgagaatcggcgagagctataaggagaagcagcggaccatccaggccaagaaggaggtggagcagcggagagccggcggctacagccggaagtacgccagcaaagccaagaatctggcagacgatatggtgagaaacaccgctagagatctgctgtactacgccgtgacccaggatgccatgctgatcttcgccaacctgagccggggcttcggccggcagggcaagcggaccttcatggccgagagacagtacacacggatggaggactggctgaccgccaagctggcctacgagggcctgagcaagacctacctgtccaagacactggcccagtacacctccaagacatgcagcaactgtgggtttaccatcaccagcgccgactacgacagggtgctggagaagctgaagaagacagcaacaggctggatgaccacaattaacggcaaggagctgaaggtggagggccagattacctactacaacagatacaagagacagaacgtagtcaaggacctgtccgtcgagctggatagactgagcgaagaatctgtgaacaacgacatctcctcctggacaaagggcagaagcggagaagctctgagcctcctgaagaaaagattctcccatagacccgtgcaggagaagttcgtgtgcctgaactgcggcttcgagacacacgcagccgagcaagccgccctgaacatcgccagatcctggctgttcctgcggagccaggagtacaagaaataccagacaaacaagacaaccggcaacaccgataagagagccttcgtcgagacctggcagtccttttaccggaagaagcttaaggaggtgtggaaacctgccgtgcggtctggcggatctggcggaggctccacaagcatggagcccgtgaccttcgaggacgtggccgtgtacttcacccagaaccagtgggccagcctggaccccgtgcagagggccctgtacagggaggtgatgctggagaactacgccaacgtggccagcctggccttccccttccccaagcccgtgctgatcagccagctggagcagggcgaggccccctggggccccgaccccggcgaggccgaggtgctgaagggcatctggcccggcggcgagaccagccccaagaaaaagagaaaagtctaagctgccttctgcggggcttgccttctggccatgcccttcttctctcccttgcacctgtacctcttggtctttgaataaagcctgagtaggaaggctagcaaaaaaaaaaaaaaaaaaaaaaaaaaaaaaaaaaaaaaaaaaaaaaaaaaaaaaaaaaaaaaaaaaaaaaaaaaaaaaaa

SEQ ID NO: 6928 - RNA, 5797 nt, synthetic construct
  source 1..5797: mol_type = other RNA
aggaaataagagagaaaagaagagtaagaagaaatataagagccaccatggcccctaagaagaagcgtaaagtgagccggatggaacgcctcgtctacgaggtgcggcagaagtgcagaaacatcgaggacatctgcatctcctgcggatctctgaacgtgaccctggagcacccactgttcatcggcggcatgtgccagaactgtaaaaactgttttctggagtgtgcctatcaatacgacgatgacggctaccagagctactgcaccatctgttgcggcggaagagaggtgctgatgtgtggaaataacaactgctgccggtgcttctgcgtggaatgcgtggacctgctggtgggccccggcgccgcccaggccgctattaaggaagatccttggaactgctacatgtgcggccacaagggcacatacggcctgctgagacggagagaggactggcctagcagactgcagatgttcttcgccaataaccacgaccaggagttcgacccccctaaggtgtaccctcccgtccccgccgagaagagaaagcccatccgggtcctgagcctgttcgatggcatcgccaccggtctgctggtgctgaaggacctgggcatccaggtggataggtacattgcctccgaggtgtgcgaggactccatcaccgtgggaatggtgcgtcatcagggcaagatcatgtacgtgggcgacgtgcggagcgtgacacagaagcatatccaggagtggggccctttcgacctggtgatcggcggcagcccttgcaatgacctgagcatcgtgaacccagcccggaagggcctgtacgagggaaccggcagactgttcttcgagttttacagactgctgcacgacgcccggcctaaggaaggcgacgaccggcccttcttttggctgttcgagaatgtggtggccatgggagtcagcgacaagcgggatattagccggttcctggagagcaaccccgtgatgatcgatgccaaggaagtgagcgccgcccaccgggccagatacttctggggcaatctgcctggcatgaacagacccctggccagcaccgtgaacgacaagctggagctgcaggagtgcctggagcacggccggatcgccaagttcagcaaggtgagaaccatcaccacccgaagcaacagcatcaaacaaggcaaggaccagcactttcctgtgttcatgaacgagaaggaggacatcctgtggtgtaccgagatggagagagtgttcgggttcccagtccactacacagatgtcagcaacatgtctagactggccagacagagactgctgggaagaagctggtccgtccctgtgatcagacacctgttcgcccctctgaaggagtacttcgcctgcgtgagcagcggcaacagcaacgccaacagccggggccccagcttctctagcggcctggtgccactgtccctgagagggagccacatgggccccatggagatctacaaaaccgtgagcgcctggaagcggcagcctgtgcgcgtgctgagcctgtttcggaatatcgataaagtcctgaaaagcctgggattcctggagagcggctctggctccggcggtggcaccctgaagtacgtggaggatgtgacaaacgtggtcagacgggatgtggagaagtggggccccttcgatctggtgtacggcagcacccaacccctgggcagctcttgtgaccggtgccctggctggtacatgtttcagttccaccggatcctgcagtacgccctgccgagacaggagtcccagcggccattcttttggattttcatggacaacttgctgctgaccgaggatgaccaggaaactaccactcggttcctgcagaccgaagccgtgaccctgcaggacgtgagaggccgggactaccagaacgccatgcgggtgtggtccaacatccctggactgaaaagcaagcacgcacctctgacccctaaagaagaggagtacctgcaggcccaggtgcggagcagaagcaagctggacgcccctaaggtggatctgctggtgaagaattgcctcctgcccctgagagagtacttcaagtatttcagccagaatagtctgcccctgggcggcccaagcagcggcgcccctcctcccagcggcggcagcccagccggctccccaacctctaccgaggagggcacctctgagtccgccacccccgagagcggccctggcacctccaccgagcccagcgagggcagcgcacccggcagccctgccggcagccccacctccacagaggagggaaccagcaccgagcccagcgaaggcagcgccccaggcaccagcaccgagcctagtgagggcggctctggcggcggcagcgcccaggagattaaacggatcaacaagatcagaagaagacttgtgaaagacagcaacaccaagaaggccggcaagacaggccccatgaaaaccctgctggttagagtgatgacacccgatctgagagagcggctggaaaacctgagaaagaagcctgaaaatatcccccagcccatcagcaatacatctagagccaacctgaataagctgctgaccgattacaccgaaatgaagaaggcgatcctgcatgtgtactgggaagagttccagaaggaccctgtgggcctgatgagccgggtggcccagcctgccagcaagaagatcgatcagaacaagctgaaacctgagatggacgagaagggcaacctgaccaccgccggctttgcctgctctcagtgtggccagcccctgttcgtgtacaagctggagcaggtgtctgagaagggcaaggcttacaccaactacttcggacggtgcaatgtggccgagcacgaaaagctgatcctgctggcccagctgaagcccgagaaggatagcgacgaagccgtgacatatagcctgggaaagtttgggcagagggccctggatttctacagcattcatgtgaccaaggagtccacccaccccgtgaagcccctggcccagatcgccggaaacagatacgcctccggacctgtgggaaaggccctgagcgacgcatgtatgggcacaatcgcctccttcctgtctaagtaccaggacatcatcatcgaacaccagaaggtggtgaagggcaaccagaagagactggagagcctgcgggagctggccggcaaggaaaacctggaataccctagcgtgaccctgccacctcagcctcacaccaaggagggcgttgatgcctacaacgaagtgatcgcccgggtgcgaatgtgggtgaacctgaacctgtggcagaagctgaagctaagcagagatgatgccaagcctctgctgagactgaagggattcccttcctttcctctggtcgagagacaggccaacgaagtggactggtgggacatggtgtgtaacgtgaagaagctgatcaacgagaaaaaggaggatggcaaggtgttttggcagaatctggctggctacaagagacaggaagccctgagaccatacctgagcagcgaggaagatcggaagaagggaaagaaattcgctcggtaccagctgggcgacctgctgctgcacctggaaaagaagcacggcgaggactggggaaaggtgtacgacgaggcctgggagcggattgacaagaaagtggaaggcctgagcaagcacatcaagctggaagaggaacggagaagcgaggacgcccagagcaaggccgccctgaccgactggctgcgggctaaggccagcttcgtgatcgagggcctgaaggaggccgacaaggacgagttctgcagatgcgagctgaagctgcagaagtggtacggggacctgcggggaaagcccttcgccatcgaagccgagaacagcatcctggacatcagcggcttcagcaagcagtacaactgtgccttcatctggcagaaggacggcgtgaagaagctgaacctgtacctgatcatcaactacttcaagggcggcaagctgcggttcaagaagatcaaacctgaagccttcgaagccaacagattctacaccgtgatcaacaaaaagagcggcgagatcgtgcccatggaggtgaacttcaacttcgacgaccccaacctgatcatcctgcctctggcctttggcaagagacagggcagagaattcatctggaacgacctgctgtccctggaaaccggcagcctgaagctggccaacggaagagtgatcgagaagacactgtacaacagaagaacccggcaggatgagcctgccctgttcgtggccctgaccttcgagcggcgggaggtcctggactcctccaatatcaaaccaatgaacctgatcggcgtggcaagaggcgaaaacatccccgccgtgatcgccctgaccgaccccgagggctgcccactgagccggtttaaggatagcctgggaaacccaacccacatcctgagaatcggcgagagctataaggagaagcagcggaccatccaggccaagaaggaggtggagcagcggagagccggcggctacagccggaagtacgccagcaaagccaagaatctggcagacgatatggtgagaaacaccgctagagatctgctgtactacgccgtgacccaggatgccatgctgatcttcgccaacctgagccggggcttcggccggcagggcaagcggaccttcatggccgagagacagtacacacggatggaggactggctgaccgccaagctggcctacgagggcctgagcaagacctacctgtccaagacactggcccagtacacctccaagacatgcagcaactgtgggtttaccatcaccagcgccgactacgacagggtgctggagaagctgaagaagacagcaacaggctggatgaccacaattaacggcaaggagctgaaggtggagggccagattacctactacaacagatacaagagacagaacgtagtcaaggacctgtccgtcgagctggatagactgagcgaagaatctgtgaacaacgacatctcctcctggacaaagggcagaagcggagaagctctgagcctcctgaagaaaagattctcccatagacccgtgcaggagaagttcgtgtgcctgaactgcggcttcgagacacacgcagccgagcaagccgccctgaacatcgccagatcctggctgttcctgcggagccaggagtacaagaaataccagacaaacaagacaaccggcaacaccgataagagagccttcgtcgagacctggcagtccttttaccggaagaagcttaaggaggtgtggaaacctgccgtgcggtctggcggatctggcggaggctccacaagcgtgagcgagcccgtgaccttcgaggaggtggccctgtacttcagcgaggaggagtgggccctgctggacgccggccagagggccctgtacagggacgtgatgaaggagaactacgaggccgtgaggtggctggacaacggcaggctgaacgagaaccacgacaagagcctgcagaacgagggccccgagcagatggccccctgcggcatgatgctgggcatcagcgagggccacgtgagccagaccagccccaagaaaaagagaaaagtctaagctgccttctgcggggcttgccttctggccatgcccttcttctctcccttgcacctgtacctcttggtctttgaataaagcctgagtaggaaggctagcaaaaaaaaaaaaaaaaaaaaaaaaaaaaaaaaaaaaaaaaaaaaaaaaaaaaaaaaaaaaaaaaaaaaaaaaaaaaaaaa

SEQ ID NO: 6929 - RNA, 5797 nt, synthetic construct
  source 1..5797: mol_type = other RNA
aggaaataagagagaaaagaagagtaagaagaaatataagagccaccatggcccctaagaagaagcgtaaagtgagccggatggaacgcctcgtctacgaggtgcggcagaagtgcagaaacatcgaggacatctgcatctcctgcggatctctgaacgtgaccctggagcacccactgttcatcggcggcatgtgccagaactgtaaaaactgttttctggagtgtgcctatcaatacgacgatgacggctaccagagctactgcaccatctgttgcggcggaagagaggtgctgatgtgtggaaataacaactgctgccggtgcttctgcgtggaatgcgtggacctgctggtgggccccggcgccgcccaggccgctattaaggaagatccttggaactgctacatgtgcggccacaagggcacatacggcctgctgagacggagagaggactggcctagcagactgcagatgttcttcgccaataaccacgaccaggagttcgacccccctaaggtgtaccctcccgtccccgccgagaagagaaagcccatccgggtcctgagcctgttcgatggcatcgccaccggtctgctggtgctgaaggacctgggcatccaggtggataggtacattgcctccgaggtgtgcgaggactccatcaccgtgggaatggtgcgtcatcagggcaagatcatgtacgtgggcgacgtgcggagcgtgacacagaagcatatccaggagtggggccctttcgacctggtgatcggcggcagcccttgcaatgacctgagcatcgtgaacccagcccggaagggcctgtacgagggaaccggcagactgttcttcgagttttacagactgctgcacgacgcccggcctaaggaaggcgacgaccggcccttcttttggctgttcgagaatgtggtggccatgggagtcagcgacaagcgggatattagccggttcctggagagcaaccccgtgatgatcgatgccaaggaagtgagcgccgcccaccgggccagatacttctggggcaatctgcctggcatgaacagacccctggccagcaccgtgaacgacaagctggagctgcaggagtgcctggagcacggccggatcgccaagttcagcaaggtgagaaccatcaccacccgaagcaacagcatcaaacaaggcaaggaccagcactttcctgtgttcatgaacgagaaggaggacatcctgtggtgtaccgagatggagagagtgttcgggttcccagtccactacacagatgtcagcaacatgtctagactggccagacagagactgctgggaagaagctggtccgtccctgtgatcagacacctgttcgcccctctgaaggagtacttcgcctgcgtgagcagcggcaacagcaacgccaacagccggggccccagcttctctagcggcctggtgccactgtccctgagagggagccacatgggccccatggagatctacaaaaccgtgagcgcctggaagcggcagcctgtgcgcgtgctgagcctgtttcggaatatcgataaagtcctgaaaagcctgggattcctggagagcggctctggctccggcggtggcaccctgaagtacgtggaggatgtgacaaacgtggtcagacgggatgtggagaagtggggccccttcgatctggtgtacggcagcacccaacccctgggcagctcttgtgaccggtgccctggctggtacatgtttcagttccaccggatcctgcagtacgccctgccgagacaggagtcccagcggccattcttttggattttcatggacaacttgctgctgaccgaggatgaccaggaaactaccactcggttcctgcagaccgaagccgtgaccctgcaggacgtgagaggccgggactaccagaacgccatgcgggtgtggtccaacatccctggactgaaaagcaagcacgcacctctgacccctaaagaagaggagtacctgcaggcccaggtgcggagcagaagcaagctggacgcccctaaggtggatctgctggtgaagaattgcctcctgcccctgagagagtacttcaagtatttcagccagaatagtctgcccctgggcggcccaagcagcggcgcccctcctcccagcggcggcagcccagccggctccccaacctctaccgaggagggcacctctgagtccgccacccccgagagcggccctggcacctccaccgagcccagcgagggcagcgcacccggcagccctgccggcagccccacctccacagaggagggaaccagcaccgagcccagcgaaggcagcgccccaggcaccagcaccgagcctagtgagggcggctctggcggcggcagcgcccaggagattaaacggatcaacaagatcagaagaagacttgtgaaagacagcaacaccaagaaggccggcaagacaggccccatgaaaaccctgctggttagagtgatgacacccgatctgagagagcggctggaaaacctgagaaagaagcctgaaaatatcccccagcccatcagcaatacatctagagccaacctgaataagctgctgaccgattacaccgaaatgaagaaggcgatcctgcatgtgtactgggaagagttccagaaggaccctgtgggcctgatgagccgggtggcccagcctgccagcaagaagatcgatcagaacaagctgaaacctgagatggacgagaagggcaacctgaccaccgccggctttgcctgctctcagtgtggccagcccctgttcgtgtacaagctggagcaggtgtctgagaagggcaaggcttacaccaactacttcggacggtgcaatgtggccgagcacgaaaagctgatcctgctggcccagctgaagcccgagaaggatagcgacgaagccgtgacatatagcctgggaaagtttgggcagagggccctggatttctacagcattcatgtgaccaaggagtccacccaccccgtgaagcccctggcccagatcgccggaaacagatacgcctccggacctgtgggaaaggccctgagcgacgcatgtatgggcacaatcgcctccttcctgtctaagtaccaggacatcatcatcgaacaccagaaggtggtgaagggcaaccagaagagactggagagcctgcgggagctggccggcaaggaaaacctggaataccctagcgtgaccctgccacctcagcctcacaccaaggagggcgttgatgcctacaacgaagtgatcgcccgggtgcgaatgtgggtgaacctgaacctgtggcagaagctgaagctaagcagagatgatgccaagcctctgctgagactgaagggattcccttcctttcctctggtcgagagacaggccaacgaagtggactggtgggacatggtgtgtaacgtgaagaagctgatcaacgagaaaaaggaggatggcaaggtgttttggcagaatctggctggctacaagagacaggaagccctgagaccatacctgagcagcgaggaagatcggaagaagggaaagaaattcgctcggtaccagctgggcgacctgctgctgcacctggaaaagaagcacggcgaggactggggaaaggtgtacgacgaggcctgggagcggattgacaagaaagtggaaggcctgagcaagcacatcaagctggaagaggaacggagaagcgaggacgcccagagcaaggccgccctgaccgactggctgcgggctaaggccagcttcgtgatcgagggcctgaaggaggccgacaaggacgagttctgcagatgcgagctgaagctgcagaagtggtacggggacctgcggggaaagcccttcgccatcgaagccgagaacagcatcctggacatcagcggcttcagcaagcagtacaactgtgccttcatctggcagaaggacggcgtgaagaagctgaacctgtacctgatcatcaactacttcaagggcggcaagctgcggttcaagaagatcaaacctgaagccttcgaagccaacagattctacaccgtgatcaacaaaaagagcggcgagatcgtgcccatggaggtgaacttcaacttcgacgaccccaacctgatcatcctgcctctggcctttggcaagagacagggcagagaattcatctggaacgacctgctgtccctggaaaccggcagcctgaagctggccaacggaagagtgatcgagaagacactgtacaacagaagaacccggcaggatgagcctgccctgttcgtggccctgaccttcgagcggcgggaggtcctggactcctccaatatcaaaccaatgaacctgatcggcgtggcaagaggcgaaaacatccccgccgtgatcgccctgaccgaccccgagggctgcccactgagccggtttaaggatagcctgggaaacccaacccacatcctgagaatcggcgagagctataaggagaagcagcggaccatccaggccaagaaggaggtggagcagcggagagccggcggctacagccggaagtacgccagcaaagccaagaatctggcagacgatatggtgagaaacaccgctagagatctgctgtactacgccgtgacccaggatgccatgctgatcttcgccaacctgagccggggcttcggccggcagggcaagcggaccttcatggccgagagacagtacacacggatggaggactggctgaccgccaagctggcctacgagggcctgagcaagacctacctgtccaagacactggcccagtacacctccaagacatgcagcaactgtgggtttaccatcaccagcgccgactacgacagggtgctggagaagctgaagaagacagcaacaggctggatgaccacaattaacggcaaggagctgaaggtggagggccagattacctactacaacagatacaagagacagaacgtagtcaaggacctgtccgtcgagctggatagactgagcgaagaatctgtgaacaacgacatctcctcctggacaaagggcagaagcggagaagctctgagcctcctgaagaaaagattctcccatagacccgtgcaggagaagttcgtgtgcctgaactgcggcttcgagacacacgcagccgagcaagccgccctgaacatcgccagatcctggctgttcctgcggagccaggagtacaagaaataccagacaaacaagacaaccggcaacaccgataagagagccttcgtcgagacctggcagtccttttaccggaagaagcttaaggaggtgtggaaacctgccgtgcggtctggcggatctggcggaggctccacaagcaagcccggcgtggtgaggttcgtggacgtggccgtgtacttcagccccgaggagtgggcctgcctgaggcccgcccagagggccctgtacagggacgtgatgagggagacctacggccacctgggcgccctgggcttccccggccccaagcccgccctgatcagctggatggagcaggagaacgaggcctggagccccgccgcccaggaccccgaggagagggagaacctgggcggcgtgcccaccagccccaagaaaaagagaaaagtctaagctgccttctgcggggcttgccttctggccatgcccttcttctctcccttgcacctgtacctcttggtctttgaataaagcctgagtaggaaggctagcaaaaaaaaaaaaaaaaaaaaaaaaaaaaaaaaaaaaaaaaaaaaaaaaaaaaaaaaaaaaaaaaaaaaaaaaaaaaaaaa

SEQ ID NO: 6930 - RNA, 5797 nt, synthetic construct
  source 1..5797: mol_type = other RNA
aggaaataagagagaaaagaagagtaagaagaaatataagagccaccatggcccctaagaagaagcgtaaagtgagccggatggaacgcctcgtctacgaggtgcggcagaagtgcagaaacatcgaggacatctgcatctcctgcggatctctgaacgtgaccctggagcacccactgttcatcggcggcatgtgccagaactgtaaaaactgttttctggagtgtgcctatcaatacgacgatgacggctaccagagctactgcaccatctgttgcggcggaagagaggtgctgatgtgtggaaataacaactgctgccggtgcttctgcgtggaatgcgtggacctgctggtgggccccggcgccgcccaggccgctattaaggaagatccttggaactgctacatgtgcggccacaagggcacatacggcctgctgagacggagagaggactggcctagcagactgcagatgttcttcgccaataaccacgaccaggagttcgacccccctaaggtgtaccctcccgtccccgccgagaagagaaagcccatccgggtcctgagcctgttcgatggcatcgccaccggtctgctggtgctgaaggacctgggcatccaggtggataggtacattgcctccgaggtgtgcgaggactccatcaccgtgggaatggtgcgtcatcagggcaagatcatgtacgtgggcgacgtgcggagcgtgacacagaagcatatccaggagtggggccctttcgacctggtgatcggcggcagcccttgcaatgacctgagcatcgtgaacccagcccggaagggcctgtacgagggaaccggcagactgttcttcgagttttacagactgctgcacgacgcccggcctaaggaaggcgacgaccggcccttcttttggctgttcgagaatgtggtggccatgggagtcagcgacaagcgggatattagccggttcctggagagcaaccccgtgatgatcgatgccaaggaagtgagcgccgcccaccgggccagatacttctggggcaatctgcctggcatgaacagacccctggccagcaccgtgaacgacaagctggagctgcaggagtgcctggagcacggccggatcgccaagttcagcaaggtgagaaccatcaccacccgaagcaacagcatcaaacaaggcaaggaccagcactttcctgtgttcatgaacgagaaggaggacatcctgtggtgtaccgagatggagagagtgttcgggttcccagtccactacacagatgtcagcaacatgtctagactggccagacagagactgctgggaagaagctggtccgtccctgtgatcagacacctgttcgcccctctgaaggagtacttcgcctgcgtgagcagcggcaacagcaacgccaacagccggggccccagcttctctagcggcctggtgccactgtccctgagagggagccacatgggccccatggagatctacaaaaccgtgagcgcctggaagcggcagcctgtgcgcgtgctgagcctgtttcggaatatcgataaagtcctgaaaagcctgggattcctggagagcggctctggctccggcggtggcaccctgaagtacgtggaggatgtgacaaacgtggtcagacgggatgtggagaagtggggccccttcgatctggtgtacggcagcacccaacccctgggcagctcttgtgaccggtgccctggctggtacatgtttcagttccaccggatcctgcagtacgccctgccgagacaggagtcccagcggccattcttttggattttcatggacaacttgctgctgaccgaggatgaccaggaaactaccactcggttcctgcagaccgaagccgtgaccctgcaggacgtgagaggccgggactaccagaacgccatgcgggtgtggtccaacatccctggactgaaaagcaagcacgcacctctgacccctaaagaagaggagtacctgcaggcccaggtgcggagcagaagcaagctggacgcccctaaggtggatctgctggtgaagaattgcctcctgcccctgagagagtacttcaagtatttcagccagaatagtctgcccctgggcggcccaagcagcggcgcccctcctcccagcggcggcagcccagccggctccccaacctctaccgaggagggcacctctgagtccgccacccccgagagcggccctggcacctccaccgagcccagcgagggcagcgcacccggcagccctgccggcagccccacctccacagaggagggaaccagcaccgagcccagcgaaggcagcgccccaggcaccagcaccgagcctagtgagggcggctctggcggcggcagcgcccaggagattaaacggatcaacaagatcagaagaagacttgtgaaagacagcaacaccaagaaggccggcaagacaggccccatgaaaaccctgctggttagagtgatgacacccgatctgagagagcggctggaaaacctgagaaagaagcctgaaaatatcccccagcccatcagcaatacatctagagccaacctgaataagctgctgaccgattacaccgaaatgaagaaggcgatcctgcatgtgtactgggaagagttccagaaggaccctgtgggcctgatgagccgggtggcccagcctgccagcaagaagatcgatcagaacaagctgaaacctgagatggacgagaagggcaacctgaccaccgccggctttgcctgctctcagtgtggccagcccctgttcgtgtacaagctggagcaggtgtctgagaagggcaaggcttacaccaactacttcggacggtgcaatgtggccgagcacgaaaagctgatcctgctggcccagctgaagcccgagaaggatagcgacgaagccgtgacatatagcctgggaaagtttgggcagagggccctggatttctacagcattcatgtgaccaaggagtccacccaccccgtgaagcccctggcccagatcgccggaaacagatacgcctccggacctgtgggaaaggccctgagcgacgcatgtatgggcacaatcgcctccttcctgtctaagtaccaggacatcatcatcgaacaccagaaggtggtgaagggcaaccagaagagactggagagcctgcgggagctggccggcaaggaaaacctggaataccctagcgtgaccctgccacctcagcctcacaccaaggagggcgttgatgcctacaacgaagtgatcgcccgggtgcgaatgtgggtgaacctgaacctgtggcagaagctgaagctaagcagagatgatgccaagcctctgctgagactgaagggattcccttcctttcctctggtcgagagacaggccaacgaagtggactggtgggacatggtgtgtaacgtgaagaagctgatcaacgagaaaaaggaggatggcaaggtgttttggcagaatctggctggctacaagagacaggaagccctgagaccatacctgagcagcgaggaagatcggaagaagggaaagaaattcgctcggtaccagctgggcgacctgctgctgcacctggaaaagaagcacggcgaggactggggaaaggtgtacgacgaggcctgggagcggattgacaagaaagtggaaggcctgagcaagcacatcaagctggaagaggaacggagaagcgaggacgcccagagcaaggccgccctgaccgactggctgcgggctaaggccagcttcgtgatcgagggcctgaaggaggccgacaaggacgagttctgcagatgcgagctgaagctgcagaagtggtacggggacctgcggggaaagcccttcgccatcgaagccgagaacagcatcctggacatcagcggcttcagcaagcagtacaactgtgccttcatctggcagaaggacggcgtgaagaagctgaacctgtacctgatcatcaactacttcaagggcggcaagctgcggttcaagaagatcaaacctgaagccttcgaagccaacagattctacaccgtgatcaacaaaaagagcggcgagatcgtgcccatggaggtgaacttcaacttcgacgaccccaacctgatcatcctgcctctggcctttggcaagagacagggcagagaattcatctggaacgacctgctgtccctggaaaccggcagcctgaagctggccaacggaagagtgatcgagaagacactgtacaacagaagaacccggcaggatgagcctgccctgttcgtggccctgaccttcgagcggcgggaggtcctggactcctccaatatcaaaccaatgaacctgatcggcgtggcaagaggcgaaaacatccccgccgtgatcgccctgaccgaccccgagggctgcccactgagccggtttaaggatagcctgggaaacccaacccacatcctgagaatcggcgagagctataaggagaagcagcggaccatccaggccaagaaggaggtggagcagcggagagccggcggctacagccggaagtacgccagcaaagccaagaatctggcagacgatatggtgagaaacaccgctagagatctgctgtactacgccgtgacccaggatgccatgctgatcttcgccaacctgagccggggcttcggccggcagggcaagcggaccttcatggccgagagacagtacacacggatggaggactggctgaccgccaagctggcctacgagggcctgagcaagacctacctgtccaagacactggcccagtacacctccaagacatgcagcaactgtgggtttaccatcaccagcgccgactacgacagggtgctggagaagctgaagaagacagcaacaggctggatgaccacaattaacggcaaggagctgaaggtggagggccagattacctactacaacagatacaagagacagaacgtagtcaaggacctgtccgtcgagctggatagactgagcgaagaatctgtgaacaacgacatctcctcctggacaaagggcagaagcggagaagctctgagcctcctgaagaaaagattctcccatagacccgtgcaggagaagttcgtgtgcctgaactgcggcttcgagacacacgcagccgagcaagccgccctgaacatcgccagatcctggctgttcctgcggagccaggagtacaagaaataccagacaaacaagacaaccggcaacaccgataagagagccttcgtcgagacctggcagtccttttaccggaagaagcttaaggaggtgtggaaacctgccgtgcggtctggcggatctggcggaggctccacaagcgtggtgttcaccgacgtggccgtggacttcagccaggaggagtgggagtgcctggacagctaccagaggagcctgtacagggacgtgatcctggagaactacagcaacctggtgagcctgggcggcggcagcatcagcaagcccgacgtggtgaccctgctggagcagggcaaggagccctggatggtggtgagggacaccaagatcaggtggagcctgggcctggagagcaactacgacgccaccagccccaagaaaaagagaaaagtctaagctgccttctgcggggcttgccttctggccatgcccttcttctctcccttgcacctgtacctcttggtctttgaataaagcctgagtaggaaggctagcaaaaaaaaaaaaaaaaaaaaaaaaaaaaaaaaaaaaaaaaaaaaaaaaaaaaaaaaaaaaaaaaaaaaaaaaaaaaaaaa

SEQ ID NO: 6931 - RNA, 5797 nt, synthetic construct
  source 1..5797: mol_type = other RNA
aggaaataagagagaaaagaagagtaagaagaaatataagagccaccatggcccctaagaagaagcgtaaagtgagccggatggaacgcctcgtctacgaggtgcggcagaagtgcagaaacatcgaggacatctgcatctcctgcggatctctgaacgtgaccctggagcacccactgttcatcggcggcatgtgccagaactgtaaaaactgttttctggagtgtgcctatcaatacgacgatgacggctaccagagctactgcaccatctgttgcggcggaagagaggtgctgatgtgtggaaataacaactgctgccggtgcttctgcgtggaatgcgtggacctgctggtgggccccggcgccgcccaggccgctattaaggaagatccttggaactgctacatgtgcggccacaagggcacatacggcctgctgagacggagagaggactggcctagcagactgcagatgttcttcgccaataaccacgaccaggagttcgacccccctaaggtgtaccctcccgtccccgccgagaagagaaagcccatccgggtcctgagcctgttcgatggcatcgccaccggtctgctggtgctgaaggacctgggcatccaggtggataggtacattgcctccgaggtgtgcgaggactccatcaccgtgggaatggtgcgtcatcagggcaagatcatgtacgtgggcgacgtgcggagcgtgacacagaagcatatccaggagtggggccctttcgacctggtgatcggcggcagcccttgcaatgacctgagcatcgtgaacccagcccggaagggcctgtacgagggaaccggcagactgttcttcgagttttacagactgctgcacgacgcccggcctaaggaaggcgacgaccggcccttcttttggctgttcgagaatgtggtggccatgggagtcagcgacaagcgggatattagccggttcctggagagcaaccccgtgatgatcgatgccaaggaagtgagcgccgcccaccgggccagatacttctggggcaatctgcctggcatgaacagacccctggccagcaccgtgaacgacaagctggagctgcaggagtgcctggagcacggccggatcgccaagttcagcaaggtgagaaccatcaccacccgaagcaacagcatcaaacaaggcaaggaccagcactttcctgtgttcatgaacgagaaggaggacatcctgtggtgtaccgagatggagagagtgttcgggttcccagtccactacacagatgtcagcaacatgtctagactggccagacagagactgctgggaagaagctggtccgtccctgtgatcagacacctgttcgcccctctgaaggagtacttcgcctgcgtgagcagcggcaacagcaacgccaacagccggggccccagcttctctagcggcctggtgccactgtccctgagagggagccacatgggccccatggagatctacaaaaccgtgagcgcctggaagcggcagcctgtgcgcgtgctgagcctgtttcggaatatcgataaagtcctgaaaagcctgggattcctggagagcggctctggctccggcggtggcaccctgaagtacgtggaggatgtgacaaacgtggtcagacgggatgtggagaagtggggccccttcgatctggtgtacggcagcacccaacccctgggcagctcttgtgaccggtgccctggctggtacatgtttcagttccaccggatcctgcagtacgccctgccgagacaggagtcccagcggccattcttttggattttcatggacaacttgctgctgaccgaggatgaccaggaaactaccactcggttcctgcagaccgaagccgtgaccctgcaggacgtgagaggccgggactaccagaacgccatgcgggtgtggtccaacatccctggactgaaaagcaagcacgcacctctgacccctaaagaagaggagtacctgcaggcccaggtgcggagcagaagcaagctggacgcccctaaggtggatctgctggtgaagaattgcctcctgcccctgagagagtacttcaagtatttcagccagaatagtctgcccctgggcggcccaagcagcggcgcccctcctcccagcggcggcagcccagccggctccccaacctctaccgaggagggcacctctgagtccgccacccccgagagcggccctggcacctccaccgagcccagcgagggcagcgcacccggcagccctgccggcagccccacctccacagaggagggaaccagcaccgagcccagcgaaggcagcgccccaggcaccagcaccgagcctagtgagggcggctctggcggcggcagcgcccaggagattaaacggatcaacaagatcagaagaagacttgtgaaagacagcaacaccaagaaggccggcaagacaggccccatgaaaaccctgctggttagagtgatgacacccgatctgagagagcggctggaaaacctgagaaagaagcctgaaaatatcccccagcccatcagcaatacatctagagccaacctgaataagctgctgaccgattacaccgaaatgaagaaggcgatcctgcatgtgtactgggaagagttccagaaggaccctgtgggcctgatgagccgggtggcccagcctgccagcaagaagatcgatcagaacaagctgaaacctgagatggacgagaagggcaacctgaccaccgccggctttgcctgctctcagtgtggccagcccctgttcgtgtacaagctggagcaggtgtctgagaagggcaaggcttacaccaactacttcggacggtgcaatgtggccgagcacgaaaagctgatcctgctggcccagctgaagcccgagaaggatagcgacgaagccgtgacatatagcctgggaaagtttgggcagagggccctggatttctacagcattcatgtgaccaaggagtccacccaccccgtgaagcccctggcccagatcgccggaaacagatacgcctccggacctgtgggaaaggccctgagcgacgcatgtatgggcacaatcgcctccttcctgtctaagtaccaggacatcatcatcgaacaccagaaggtggtgaagggcaaccagaagagactggagagcctgcgggagctggccggcaaggaaaacctggaataccctagcgtgaccctgccacctcagcctcacaccaaggagggcgttgatgcctacaacgaagtgatcgcccgggtgcgaatgtgggtgaacctgaacctgtggcagaagctgaagctaagcagagatgatgccaagcctctgctgagactgaagggattcccttcctttcctctggtcgagagacaggccaacgaagtggactggtgggacatggtgtgtaacgtgaagaagctgatcaacgagaaaaaggaggatggcaaggtgttttggcagaatctggctggctacaagagacaggaagccctgagaccatacctgagcagcgaggaagatcggaagaagggaaagaaattcgctcggtaccagctgggcgacctgctgctgcacctggaaaagaagcacggcgaggactggggaaaggtgtacgacgaggcctgggagcggattgacaagaaagtggaaggcctgagcaagcacatcaagctggaagaggaacggagaagcgaggacgcccagagcaaggccgccctgaccgactggctgcgggctaaggccagcttcgtgatcgagggcctgaaggaggccgacaaggacgagttctgcagatgcgagctgaagctgcagaagtggtacggggacctgcggggaaagcccttcgccatcgaagccgagaacagcatcctggacatcagcggcttcagcaagcagtacaactgtgccttcatctggcagaaggacggcgtgaagaagctgaacctgtacctgatcatcaactacttcaagggcggcaagctgcggttcaagaagatcaaacctgaagccttcgaagccaacagattctacaccgtgatcaacaaaaagagcggcgagatcgtgcccatggaggtgaacttcaacttcgacgaccccaacctgatcatcctgcctctggcctttggcaagagacagggcagagaattcatctggaacgacctgctgtccctggaaaccggcagcctgaagctggccaacggaagagtgatcgagaagacactgtacaacagaagaacccggcaggatgagcctgccctgttcgtggccctgaccttcgagcggcgggaggtcctggactcctccaatatcaaaccaatgaacctgatcggcgtggcaagaggcgaaaacatccccgccgtgatcgccctgaccgaccccgagggctgcccactgagccggtttaaggatagcctgggaaacccaacccacatcctgagaatcggcgagagctataaggagaagcagcggaccatccaggccaagaaggaggtggagcagcggagagccggcggctacagccggaagtacgccagcaaagccaagaatctggcagacgatatggtgagaaacaccgctagagatctgctgtactacgccgtgacccaggatgccatgctgatcttcgccaacctgagccggggcttcggccggcagggcaagcggaccttcatggccgagagacagtacacacggatggaggactggctgaccgccaagctggcctacgagggcctgagcaagacctacctgtccaagacactggcccagtacacctccaagacatgcagcaactgtgggtttaccatcaccagcgccgactacgacagggtgctggagaagctgaagaagacagcaacaggctggatgaccacaattaacggcaaggagctgaaggtggagggccagattacctactacaacagatacaagagacagaacgtagtcaaggacctgtccgtcgagctggatagactgagcgaagaatctgtgaacaacgacatctcctcctggacaaagggcagaagcggagaagctctgagcctcctgaagaaaagattctcccatagacccgtgcaggagaagttcgtgtgcctgaactgcggcttcgagacacacgcagccgagcaagccgccctgaacatcgccagatcctggctgttcctgcggagccaggagtacaagaaataccagacaaacaagacaaccggcaacaccgataagagagccttcgtcgagacctggcagtccttttaccggaagaagcttaaggaggtgtggaaacctgccgtgcggtctggcggatctggcggaggctccacaagcctgcaggacagcgtgaccttcaaggacgtggccgtggacttcagccaggaggagtgggagaggctgaaccccgcccagaggagcctgtacaggaccgtggtgctggagaactactggaacctggtgagcgtgggcgcctgcgtgagcaagagccacctgatcagcctgctggagcacggcaaggccccctgggacatgaggggcgaggtgaccgagagcaccagccaggacggcgagagcgtgaccagccccaagaaaaagagaaaagtctaagctgccttctgcggggcttgccttctggccatgcccttcttctctcccttgcacctgtacctcttggtctttgaataaagcctgagtaggaaggctagcaaaaaaaaaaaaaaaaaaaaaaaaaaaaaaaaaaaaaaaaaaaaaaaaaaaaaaaaaaaaaaaaaaaaaaaaaaaaaaaa

SEQ ID NO: 6932 - RNA, 5797 nt, synthetic construct
  source 1..5797: mol_type = other RNA
aggaaataagagagaaaagaagagtaagaagaaatataagagccaccatggcccctaagaagaagcgtaaagtgagccggatggaacgcctcgtctacgaggtgcggcagaagtgcagaaacatcgaggacatctgcatctcctgcggatctctgaacgtgaccctggagcacccactgttcatcggcggcatgtgccagaactgtaaaaactgttttctggagtgtgcctatcaatacgacgatgacggctaccagagctactgcaccatctgttgcggcggaagagaggtgctgatgtgtggaaataacaactgctgccggtgcttctgcgtggaatgcgtggacctgctggtgggccccggcgccgcccaggccgctattaaggaagatccttggaactgctacatgtgcggccacaagggcacatacggcctgctgagacggagagaggactggcctagcagactgcagatgttcttcgccaataaccacgaccaggagttcgacccccctaaggtgtaccctcccgtccccgccgagaagagaaagcccatccgggtcctgagcctgttcgatggcatcgccaccggtctgctggtgctgaaggacctgggcatccaggtggataggtacattgcctccgaggtgtgcgaggactccatcaccgtgggaatggtgcgtcatcagggcaagatcatgtacgtgggcgacgtgcggagcgtgacacagaagcatatccaggagtggggccctttcgacctggtgatcggcggcagcccttgcaatgacctgagcatcgtgaacccagcccggaagggcctgtacgagggaaccggcagactgttcttcgagttttacagactgctgcacgacgcccggcctaaggaaggcgacgaccggcccttcttttggctgttcgagaatgtggtggccatgggagtcagcgacaagcgggatattagccggttcctggagagcaaccccgtgatgatcgatgccaaggaagtgagcgccgcccaccgggccagatacttctggggcaatctgcctggcatgaacagacccctggccagcaccgtgaacgacaagctggagctgcaggagtgcctggagcacggccggatcgccaagttcagcaaggtgagaaccatcaccacccgaagcaacagcatcaaacaaggcaaggaccagcactttcctgtgttcatgaacgagaaggaggacatcctgtggtgtaccgagatggagagagtgttcgggttcccagtccactacacagatgtcagcaacatgtctagactggccagacagagactgctgggaagaagctggtccgtccctgtgatcagacacctgttcgcccctctgaaggagtacttcgcctgcgtgagcagcggcaacagcaacgccaacagccggggccccagcttctctagcggcctggtgccactgtccctgagagggagccacatgggccccatggagatctacaaaaccgtgagcgcctggaagcggcagcctgtgcgcgtgctgagcctgtttcggaatatcgataaagtcctgaaaagcctgggattcctggagagcggctctggctccggcggtggcaccctgaagtacgtggaggatgtgacaaacgtggtcagacgggatgtggagaagtggggccccttcgatctggtgtacggcagcacccaacccctgggcagctcttgtgaccggtgccctggctggtacatgtttcagttccaccggatcctgcagtacgccctgccgagacaggagtcccagcggccattcttttggattttcatggacaacttgctgctgaccgaggatgaccaggaaactaccactcggttcctgcagaccgaagccgtgaccctgcaggacgtgagaggccgggactaccagaacgccatgcgggtgtggtccaacatccctggactgaaaagcaagcacgcacctctgacccctaaagaagaggagtacctgcaggcccaggtgcggagcagaagcaagctggacgcccctaaggtggatctgctggtgaagaattgcctcctgcccctgagagagtacttcaagtatttcagccagaatagtctgcccctgggcggcccaagcagcggcgcccctcctcccagcggcggcagcccagccggctccccaacctctaccgaggagggcacctctgagtccgccacccccgagagcggccctggcacctccaccgagcccagcgagggcagcgcacccggcagccctgccggcagccccacctccacagaggagggaaccagcaccgagcccagcgaaggcagcgccccaggcaccagcaccgagcctagtgagggcggctctggcggcggcagcgcccaggagattaaacggatcaacaagatcagaagaagacttgtgaaagacagcaacaccaagaaggccggcaagacaggccccatgaaaaccctgctggttagagtgatgacacccgatctgagagagcggctggaaaacctgagaaagaagcctgaaaatatcccccagcccatcagcaatacatctagagccaacctgaataagctgctgaccgattacaccgaaatgaagaaggcgatcctgcatgtgtactgggaagagttccagaaggaccctgtgggcctgatgagccgggtggcccagcctgccagcaagaagatcgatcagaacaagctgaaacctgagatggacgagaagggcaacctgaccaccgccggctttgcctgctctcagtgtggccagcccctgttcgtgtacaagctggagcaggtgtctgagaagggcaaggcttacaccaactacttcggacggtgcaatgtggccgagcacgaaaagctgatcctgctggcccagctgaagcccgagaaggatagcgacgaagccgtgacatatagcctgggaaagtttgggcagagggccctggatttctacagcattcatgtgaccaaggagtccacccaccccgtgaagcccctggcccagatcgccggaaacagatacgcctccggacctgtgggaaaggccctgagcgacgcatgtatgggcacaatcgcctccttcctgtctaagtaccaggacatcatcatcgaacaccagaaggtggtgaagggcaaccagaagagactggagagcctgcgggagctggccggcaaggaaaacctggaataccctagcgtgaccctgccacctcagcctcacaccaaggagggcgttgatgcctacaacgaagtgatcgcccgggtgcgaatgtgggtgaacctgaacctgtggcagaagctgaagctaagcagagatgatgccaagcctctgctgagactgaagggattcccttcctttcctctggtcgagagacaggccaacgaagtggactggtgggacatggtgtgtaacgtgaagaagctgatcaacgagaaaaaggaggatggcaaggtgttttggcagaatctggctggctacaagagacaggaagccctgagaccatacctgagcagcgaggaagatcggaagaagggaaagaaattcgctcggtaccagctgggcgacctgctgctgcacctggaaaagaagcacggcgaggactggggaaaggtgtacgacgaggcctgggagcggattgacaagaaagtggaaggcctgagcaagcacatcaagctggaagaggaacggagaagcgaggacgcccagagcaaggccgccctgaccgactggctgcgggctaaggccagcttcgtgatcgagggcctgaaggaggccgacaaggacgagttctgcagatgcgagctgaagctgcagaagtggtacggggacctgcggggaaagcccttcgccatcgaagccgagaacagcatcctggacatcagcggcttcagcaagcagtacaactgtgccttcatctggcagaaggacggcgtgaagaagctgaacctgtacctgatcatcaactacttcaagggcggcaagctgcggttcaagaagatcaaacctgaagccttcgaagccaacagattctacaccgtgatcaacaaaaagagcggcgagatcgtgcccatggaggtgaacttcaacttcgacgaccccaacctgatcatcctgcctctggcctttggcaagagacagggcagagaattcatctggaacgacctgctgtccctggaaaccggcagcctgaagctggccaacggaagagtgatcgagaagacactgtacaacagaagaacccggcaggatgagcctgccctgttcgtggccctgaccttcgagcggcgggaggtcctggactcctccaatatcaaaccaatgaacctgatcggcgtggcaagaggcgaaaacatccccgccgtgatcgccctgaccgaccccgagggctgcccactgagccggtttaaggatagcctgggaaacccaacccacatcctgagaatcggcgagagctataaggagaagcagcggaccatccaggccaagaaggaggtggagcagcggagagccggcggctacagccggaagtacgccagcaaagccaagaatctggcagacgatatggtgagaaacaccgctagagatctgctgtactacgccgtgacccaggatgccatgctgatcttcgccaacctgagccggggcttcggccggcagggcaagcggaccttcatggccgagagacagtacacacggatggaggactggctgaccgccaagctggcctacgagggcctgagcaagacctacctgtccaagacactggcccagtacacctccaagacatgcagcaactgtgggtttaccatcaccagcgccgactacgacagggtgctggagaagctgaagaagacagcaacaggctggatgaccacaattaacggcaaggagctgaaggtggagggccagattacctactacaacagatacaagagacagaacgtagtcaaggacctgtccgtcgagctggatagactgagcgaagaatctgtgaacaacgacatctcctcctggacaaagggcagaagcggagaagctctgagcctcctgaagaaaagattctcccatagacccgtgcaggagaagttcgtgtgcctgaactgcggcttcgagacacacgcagccgagcaagccgccctgaacatcgccagatcctggctgttcctgcggagccaggagtacaagaaataccagacaaacaagacaaccggcaacaccgataagagagccttcgtcgagacctggcagtccttttaccggaagaagcttaaggaggtgtggaaacctgccgtgcggtctggcggatctggcggaggctccacaagcccccaggagagcgtgaccttcgaggacgtggccgtgtacttcacccagaaggagtgggagggcctggcccccgcccagagggccctgtacagggacgtgatgctggagaactacggcaacctggtgagcctggccttcctgttccccaagcccgccgtgatcagccagctggagcagggcgagaagccctggatccagaccccccagaggcccctggacaagaagaagacctacaagggctgcaccagccccaagaaaaagagaaaagtctaagctgccttctgcggggcttgccttctggccatgcccttcttctctcccttgcacctgtacctcttggtctttgaataaagcctgagtaggaaggctagcaaaaaaaaaaaaaaaaaaaaaaaaaaaaaaaaaaaaaaaaaaaaaaaaaaaaaaaaaaaaaaaaaaaaaaaaaaaaaaaa

SEQ ID NO: 6933 - RNA, 5797 nt, synthetic construct
  source 1..5797: mol_type = other RNA
aggaaataagagagaaaagaagagtaagaagaaatataagagccaccatggcccctaagaagaagcgtaaagtgagccggatggaacgcctcgtctacgaggtgcggcagaagtgcagaaacatcgaggacatctgcatctcctgcggatctctgaacgtgaccctggagcacccactgttcatcggcggcatgtgccagaactgtaaaaactgttttctggagtgtgcctatcaatacgacgatgacggctaccagagctactgcaccatctgttgcggcggaagagaggtgctgatgtgtggaaataacaactgctgccggtgcttctgcgtggaatgcgtggacctgctggtgggccccggcgccgcccaggccgctattaaggaagatccttggaactgctacatgtgcggccacaagggcacatacggcctgctgagacggagagaggactggcctagcagactgcagatgttcttcgccaataaccacgaccaggagttcgacccccctaaggtgtaccctcccgtccccgccgagaagagaaagcccatccgggtcctgagcctgttcgatggcatcgccaccggtctgctggtgctgaaggacctgggcatccaggtggataggtacattgcctccgaggtgtgcgaggactccatcaccgtgggaatggtgcgtcatcagggcaagatcatgtacgtgggcgacgtgcggagcgtgacacagaagcatatccaggagtggggccctttcgacctggtgatcggcggcagcccttgcaatgacctgagcatcgtgaacccagcccggaagggcctgtacgagggaaccggcagactgttcttcgagttttacagactgctgcacgacgcccggcctaaggaaggcgacgaccggcccttcttttggctgttcgagaatgtggtggccatgggagtcagcgacaagcgggatattagccggttcctggagagcaaccccgtgatgatcgatgccaaggaagtgagcgccgcccaccgggccagatacttctggggcaatctgcctggcatgaacagacccctggccagcaccgtgaacgacaagctggagctgcaggagtgcctggagcacggccggatcgccaagttcagcaaggtgagaaccatcaccacccgaagcaacagcatcaaacaaggcaaggaccagcactttcctgtgttcatgaacgagaaggaggacatcctgtggtgtaccgagatggagagagtgttcgggttcccagtccactacacagatgtcagcaacatgtctagactggccagacagagactgctgggaagaagctggtccgtccctgtgatcagacacctgttcgcccctctgaaggagtacttcgcctgcgtgagcagcggcaacagcaacgccaacagccggggccccagcttctctagcggcctggtgccactgtccctgagagggagccacatgggccccatggagatctacaaaaccgtgagcgcctggaagcggcagcctgtgcgcgtgctgagcctgtttcggaatatcgataaagtcctgaaaagcctgggattcctggagagcggctctggctccggcggtggcaccctgaagtacgtggaggatgtgacaaacgtggtcagacgggatgtggagaagtggggccccttcgatctggtgtacggcagcacccaacccctgggcagctcttgtgaccggtgccctggctggtacatgtttcagttccaccggatcctgcagtacgccctgccgagacaggagtcccagcggccattcttttggattttcatggacaacttgctgctgaccgaggatgaccaggaaactaccactcggttcctgcagaccgaagccgtgaccctgcaggacgtgagaggccgggactaccagaacgccatgcgggtgtggtccaacatccctggactgaaaagcaagcacgcacctctgacccctaaagaagaggagtacctgcaggcccaggtgcggagcagaagcaagctggacgcccctaaggtggatctgctggtgaagaattgcctcctgcccctgagagagtacttcaagtatttcagccagaatagtctgcccctgggcggcccaagcagcggcgcccctcctcccagcggcggcagcccagccggctccccaacctctaccgaggagggcacctctgagtccgccacccccgagagcggccctggcacctccaccgagcccagcgagggcagcgcacccggcagccctgccggcagccccacctccacagaggagggaaccagcaccgagcccagcgaaggcagcgccccaggcaccagcaccgagcctagtgagggcggctctggcggcggcagcgcccaggagattaaacggatcaacaagatcagaagaagacttgtgaaagacagcaacaccaagaaggccggcaagacaggccccatgaaaaccctgctggttagagtgatgacacccgatctgagagagcggctggaaaacctgagaaagaagcctgaaaatatcccccagcccatcagcaatacatctagagccaacctgaataagctgctgaccgattacaccgaaatgaagaaggcgatcctgcatgtgtactgggaagagttccagaaggaccctgtgggcctgatgagccgggtggcccagcctgccagcaagaagatcgatcagaacaagctgaaacctgagatggacgagaagggcaacctgaccaccgccggctttgcctgctctcagtgtggccagcccctgttcgtgtacaagctggagcaggtgtctgagaagggcaaggcttacaccaactacttcggacggtgcaatgtggccgagcacgaaaagctgatcctgctggcccagctgaagcccgagaaggatagcgacgaagccgtgacatatagcctgggaaagtttgggcagagggccctggatttctacagcattcatgtgaccaaggagtccacccaccccgtgaagcccctggcccagatcgccggaaacagatacgcctccggacctgtgggaaaggccctgagcgacgcatgtatgggcacaatcgcctccttcctgtctaagtaccaggacatcatcatcgaacaccagaaggtggtgaagggcaaccagaagagactggagagcctgcgggagctggccggcaaggaaaacctggaataccctagcgtgaccctgccacctcagcctcacaccaaggagggcgttgatgcctacaacgaagtgatcgcccgggtgcgaatgtgggtgaacctgaacctgtggcagaagctgaagctaagcagagatgatgccaagcctctgctgagactgaagggattcccttcctttcctctggtcgagagacaggccaacgaagtggactggtgggacatggtgtgtaacgtgaagaagctgatcaacgagaaaaaggaggatggcaaggtgttttggcagaatctggctggctacaagagacaggaagccctgagaccatacctgagcagcgaggaagatcggaagaagggaaagaaattcgctcggtaccagctgggcgacctgctgctgcacctggaaaagaagcacggcgaggactggggaaaggtgtacgacgaggcctgggagcggattgacaagaaagtggaaggcctgagcaagcacatcaagctggaagaggaacggagaagcgaggacgcccagagcaaggccgccctgaccgactggctgcgggctaaggccagcttcgtgatcgagggcctgaaggaggccgacaaggacgagttctgcagatgcgagctgaagctgcagaagtggtacggggacctgcggggaaagcccttcgccatcgaagccgagaacagcatcctggacatcagcggcttcagcaagcagtacaactgtgccttcatctggcagaaggacggcgtgaagaagctgaacctgtacctgatcatcaactacttcaagggcggcaagctgcggttcaagaagatcaaacctgaagccttcgaagccaacagattctacaccgtgatcaacaaaaagagcggcgagatcgtgcccatggaggtgaacttcaacttcgacgaccccaacctgatcatcctgcctctggcctttggcaagagacagggcagagaattcatctggaacgacctgctgtccctggaaaccggcagcctgaagctggccaacggaagagtgatcgagaagacactgtacaacagaagaacccggcaggatgagcctgccctgttcgtggccctgaccttcgagcggcgggaggtcctggactcctccaatatcaaaccaatgaacctgatcggcgtggcaagaggcgaaaacatccccgccgtgatcgccctgaccgaccccgagggctgcccactgagccggtttaaggatagcctgggaaacccaacccacatcctgagaatcggcgagagctataaggagaagcagcggaccatccaggccaagaaggaggtggagcagcggagagccggcggctacagccggaagtacgccagcaaagccaagaatctggcagacgatatggtgagaaacaccgctagagatctgctgtactacgccgtgacccaggatgccatgctgatcttcgccaacctgagccggggcttcggccggcagggcaagcggaccttcatggccgagagacagtacacacggatggaggactggctgaccgccaagctggcctacgagggcctgagcaagacctacctgtccaagacactggcccagtacacctccaagacatgcagcaactgtgggtttaccatcaccagcgccgactacgacagggtgctggagaagctgaagaagacagcaacaggctggatgaccacaattaacggcaaggagctgaaggtggagggccagattacctactacaacagatacaagagacagaacgtagtcaaggacctgtccgtcgagctggatagactgagcgaagaatctgtgaacaacgacatctcctcctggacaaagggcagaagcggagaagctctgagcctcctgaagaaaagattctcccatagacccgtgcaggagaagttcgtgtgcctgaactgcggcttcgagacacacgcagccgagcaagccgccctgaacatcgccagatcctggctgttcctgcggagccaggagtacaagaaataccagacaaacaagacaaccggcaacaccgataagagagccttcgtcgagacctggcagtccttttaccggaagaagcttaaggaggtgtggaaacctgccgtgcggtctggcggatctggcggaggctccacaagcatgcccgccaacgaggacgccccccagcccggcgagcacggcagcgcctgcgaggtgagcgtgagcttcgaggacgtgaccgtggacttcagcagggaggagtggcagcagctggacagcacccagaggaggctgtaccaggacgtgatgctggagaactacagccacctgctgagcgtgggcttcgaggtgcccaagcccgaggtgatcttcaagctggagcagggcgagggcccctggaccaccagccccaagaaaaagagaaaagtctaagctgccttctgcggggcttgccttctggccatgcccttcttctctcccttgcacctgtacctcttggtctttgaataaagcctgagtaggaaggctagcaaaaaaaaaaaaaaaaaaaaaaaaaaaaaaaaaaaaaaaaaaaaaaaaaaaaaaaaaaaaaaaaaaaaaaaaaaaaaaaa

SEQ ID NO: 6934 - RNA, 5797 nt, synthetic construct
  source 1..5797: mol_type = other RNA
aggaaataagagagaaaagaagagtaagaagaaatataagagccaccatggcccctaagaagaagcgtaaagtgagccggatggaacgcctcgtctacgaggtgcggcagaagtgcagaaacatcgaggacatctgcatctcctgcggatctctgaacgtgaccctggagcacccactgttcatcggcggcatgtgccagaactgtaaaaactgttttctggagtgtgcctatcaatacgacgatgacggctaccagagctactgcaccatctgttgcggcggaagagaggtgctgatgtgtggaaataacaactgctgccggtgcttctgcgtggaatgcgtggacctgctggtgggccccggcgccgcccaggccgctattaaggaagatccttggaactgctacatgtgcggccacaagggcacatacggcctgctgagacggagagaggactggcctagcagactgcagatgttcttcgccaataaccacgaccaggagttcgacccccctaaggtgtaccctcccgtccccgccgagaagagaaagcccatccgggtcctgagcctgttcgatggcatcgccaccggtctgctggtgctgaaggacctgggcatccaggtggataggtacattgcctccgaggtgtgcgaggactccatcaccgtgggaatggtgcgtcatcagggcaagatcatgtacgtgggcgacgtgcggagcgtgacacagaagcatatccaggagtggggccctttcgacctggtgatcggcggcagcccttgcaatgacctgagcatcgtgaacccagcccggaagggcctgtacgagggaaccggcagactgttcttcgagttttacagactgctgcacgacgcccggcctaaggaaggcgacgaccggcccttcttttggctgttcgagaatgtggtggccatgggagtcagcgacaagcgggatattagccggttcctggagagcaaccccgtgatgatcgatgccaaggaagtgagcgccgcccaccgggccagatacttctggggcaatctgcctggcatgaacagacccctggccagcaccgtgaacgacaagctggagctgcaggagtgcctggagcacggccggatcgccaagttcagcaaggtgagaaccatcaccacccgaagcaacagcatcaaacaaggcaaggaccagcactttcctgtgttcatgaacgagaaggaggacatcctgtggtgtaccgagatggagagagtgttcgggttcccagtccactacacagatgtcagcaacatgtctagactggccagacagagactgctgggaagaagctggtccgtccctgtgatcagacacctgttcgcccctctgaaggagtacttcgcctgcgtgagcagcggcaacagcaacgccaacagccggggccccagcttctctagcggcctggtgccactgtccctgagagggagccacatgggccccatggagatctacaaaaccgtgagcgcctggaagcggcagcctgtgcgcgtgctgagcctgtttcggaatatcgataaagtcctgaaaagcctgggattcctggagagcggctctggctccggcggtggcaccctgaagtacgtggaggatgtgacaaacgtggtcagacgggatgtggagaagtggggccccttcgatctggtgtacggcagcacccaacccctgggcagctcttgtgaccggtgccctggctggtacatgtttcagttccaccggatcctgcagtacgccctgccgagacaggagtcccagcggccattcttttggattttcatggacaacttgctgctgaccgaggatgaccaggaaactaccactcggttcctgcagaccgaagccgtgaccctgcaggacgtgagaggccgggactaccagaacgccatgcgggtgtggtccaacatccctggactgaaaagcaagcacgcacctctgacccctaaagaagaggagtacctgcaggcccaggtgcggagcagaagcaagctggacgcccctaaggtggatctgctggtgaagaattgcctcctgcccctgagagagtacttcaagtatttcagccagaatagtctgcccctgggcggcccaagcagcggcgcccctcctcccagcggcggcagcccagccggctccccaacctctaccgaggagggcacctctgagtccgccacccccgagagcggccctggcacctccaccgagcccagcgagggcagcgcacccggcagccctgccggcagccccacctccacagaggagggaaccagcaccgagcccagcgaaggcagcgccccaggcaccagcaccgagcctagtgagggcggctctggcggcggcagcgcccaggagattaaacggatcaacaagatcagaagaagacttgtgaaagacagcaacaccaagaaggccggcaagacaggccccatgaaaaccctgctggttagagtgatgacacccgatctgagagagcggctggaaaacctgagaaagaagcctgaaaatatcccccagcccatcagcaatacatctagagccaacctgaataagctgctgaccgattacaccgaaatgaagaaggcgatcctgcatgtgtactgggaagagttccagaaggaccctgtgggcctgatgagccgggtggcccagcctgccagcaagaagatcgatcagaacaagctgaaacctgagatggacgagaagggcaacctgaccaccgccggctttgcctgctctcagtgtggccagcccctgttcgtgtacaagctggagcaggtgtctgagaagggcaaggcttacaccaactacttcggacggtgcaatgtggccgagcacgaaaagctgatcctgctggcccagctgaagcccgagaaggatagcgacgaagccgtgacatatagcctgggaaagtttgggcagagggccctggatttctacagcattcatgtgaccaaggagtccacccaccccgtgaagcccctggcccagatcgccggaaacagatacgcctccggacctgtgggaaaggccctgagcgacgcatgtatgggcacaatcgcctccttcctgtctaagtaccaggacatcatcatcgaacaccagaaggtggtgaagggcaaccagaagagactggagagcctgcgggagctggccggcaaggaaaacctggaataccctagcgtgaccctgccacctcagcctcacaccaaggagggcgttgatgcctacaacgaagtgatcgcccgggtgcgaatgtgggtgaacctgaacctgtggcagaagctgaagctaagcagagatgatgccaagcctctgctgagactgaagggattcccttcctttcctctggtcgagagacaggccaacgaagtggactggtgggacatggtgtgtaacgtgaagaagctgatcaacgagaaaaaggaggatggcaaggtgttttggcagaatctggctggctacaagagacaggaagccctgagaccatacctgagcagcgaggaagatcggaagaagggaaagaaattcgctcggtaccagctgggcgacctgctgctgcacctggaaaagaagcacggcgaggactggggaaaggtgtacgacgaggcctgggagcggattgacaagaaagtggaaggcctgagcaagcacatcaagctggaagaggaacggagaagcgaggacgcccagagcaaggccgccctgaccgactggctgcgggctaaggccagcttcgtgatcgagggcctgaaggaggccgacaaggacgagttctgcagatgcgagctgaagctgcagaagtggtacggggacctgcggggaaagcccttcgccatcgaagccgagaacagcatcctggacatcagcggcttcagcaagcagtacaactgtgccttcatctggcagaaggacggcgtgaagaagctgaacctgtacctgatcatcaactacttcaagggcggcaagctgcggttcaagaagatcaaacctgaagccttcgaagccaacagattctacaccgtgatcaacaaaaagagcggcgagatcgtgcccatggaggtgaacttcaacttcgacgaccccaacctgatcatcctgcctctggcctttggcaagagacagggcagagaattcatctggaacgacctgctgtccctggaaaccggcagcctgaagctggccaacggaagagtgatcgagaagacactgtacaacagaagaacccggcaggatgagcctgccctgttcgtggccctgaccttcgagcggcgggaggtcctggactcctccaatatcaaaccaatgaacctgatcggcgtggcaagaggcgaaaacatccccgccgtgatcgccctgaccgaccccgagggctgcccactgagccggtttaaggatagcctgggaaacccaacccacatcctgagaatcggcgagagctataaggagaagcagcggaccatccaggccaagaaggaggtggagcagcggagagccggcggctacagccggaagtacgccagcaaagccaagaatctggcagacgatatggtgagaaacaccgctagagatctgctgtactacgccgtgacccaggatgccatgctgatcttcgccaacctgagccggggcttcggccggcagggcaagcggaccttcatggccgagagacagtacacacggatggaggactggctgaccgccaagctggcctacgagggcctgagcaagacctacctgtccaagacactggcccagtacacctccaagacatgcagcaactgtgggtttaccatcaccagcgccgactacgacagggtgctggagaagctgaagaagacagcaacaggctggatgaccacaattaacggcaaggagctgaaggtggagggccagattacctactacaacagatacaagagacagaacgtagtcaaggacctgtccgtcgagctggatagactgagcgaagaatctgtgaacaacgacatctcctcctggacaaagggcagaagcggagaagctctgagcctcctgaagaaaagattctcccatagacccgtgcaggagaagttcgtgtgcctgaactgcggcttcgagacacacgcagccgagcaagccgccctgaacatcgccagatcctggctgttcctgcggagccaggagtacaagaaataccagacaaacaagacaaccggcaacaccgataagagagccttcgtcgagacctggcagtccttttaccggaagaagcttaaggaggtgtggaaacctgccgtgcggtctggcggatctggcggaggctccacaagcgcccaggaggccgtgaccttcaaggacgtggccgtggacttcaccagggaggagtggaggctgctgagccccccccagaaggagctgtacaaggaggtgatgctggagaacgcccagaacctgctgaccgtgggcctgcccgccccccccgagaacgtgatcagcgccctgggcgccgagggcagccccgtggacgccaggggcaggaggcccgagggcgcctgctgccccggcgagatcatcaccagccccaagaaaaagagaaaagtctaagctgccttctgcggggcttgccttctggccatgcccttcttctctcccttgcacctgtacctcttggtctttgaataaagcctgagtaggaaggctagcaaaaaaaaaaaaaaaaaaaaaaaaaaaaaaaaaaaaaaaaaaaaaaaaaaaaaaaaaaaaaaaaaaaaaaaaaaaaaaaa

SEQ ID NO: 6935 - RNA, 5797 nt, synthetic construct
  source 1..5797: mol_type = other RNA
aggaaataagagagaaaagaagagtaagaagaaatataagagccaccatggcccctaagaagaagcgtaaagtgagccggatggaacgcctcgtctacgaggtgcggcagaagtgcagaaacatcgaggacatctgcatctcctgcggatctctgaacgtgaccctggagcacccactgttcatcggcggcatgtgccagaactgtaaaaactgttttctggagtgtgcctatcaatacgacgatgacggctaccagagctactgcaccatctgttgcggcggaagagaggtgctgatgtgtggaaataacaactgctgccggtgcttctgcgtggaatgcgtggacctgctggtgggccccggcgccgcccaggccgctattaaggaagatccttggaactgctacatgtgcggccacaagggcacatacggcctgctgagacggagagaggactggcctagcagactgcagatgttcttcgccaataaccacgaccaggagttcgacccccctaaggtgtaccctcccgtccccgccgagaagagaaagcccatccgggtcctgagcctgttcgatggcatcgccaccggtctgctggtgctgaaggacctgggcatccaggtggataggtacattgcctccgaggtgtgcgaggactccatcaccgtgggaatggtgcgtcatcagggcaagatcatgtacgtgggcgacgtgcggagcgtgacacagaagcatatccaggagtggggccctttcgacctggtgatcggcggcagcccttgcaatgacctgagcatcgtgaacccagcccggaagggcctgtacgagggaaccggcagactgttcttcgagttttacagactgctgcacgacgcccggcctaaggaaggcgacgaccggcccttcttttggctgttcgagaatgtggtggccatgggagtcagcgacaagcgggatattagccggttcctggagagcaaccccgtgatgatcgatgccaaggaagtgagcgccgcccaccgggccagatacttctggggcaatctgcctggcatgaacagacccctggccagcaccgtgaacgacaagctggagctgcaggagtgcctggagcacggccggatcgccaagttcagcaaggtgagaaccatcaccacccgaagcaacagcatcaaacaaggcaaggaccagcactttcctgtgttcatgaacgagaaggaggacatcctgtggtgtaccgagatggagagagtgttcgggttcccagtccactacacagatgtcagcaacatgtctagactggccagacagagactgctgggaagaagctggtccgtccctgtgatcagacacctgttcgcccctctgaaggagtacttcgcctgcgtgagcagcggcaacagcaacgccaacagccggggccccagcttctctagcggcctggtgccactgtccctgagagggagccacatgggccccatggagatctacaaaaccgtgagcgcctggaagcggcagcctgtgcgcgtgctgagcctgtttcggaatatcgataaagtcctgaaaagcctgggattcctggagagcggctctggctccggcggtggcaccctgaagtacgtggaggatgtgacaaacgtggtcagacgggatgtggagaagtggggccccttcgatctggtgtacggcagcacccaacccctgggcagctcttgtgaccggtgccctggctggtacatgtttcagttccaccggatcctgcagtacgccctgccgagacaggagtcccagcggccattcttttggattttcatggacaacttgctgctgaccgaggatgaccaggaaactaccactcggttcctgcagaccgaagccgtgaccctgcaggacgtgagaggccgggactaccagaacgccatgcgggtgtggtccaacatccctggactgaaaagcaagcacgcacctctgacccctaaagaagaggagtacctgcaggcccaggtgcggagcagaagcaagctggacgcccctaaggtggatctgctggtgaagaattgcctcctgcccctgagagagtacttcaagtatttcagccagaatagtctgcccctgggcggcccaagcagcggcgcccctcctcccagcggcggcagcccagccggctccccaacctctaccgaggagggcacctctgagtccgccacccccgagagcggccctggcacctccaccgagcccagcgagggcagcgcacccggcagccctgccggcagccccacctccacagaggagggaaccagcaccgagcccagcgaaggcagcgccccaggcaccagcaccgagcctagtgagggcggctctggcggcggcagcgcccaggagattaaacggatcaacaagatcagaagaagacttgtgaaagacagcaacaccaagaaggccggcaagacaggccccatgaaaaccctgctggttagagtgatgacacccgatctgagagagcggctggaaaacctgagaaagaagcctgaaaatatcccccagcccatcagcaatacatctagagccaacctgaataagctgctgaccgattacaccgaaatgaagaaggcgatcctgcatgtgtactgggaagagttccagaaggaccctgtgggcctgatgagccgggtggcccagcctgccagcaagaagatcgatcagaacaagctgaaacctgagatggacgagaagggcaacctgaccaccgccggctttgcctgctctcagtgtggccagcccctgttcgtgtacaagctggagcaggtgtctgagaagggcaaggcttacaccaactacttcggacggtgcaatgtggccgagcacgaaaagctgatcctgctggcccagctgaagcccgagaaggatagcgacgaagccgtgacatatagcctgggaaagtttgggcagagggccctggatttctacagcattcatgtgaccaaggagtccacccaccccgtgaagcccctggcccagatcgccggaaacagatacgcctccggacctgtgggaaaggccctgagcgacgcatgtatgggcacaatcgcctccttcctgtctaagtaccaggacatcatcatcgaacaccagaaggtggtgaagggcaaccagaagagactggagagcctgcgggagctggccggcaaggaaaacctggaataccctagcgtgaccctgccacctcagcctcacaccaaggagggcgttgatgcctacaacgaagtgatcgcccgggtgcgaatgtgggtgaacctgaacctgtggcagaagctgaagctaagcagagatgatgccaagcctctgctgagactgaagggattcccttcctttcctctggtcgagagacaggccaacgaagtggactggtgggacatggtgtgtaacgtgaagaagctgatcaacgagaaaaaggaggatggcaaggtgttttggcagaatctggctggctacaagagacaggaagccctgagaccatacctgagcagcgaggaagatcggaagaagggaaagaaattcgctcggtaccagctgggcgacctgctgctgcacctggaaaagaagcacggcgaggactggggaaaggtgtacgacgaggcctgggagcggattgacaagaaagtggaaggcctgagcaagcacatcaagctggaagaggaacggagaagcgaggacgcccagagcaaggccgccctgaccgactggctgcgggctaaggccagcttcgtgatcgagggcctgaaggaggccgacaaggacgagttctgcagatgcgagctgaagctgcagaagtggtacggggacctgcggggaaagcccttcgccatcgaagccgagaacagcatcctggacatcagcggcttcagcaagcagtacaactgtgccttcatctggcagaaggacggcgtgaagaagctgaacctgtacctgatcatcaactacttcaagggcggcaagctgcggttcaagaagatcaaacctgaagccttcgaagccaacagattctacaccgtgatcaacaaaaagagcggcgagatcgtgcccatggaggtgaacttcaacttcgacgaccccaacctgatcatcctgcctctggcctttggcaagagacagggcagagaattcatctggaacgacctgctgtccctggaaaccggcagcctgaagctggccaacggaagagtgatcgagaagacactgtacaacagaagaacccggcaggatgagcctgccctgttcgtggccctgaccttcgagcggcgggaggtcctggactcctccaatatcaaaccaatgaacctgatcggcgtggcaagaggcgaaaacatccccgccgtgatcgccctgaccgaccccgagggctgcccactgagccggtttaaggatagcctgggaaacccaacccacatcctgagaatcggcgagagctataaggagaagcagcggaccatccaggccaagaaggaggtggagcagcggagagccggcggctacagccggaagtacgccagcaaagccaagaatctggcagacgatatggtgagaaacaccgctagagatctgctgtactacgccgtgacccaggatgccatgctgatcttcgccaacctgagccggggcttcggccggcagggcaagcggaccttcatggccgagagacagtacacacggatggaggactggctgaccgccaagctggcctacgagggcctgagcaagacctacctgtccaagacactggcccagtacacctccaagacatgcagcaactgtgggtttaccatcaccagcgccgactacgacagggtgctggagaagctgaagaagacagcaacaggctggatgaccacaattaacggcaaggagctgaaggtggagggccagattacctactacaacagatacaagagacagaacgtagtcaaggacctgtccgtcgagctggatagactgagcgaagaatctgtgaacaacgacatctcctcctggacaaagggcagaagcggagaagctctgagcctcctgaagaaaagattctcccatagacccgtgcaggagaagttcgtgtgcctgaactgcggcttcgagacacacgcagccgagcaagccgccctgaacatcgccagatcctggctgttcctgcggagccaggagtacaagaaataccagacaaacaagacaaccggcaacaccgataagagagccttcgtcgagacctggcagtccttttaccggaagaagcttaaggaggtgtggaaacctgccgtgcggtctggcggatctggcggaggctccacaagcttcaaggagctggtggtgttcagggacgtggccgtggagttctgcagggaggagtgggagtgcctggaccccaggcagaggagcctgtacagggacgtgatgctggagacctacggcaacttcgtgagcctgggcctggccatcagcaagcccagcgtgatcagcctgctggagcagggcaaggagccctggatggtggagcaggccggctggtaccccgacctgctgagcgtgaacgagaccaccagccccaagaaaaagagaaaagtctaagctgccttctgcggggcttgccttctggccatgcccttcttctctcccttgcacctgtacctcttggtctttgaataaagcctgagtaggaaggctagcaaaaaaaaaaaaaaaaaaaaaaaaaaaaaaaaaaaaaaaaaaaaaaaaaaaaaaaaaaaaaaaaaaaaaaaaaaaaaaaa

SEQ ID NO: 6936 - RNA, 5797 nt, synthetic construct
  source 1..5797: mol_type = other RNA
aggaaataagagagaaaagaagagtaagaagaaatataagagccaccatggcccctaagaagaagcgtaaagtgagccggatggaacgcctcgtctacgaggtgcggcagaagtgcagaaacatcgaggacatctgcatctcctgcggatctctgaacgtgaccctggagcacccactgttcatcggcggcatgtgccagaactgtaaaaactgttttctggagtgtgcctatcaatacgacgatgacggctaccagagctactgcaccatctgttgcggcggaagagaggtgctgatgtgtggaaataacaactgctgccggtgcttctgcgtggaatgcgtggacctgctggtgggccccggcgccgcccaggccgctattaaggaagatccttggaactgctacatgtgcggccacaagggcacatacggcctgctgagacggagagaggactggcctagcagactgcagatgttcttcgccaataaccacgaccaggagttcgacccccctaaggtgtaccctcccgtccccgccgagaagagaaagcccatccgggtcctgagcctgttcgatggcatcgccaccggtctgctggtgctgaaggacctgggcatccaggtggataggtacattgcctccgaggtgtgcgaggactccatcaccgtgggaatggtgcgtcatcagggcaagatcatgtacgtgggcgacgtgcggagcgtgacacagaagcatatccaggagtggggccctttcgacctggtgatcggcggcagcccttgcaatgacctgagcatcgtgaacccagcccggaagggcctgtacgagggaaccggcagactgttcttcgagttttacagactgctgcacgacgcccggcctaaggaaggcgacgaccggcccttcttttggctgttcgagaatgtggtggccatgggagtcagcgacaagcgggatattagccggttcctggagagcaaccccgtgatgatcgatgccaaggaagtgagcgccgcccaccgggccagatacttctggggcaatctgcctggcatgaacagacccctggccagcaccgtgaacgacaagctggagctgcaggagtgcctggagcacggccggatcgccaagttcagcaaggtgagaaccatcaccacccgaagcaacagcatcaaacaaggcaaggaccagcactttcctgtgttcatgaacgagaaggaggacatcctgtggtgtaccgagatggagagagtgttcgggttcccagtccactacacagatgtcagcaacatgtctagactggccagacagagactgctgggaagaagctggtccgtccctgtgatcagacacctgttcgcccctctgaaggagtacttcgcctgcgtgagcagcggcaacagcaacgccaacagccggggccccagcttctctagcggcctggtgccactgtccctgagagggagccacatgggccccatggagatctacaaaaccgtgagcgcctggaagcggcagcctgtgcgcgtgctgagcctgtttcggaatatcgataaagtcctgaaaagcctgggattcctggagagcggctctggctccggcggtggcaccctgaagtacgtggaggatgtgacaaacgtggtcagacgggatgtggagaagtggggccccttcgatctggtgtacggcagcacccaacccctgggcagctcttgtgaccggtgccctggctggtacatgtttcagttccaccggatcctgcagtacgccctgccgagacaggagtcccagcggccattcttttggattttcatggacaacttgctgctgaccgaggatgaccaggaaactaccactcggttcctgcagaccgaagccgtgaccctgcaggacgtgagaggccgggactaccagaacgccatgcgggtgtggtccaacatccctggactgaaaagcaagcacgcacctctgacccctaaagaagaggagtacctgcaggcccaggtgcggagcagaagcaagctggacgcccctaaggtggatctgctggtgaagaattgcctcctgcccctgagagagtacttcaagtatttcagccagaatagtctgcccctgggcggcccaagcagcggcgcccctcctcccagcggcggcagcccagccggctccccaacctctaccgaggagggcacctctgagtccgccacccccgagagcggccctggcacctccaccgagcccagcgagggcagcgcacccggcagccctgccggcagccccacctccacagaggagggaaccagcaccgagcccagcgaaggcagcgccccaggcaccagcaccgagcctagtgagggcggctctggcggcggcagcgcccaggagattaaacggatcaacaagatcagaagaagacttgtgaaagacagcaacaccaagaaggccggcaagacaggccccatgaaaaccctgctggttagagtgatgacacccgatctgagagagcggctggaaaacctgagaaagaagcctgaaaatatcccccagcccatcagcaatacatctagagccaacctgaataagctgctgaccgattacaccgaaatgaagaaggcgatcctgcatgtgtactgggaagagttccagaaggaccctgtgggcctgatgagccgggtggcccagcctgccagcaagaagatcgatcagaacaagctgaaacctgagatggacgagaagggcaacctgaccaccgccggctttgcctgctctcagtgtggccagcccctgttcgtgtacaagctggagcaggtgtctgagaagggcaaggcttacaccaactacttcggacggtgcaatgtggccgagcacgaaaagctgatcctgctggcccagctgaagcccgagaaggatagcgacgaagccgtgacatatagcctgggaaagtttgggcagagggccctggatttctacagcattcatgtgaccaaggagtccacccaccccgtgaagcccctggcccagatcgccggaaacagatacgcctccggacctgtgggaaaggccctgagcgacgcatgtatgggcacaatcgcctccttcctgtctaagtaccaggacatcatcatcgaacaccagaaggtggtgaagggcaaccagaagagactggagagcctgcgggagctggccggcaaggaaaacctggaataccctagcgtgaccctgccacctcagcctcacaccaaggagggcgttgatgcctacaacgaagtgatcgcccgggtgcgaatgtgggtgaacctgaacctgtggcagaagctgaagctaagcagagatgatgccaagcctctgctgagactgaagggattcccttcctttcctctggtcgagagacaggccaacgaagtggactggtgggacatggtgtgtaacgtgaagaagctgatcaacgagaaaaaggaggatggcaaggtgttttggcagaatctggctggctacaagagacaggaagccctgagaccatacctgagcagcgaggaagatcggaagaagggaaagaaattcgctcggtaccagctgggcgacctgctgctgcacctggaaaagaagcacggcgaggactggggaaaggtgtacgacgaggcctgggagcggattgacaagaaagtggaaggcctgagcaagcacatcaagctggaagaggaacggagaagcgaggacgcccagagcaaggccgccctgaccgactggctgcgggctaaggccagcttcgtgatcgagggcctgaaggaggccgacaaggacgagttctgcagatgcgagctgaagctgcagaagtggtacggggacctgcggggaaagcccttcgccatcgaagccgagaacagcatcctggacatcagcggcttcagcaagcagtacaactgtgccttcatctggcagaaggacggcgtgaagaagctgaacctgtacctgatcatcaactacttcaagggcggcaagctgcggttcaagaagatcaaacctgaagccttcgaagccaacagattctacaccgtgatcaacaaaaagagcggcgagatcgtgcccatggaggtgaacttcaacttcgacgaccccaacctgatcatcctgcctctggcctttggcaagagacagggcagagaattcatctggaacgacctgctgtccctggaaaccggcagcctgaagctggccaacggaagagtgatcgagaagacactgtacaacagaagaacccggcaggatgagcctgccctgttcgtggccctgaccttcgagcggcgggaggtcctggactcctccaatatcaaaccaatgaacctgatcggcgtggcaagaggcgaaaacatccccgccgtgatcgccctgaccgaccccgagggctgcccactgagccggtttaaggatagcctgggaaacccaacccacatcctgagaatcggcgagagctataaggagaagcagcggaccatccaggccaagaaggaggtggagcagcggagagccggcggctacagccggaagtacgccagcaaagccaagaatctggcagacgatatggtgagaaacaccgctagagatctgctgtactacgccgtgacccaggatgccatgctgatcttcgccaacctgagccggggcttcggccggcagggcaagcggaccttcatggccgagagacagtacacacggatggaggactggctgaccgccaagctggcctacgagggcctgagcaagacctacctgtccaagacactggcccagtacacctccaagacatgcagcaactgtgggtttaccatcaccagcgccgactacgacagggtgctggagaagctgaagaagacagcaacaggctggatgaccacaattaacggcaaggagctgaaggtggagggccagattacctactacaacagatacaagagacagaacgtagtcaaggacctgtccgtcgagctggatagactgagcgaagaatctgtgaacaacgacatctcctcctggacaaagggcagaagcggagaagctctgagcctcctgaagaaaagattctcccatagacccgtgcaggagaagttcgtgtgcctgaactgcggcttcgagacacacgcagccgagcaagccgccctgaacatcgccagatcctggctgttcctgcggagccaggagtacaagaaataccagacaaacaagacaaccggcaacaccgataagagagccttcgtcgagacctggcagtccttttaccggaagaagcttaaggaggtgtggaaacctgccgtgcggtctggcggatctggcggaggctccacaagcgccgagaccagcagcagcggcctgctggaggagcagaagatgatgaagagccagggcctggtgagcttcaaggacgtggccgtggacttcacccaggaggagtggcagcagctggaccccagccagaggaccctgtacagggacgtgatgctggagaactacagccacctggtgagcatgggctaccccgtgagcaagcccgacgtgatcagcaagctggagcagggcgaggagccctggatcaccagccccaagaaaaagagaaaagtctaagctgccttctgcggggcttgccttctggccatgcccttcttctctcccttgcacctgtacctcttggtctttgaataaagcctgagtaggaaggctagcaaaaaaaaaaaaaaaaaaaaaaaaaaaaaaaaaaaaaaaaaaaaaaaaaaaaaaaaaaaaaaaaaaaaaaaaaaaaaaaa

SEQ ID NO: 6937 - RNA, 5797 nt, synthetic construct
  source 1..5797: mol_type = other RNA
aggaaataagagagaaaagaagagtaagaagaaatataagagccaccatggcccctaagaagaagcgtaaagtgagccggatggaacgcctcgtctacgaggtgcggcagaagtgcagaaacatcgaggacatctgcatctcctgcggatctctgaacgtgaccctggagcacccactgttcatcggcggcatgtgccagaactgtaaaaactgttttctggagtgtgcctatcaatacgacgatgacggctaccagagctactgcaccatctgttgcggcggaagagaggtgctgatgtgtggaaataacaactgctgccggtgcttctgcgtggaatgcgtggacctgctggtgggccccggcgccgcccaggccgctattaaggaagatccttggaactgctacatgtgcggccacaagggcacatacggcctgctgagacggagagaggactggcctagcagactgcagatgttcttcgccaataaccacgaccaggagttcgacccccctaaggtgtaccctcccgtccccgccgagaagagaaagcccatccgggtcctgagcctgttcgatggcatcgccaccggtctgctggtgctgaaggacctgggcatccaggtggataggtacattgcctccgaggtgtgcgaggactccatcaccgtgggaatggtgcgtcatcagggcaagatcatgtacgtgggcgacgtgcggagcgtgacacagaagcatatccaggagtggggccctttcgacctggtgatcggcggcagcccttgcaatgacctgagcatcgtgaacccagcccggaagggcctgtacgagggaaccggcagactgttcttcgagttttacagactgctgcacgacgcccggcctaaggaaggcgacgaccggcccttcttttggctgttcgagaatgtggtggccatgggagtcagcgacaagcgggatattagccggttcctggagagcaaccccgtgatgatcgatgccaaggaagtgagcgccgcccaccgggccagatacttctggggcaatctgcctggcatgaacagacccctggccagcaccgtgaacgacaagctggagctgcaggagtgcctggagcacggccggatcgccaagttcagcaaggtgagaaccatcaccacccgaagcaacagcatcaaacaaggcaaggaccagcactttcctgtgttcatgaacgagaaggaggacatcctgtggtgtaccgagatggagagagtgttcgggttcccagtccactacacagatgtcagcaacatgtctagactggccagacagagactgctgggaagaagctggtccgtccctgtgatcagacacctgttcgcccctctgaaggagtacttcgcctgcgtgagcagcggcaacagcaacgccaacagccggggccccagcttctctagcggcctggtgccactgtccctgagagggagccacatgggccccatggagatctacaaaaccgtgagcgcctggaagcggcagcctgtgcgcgtgctgagcctgtttcggaatatcgataaagtcctgaaaagcctgggattcctggagagcggctctggctccggcggtggcaccctgaagtacgtggaggatgtgacaaacgtggtcagacgggatgtggagaagtggggccccttcgatctggtgtacggcagcacccaacccctgggcagctcttgtgaccggtgccctggctggtacatgtttcagttccaccggatcctgcagtacgccctgccgagacaggagtcccagcggccattcttttggattttcatggacaacttgctgctgaccgaggatgaccaggaaactaccactcggttcctgcagaccgaagccgtgaccctgcaggacgtgagaggccgggactaccagaacgccatgcgggtgtggtccaacatccctggactgaaaagcaagcacgcacctctgacccctaaagaagaggagtacctgcaggcccaggtgcggagcagaagcaagctggacgcccctaaggtggatctgctggtgaagaattgcctcctgcccctgagagagtacttcaagtatttcagccagaatagtctgcccctgggcggcccaagcagcggcgcccctcctcccagcggcggcagcccagccggctccccaacctctaccgaggagggcacctctgagtccgccacccccgagagcggccctggcacctccaccgagcccagcgagggcagcgcacccggcagccctgccggcagccccacctccacagaggagggaaccagcaccgagcccagcgaaggcagcgccccaggcaccagcaccgagcctagtgagggcggctctggcggcggcagcgcccaggagattaaacggatcaacaagatcagaagaagacttgtgaaagacagcaacaccaagaaggccggcaagacaggccccatgaaaaccctgctggttagagtgatgacacccgatctgagagagcggctggaaaacctgagaaagaagcctgaaaatatcccccagcccatcagcaatacatctagagccaacctgaataagctgctgaccgattacaccgaaatgaagaaggcgatcctgcatgtgtactgggaagagttccagaaggaccctgtgggcctgatgagccgggtggcccagcctgccagcaagaagatcgatcagaacaagctgaaacctgagatggacgagaagggcaacctgaccaccgccggctttgcctgctctcagtgtggccagcccctgttcgtgtacaagctggagcaggtgtctgagaagggcaaggcttacaccaactacttcggacggtgcaatgtggccgagcacgaaaagctgatcctgctggcccagctgaagcccgagaaggatagcgacgaagccgtgacatatagcctgggaaagtttgggcagagggccctggatttctacagcattcatgtgaccaaggagtccacccaccccgtgaagcccctggcccagatcgccggaaacagatacgcctccggacctgtgggaaaggccctgagcgacgcatgtatgggcacaatcgcctccttcctgtctaagtaccaggacatcatcatcgaacaccagaaggtggtgaagggcaaccagaagagactggagagcctgcgggagctggccggcaaggaaaacctggaataccctagcgtgaccctgccacctcagcctcacaccaaggagggcgttgatgcctacaacgaagtgatcgcccgggtgcgaatgtgggtgaacctgaacctgtggcagaagctgaagctaagcagagatgatgccaagcctctgctgagactgaagggattcccttcctttcctctggtcgagagacaggccaacgaagtggactggtgggacatggtgtgtaacgtgaagaagctgatcaacgagaaaaaggaggatggcaaggtgttttggcagaatctggctggctacaagagacaggaagccctgagaccatacctgagcagcgaggaagatcggaagaagggaaagaaattcgctcggtaccagctgggcgacctgctgctgcacctggaaaagaagcacggcgaggactggggaaaggtgtacgacgaggcctgggagcggattgacaagaaagtggaaggcctgagcaagcacatcaagctggaagaggaacggagaagcgaggacgcccagagcaaggccgccctgaccgactggctgcgggctaaggccagcttcgtgatcgagggcctgaaggaggccgacaaggacgagttctgcagatgcgagctgaagctgcagaagtggtacggggacctgcggggaaagcccttcgccatcgaagccgagaacagcatcctggacatcagcggcttcagcaagcagtacaactgtgccttcatctggcagaaggacggcgtgaagaagctgaacctgtacctgatcatcaactacttcaagggcggcaagctgcggttcaagaagatcaaacctgaagccttcgaagccaacagattctacaccgtgatcaacaaaaagagcggcgagatcgtgcccatggaggtgaacttcaacttcgacgaccccaacctgatcatcctgcctctggcctttggcaagagacagggcagagaattcatctggaacgacctgctgtccctggaaaccggcagcctgaagctggccaacggaagagtgatcgagaagacactgtacaacagaagaacccggcaggatgagcctgccctgttcgtggccctgaccttcgagcggcgggaggtcctggactcctccaatatcaaaccaatgaacctgatcggcgtggcaagaggcgaaaacatccccgccgtgatcgccctgaccgaccccgagggctgcccactgagccggtttaaggatagcctgggaaacccaacccacatcctgagaatcggcgagagctataaggagaagcagcggaccatccaggccaagaaggaggtggagcagcggagagccggcggctacagccggaagtacgccagcaaagccaagaatctggcagacgatatggtgagaaacaccgctagagatctgctgtactacgccgtgacccaggatgccatgctgatcttcgccaacctgagccggggcttcggccggcagggcaagcggaccttcatggccgagagacagtacacacggatggaggactggctgaccgccaagctggcctacgagggcctgagcaagacctacctgtccaagacactggcccagtacacctccaagacatgcagcaactgtgggtttaccatcaccagcgccgactacgacagggtgctggagaagctgaagaagacagcaacaggctggatgaccacaattaacggcaaggagctgaaggtggagggccagattacctactacaacagatacaagagacagaacgtagtcaaggacctgtccgtcgagctggatagactgagcgaagaatctgtgaacaacgacatctcctcctggacaaagggcagaagcggagaagctctgagcctcctgaagaaaagattctcccatagacccgtgcaggagaagttcgtgtgcctgaactgcggcttcgagacacacgcagccgagcaagccgccctgaacatcgccagatcctggctgttcctgcggagccaggagtacaagaaataccagacaaacaagacaaccggcaacaccgataagagagccttcgtcgagacctggcagtccttttaccggaagaagcttaaggaggtgtggaaacctgccgtgcggtctggcggatctggcggaggctccacaagcttccaggacctgctgagcttcaccgacgtggccatcgacttcagcgccgacgagtgcgagtgcctggagcccgcccagtggaacctgtacaaggaggtgatgctggagaactacagcaacctggtgttcctgggcctggccttcagcaagccctacctggtgaccttcctggagcagagcagcgacccctggagcatgaagaggaaggccagcgccgccatccacctgggcctgaagccccacaccagccccaagaaaaagagaaaagtctaagctgccttctgcggggcttgccttctggccatgcccttcttctctcccttgcacctgtacctcttggtctttgaataaagcctgagtaggaaggctagcaaaaaaaaaaaaaaaaaaaaaaaaaaaaaaaaaaaaaaaaaaaaaaaaaaaaaaaaaaaaaaaaaaaaaaaaaaaaaaaa

SEQ ID NO: 6938 - RNA, 5797 nt, synthetic construct
  source 1..5797: mol_type = other RNA
aggaaataagagagaaaagaagagtaagaagaaatataagagccaccatggcccctaagaagaagcgtaaagtgagccggatggaacgcctcgtctacgaggtgcggcagaagtgcagaaacatcgaggacatctgcatctcctgcggatctctgaacgtgaccctggagcacccactgttcatcggcggcatgtgccagaactgtaaaaactgttttctggagtgtgcctatcaatacgacgatgacggctaccagagctactgcaccatctgttgcggcggaagagaggtgctgatgtgtggaaataacaactgctgccggtgcttctgcgtggaatgcgtggacctgctggtgggccccggcgccgcccaggccgctattaaggaagatccttggaactgctacatgtgcggccacaagggcacatacggcctgctgagacggagagaggactggcctagcagactgcagatgttcttcgccaataaccacgaccaggagttcgacccccctaaggtgtaccctcccgtccccgccgagaagagaaagcccatccgggtcctgagcctgttcgatggcatcgccaccggtctgctggtgctgaaggacctgggcatccaggtggataggtacattgcctccgaggtgtgcgaggactccatcaccgtgggaatggtgcgtcatcagggcaagatcatgtacgtgggcgacgtgcggagcgtgacacagaagcatatccaggagtggggccctttcgacctggtgatcggcggcagcccttgcaatgacctgagcatcgtgaacccagcccggaagggcctgtacgagggaaccggcagactgttcttcgagttttacagactgctgcacgacgcccggcctaaggaaggcgacgaccggcccttcttttggctgttcgagaatgtggtggccatgggagtcagcgacaagcgggatattagccggttcctggagagcaaccccgtgatgatcgatgccaaggaagtgagcgccgcccaccgggccagatacttctggggcaatctgcctggcatgaacagacccctggccagcaccgtgaacgacaagctggagctgcaggagtgcctggagcacggccggatcgccaagttcagcaaggtgagaaccatcaccacccgaagcaacagcatcaaacaaggcaaggaccagcactttcctgtgttcatgaacgagaaggaggacatcctgtggtgtaccgagatggagagagtgttcgggttcccagtccactacacagatgtcagcaacatgtctagactggccagacagagactgctgggaagaagctggtccgtccctgtgatcagacacctgttcgcccctctgaaggagtacttcgcctgcgtgagcagcggcaacagcaacgccaacagccggggccccagcttctctagcggcctggtgccactgtccctgagagggagccacatgggccccatggagatctacaaaaccgtgagcgcctggaagcggcagcctgtgcgcgtgctgagcctgtttcggaatatcgataaagtcctgaaaagcctgggattcctggagagcggctctggctccggcggtggcaccctgaagtacgtggaggatgtgacaaacgtggtcagacgggatgtggagaagtggggccccttcgatctggtgtacggcagcacccaacccctgggcagctcttgtgaccggtgccctggctggtacatgtttcagttccaccggatcctgcagtacgccctgccgagacaggagtcccagcggccattcttttggattttcatggacaacttgctgctgaccgaggatgaccaggaaactaccactcggttcctgcagaccgaagccgtgaccctgcaggacgtgagaggccgggactaccagaacgccatgcgggtgtggtccaacatccctggactgaaaagcaagcacgcacctctgacccctaaagaagaggagtacctgcaggcccaggtgcggagcagaagcaagctggacgcccctaaggtggatctgctggtgaagaattgcctcctgcccctgagagagtacttcaagtatttcagccagaatagtctgcccctgggcggcccaagcagcggcgcccctcctcccagcggcggcagcccagccggctccccaacctctaccgaggagggcacctctgagtccgccacccccgagagcggccctggcacctccaccgagcccagcgagggcagcgcacccggcagccctgccggcagccccacctccacagaggagggaaccagcaccgagcccagcgaaggcagcgccccaggcaccagcaccgagcctagtgagggcggctctggcggcggcagcgcccaggagattaaacggatcaacaagatcagaagaagacttgtgaaagacagcaacaccaagaaggccggcaagacaggccccatgaaaaccctgctggttagagtgatgacacccgatctgagagagcggctggaaaacctgagaaagaagcctgaaaatatcccccagcccatcagcaatacatctagagccaacctgaataagctgctgaccgattacaccgaaatgaagaaggcgatcctgcatgtgtactgggaagagttccagaaggaccctgtgggcctgatgagccgggtggcccagcctgccagcaagaagatcgatcagaacaagctgaaacctgagatggacgagaagggcaacctgaccaccgccggctttgcctgctctcagtgtggccagcccctgttcgtgtacaagctggagcaggtgtctgagaagggcaaggcttacaccaactacttcggacggtgcaatgtggccgagcacgaaaagctgatcctgctggcccagctgaagcccgagaaggatagcgacgaagccgtgacatatagcctgggaaagtttgggcagagggccctggatttctacagcattcatgtgaccaaggagtccacccaccccgtgaagcccctggcccagatcgccggaaacagatacgcctccggacctgtgggaaaggccctgagcgacgcatgtatgggcacaatcgcctccttcctgtctaagtaccaggacatcatcatcgaacaccagaaggtggtgaagggcaaccagaagagactggagagcctgcgggagctggccggcaaggaaaacctggaataccctagcgtgaccctgccacctcagcctcacaccaaggagggcgttgatgcctacaacgaagtgatcgcccgggtgcgaatgtgggtgaacctgaacctgtggcagaagctgaagctaagcagagatgatgccaagcctctgctgagactgaagggattcccttcctttcctctggtcgagagacaggccaacgaagtggactggtgggacatggtgtgtaacgtgaagaagctgatcaacgagaaaaaggaggatggcaaggtgttttggcagaatctggctggctacaagagacaggaagccctgagaccatacctgagcagcgaggaagatcggaagaagggaaagaaattcgctcggtaccagctgggcgacctgctgctgcacctggaaaagaagcacggcgaggactggggaaaggtgtacgacgaggcctgggagcggattgacaagaaagtggaaggcctgagcaagcacatcaagctggaagaggaacggagaagcgaggacgcccagagcaaggccgccctgaccgactggctgcgggctaaggccagcttcgtgatcgagggcctgaaggaggccgacaaggacgagttctgcagatgcgagctgaagctgcagaagtggtacggggacctgcggggaaagcccttcgccatcgaagccgagaacagcatcctggacatcagcggcttcagcaagcagtacaactgtgccttcatctggcagaaggacggcgtgaagaagctgaacctgtacctgatcatcaactacttcaagggcggcaagctgcggttcaagaagatcaaacctgaagccttcgaagccaacagattctacaccgtgatcaacaaaaagagcggcgagatcgtgcccatggaggtgaacttcaacttcgacgaccccaacctgatcatcctgcctctggcctttggcaagagacagggcagagaattcatctggaacgacctgctgtccctggaaaccggcagcctgaagctggccaacggaagagtgatcgagaagacactgtacaacagaagaacccggcaggatgagcctgccctgttcgtggccctgaccttcgagcggcgggaggtcctggactcctccaatatcaaaccaatgaacctgatcggcgtggcaagaggcgaaaacatccccgccgtgatcgccctgaccgaccccgagggctgcccactgagccggtttaaggatagcctgggaaacccaacccacatcctgagaatcggcgagagctataaggagaagcagcggaccatccaggccaagaaggaggtggagcagcggagagccggcggctacagccggaagtacgccagcaaagccaagaatctggcagacgatatggtgagaaacaccgctagagatctgctgtactacgccgtgacccaggatgccatgctgatcttcgccaacctgagccggggcttcggccggcagggcaagcggaccttcatggccgagagacagtacacacggatggaggactggctgaccgccaagctggcctacgagggcctgagcaagacctacctgtccaagacactggcccagtacacctccaagacatgcagcaactgtgggtttaccatcaccagcgccgactacgacagggtgctggagaagctgaagaagacagcaacaggctggatgaccacaattaacggcaaggagctgaaggtggagggccagattacctactacaacagatacaagagacagaacgtagtcaaggacctgtccgtcgagctggatagactgagcgaagaatctgtgaacaacgacatctcctcctggacaaagggcagaagcggagaagctctgagcctcctgaagaaaagattctcccatagacccgtgcaggagaagttcgtgtgcctgaactgcggcttcgagacacacgcagccgagcaagccgccctgaacatcgccagatcctggctgttcctgcggagccaggagtacaagaaataccagacaaacaagacaaccggcaacaccgataagagagccttcgtcgagacctggcagtccttttaccggaagaagcttaaggaggtgtggaaacctgccgtgcggtctggcggatctggcggaggctccacaagccccaaggtgaccgtgagcttcgaggacgtgagcgtgtacttcaccaagaccgagtggaagctgctggacctgaagcagaggaacctgtacaagcaggtgatgctggagaactacagccacctggtgagcgtgggcttcgccttcagcaagcccaacctggtgagccagctggagaggggcgagaagccctggatcagggacgacaggatggagagcgccgccaggagcagggccggcaacaggaccagccccaagaaaaagagaaaagtctaagctgccttctgcggggcttgccttctggccatgcccttcttctctcccttgcacctgtacctcttggtctttgaataaagcctgagtaggaaggctagcaaaaaaaaaaaaaaaaaaaaaaaaaaaaaaaaaaaaaaaaaaaaaaaaaaaaaaaaaaaaaaaaaaaaaaaaaaaaaaaa

SEQ ID NO: 6939 - RNA, 5797 nt, synthetic construct
  source 1..5797: mol_type = other RNA
aggaaataagagagaaaagaagagtaagaagaaatataagagccaccatggcccctaagaagaagcgtaaagtgagccggatggaacgcctcgtctacgaggtgcggcagaagtgcagaaacatcgaggacatctgcatctcctgcggatctctgaacgtgaccctggagcacccactgttcatcggcggcatgtgccagaactgtaaaaactgttttctggagtgtgcctatcaatacgacgatgacggctaccagagctactgcaccatctgttgcggcggaagagaggtgctgatgtgtggaaataacaactgctgccggtgcttctgcgtggaatgcgtggacctgctggtgggccccggcgccgcccaggccgctattaaggaagatccttggaactgctacatgtgcggccacaagggcacatacggcctgctgagacggagagaggactggcctagcagactgcagatgttcttcgccaataaccacgaccaggagttcgacccccctaaggtgtaccctcccgtccccgccgagaagagaaagcccatccgggtcctgagcctgttcgatggcatcgccaccggtctgctggtgctgaaggacctgggcatccaggtggataggtacattgcctccgaggtgtgcgaggactccatcaccgtgggaatggtgcgtcatcagggcaagatcatgtacgtgggcgacgtgcggagcgtgacacagaagcatatccaggagtggggccctttcgacctggtgatcggcggcagcccttgcaatgacctgagcatcgtgaacccagcccggaagggcctgtacgagggaaccggcagactgttcttcgagttttacagactgctgcacgacgcccggcctaaggaaggcgacgaccggcccttcttttggctgttcgagaatgtggtggccatgggagtcagcgacaagcgggatattagccggttcctggagagcaaccccgtgatgatcgatgccaaggaagtgagcgccgcccaccgggccagatacttctggggcaatctgcctggcatgaacagacccctggccagcaccgtgaacgacaagctggagctgcaggagtgcctggagcacggccggatcgccaagttcagcaaggtgagaaccatcaccacccgaagcaacagcatcaaacaaggcaaggaccagcactttcctgtgttcatgaacgagaaggaggacatcctgtggtgtaccgagatggagagagtgttcgggttcccagtccactacacagatgtcagcaacatgtctagactggccagacagagactgctgggaagaagctggtccgtccctgtgatcagacacctgttcgcccctctgaaggagtacttcgcctgcgtgagcagcggcaacagcaacgccaacagccggggccccagcttctctagcggcctggtgccactgtccctgagagggagccacatgggccccatggagatctacaaaaccgtgagcgcctggaagcggcagcctgtgcgcgtgctgagcctgtttcggaatatcgataaagtcctgaaaagcctgggattcctggagagcggctctggctccggcggtggcaccctgaagtacgtggaggatgtgacaaacgtggtcagacgggatgtggagaagtggggccccttcgatctggtgtacggcagcacccaacccctgggcagctcttgtgaccggtgccctggctggtacatgtttcagttccaccggatcctgcagtacgccctgccgagacaggagtcccagcggccattcttttggattttcatggacaacttgctgctgaccgaggatgaccaggaaactaccactcggttcctgcagaccgaagccgtgaccctgcaggacgtgagaggccgggactaccagaacgccatgcgggtgtggtccaacatccctggactgaaaagcaagcacgcacctctgacccctaaagaagaggagtacctgcaggcccaggtgcggagcagaagcaagctggacgcccctaaggtggatctgctggtgaagaattgcctcctgcccctgagagagtacttcaagtatttcagccagaatagtctgcccctgggcggcccaagcagcggcgcccctcctcccagcggcggcagcccagccggctccccaacctctaccgaggagggcacctctgagtccgccacccccgagagcggccctggcacctccaccgagcccagcgagggcagcgcacccggcagccctgccggcagccccacctccacagaggagggaaccagcaccgagcccagcgaaggcagcgccccaggcaccagcaccgagcctagtgagggcggctctggcggcggcagcgcccaggagattaaacggatcaacaagatcagaagaagacttgtgaaagacagcaacaccaagaaggccggcaagacaggccccatgaaaaccctgctggttagagtgatgacacccgatctgagagagcggctggaaaacctgagaaagaagcctgaaaatatcccccagcccatcagcaatacatctagagccaacctgaataagctgctgaccgattacaccgaaatgaagaaggcgatcctgcatgtgtactgggaagagttccagaaggaccctgtgggcctgatgagccgggtggcccagcctgccagcaagaagatcgatcagaacaagctgaaacctgagatggacgagaagggcaacctgaccaccgccggctttgcctgctctcagtgtggccagcccctgttcgtgtacaagctggagcaggtgtctgagaagggcaaggcttacaccaactacttcggacggtgcaatgtggccgagcacgaaaagctgatcctgctggcccagctgaagcccgagaaggatagcgacgaagccgtgacatatagcctgggaaagtttgggcagagggccctggatttctacagcattcatgtgaccaaggagtccacccaccccgtgaagcccctggcccagatcgccggaaacagatacgcctccggacctgtgggaaaggccctgagcgacgcatgtatgggcacaatcgcctccttcctgtctaagtaccaggacatcatcatcgaacaccagaaggtggtgaagggcaaccagaagagactggagagcctgcgggagctggccggcaaggaaaacctggaataccctagcgtgaccctgccacctcagcctcacaccaaggagggcgttgatgcctacaacgaagtgatcgcccgggtgcgaatgtgggtgaacctgaacctgtggcagaagctgaagctaagcagagatgatgccaagcctctgctgagactgaagggattcccttcctttcctctggtcgagagacaggccaacgaagtggactggtgggacatggtgtgtaacgtgaagaagctgatcaacgagaaaaaggaggatggcaaggtgttttggcagaatctggctggctacaagagacaggaagccctgagaccatacctgagcagcgaggaagatcggaagaagggaaagaaattcgctcggtaccagctgggcgacctgctgctgcacctggaaaagaagcacggcgaggactggggaaaggtgtacgacgaggcctgggagcggattgacaagaaagtggaaggcctgagcaagcacatcaagctggaagaggaacggagaagcgaggacgcccagagcaaggccgccctgaccgactggctgcgggctaaggccagcttcgtgatcgagggcctgaaggaggccgacaaggacgagttctgcagatgcgagctgaagctgcagaagtggtacggggacctgcggggaaagcccttcgccatcgaagccgagaacagcatcctggacatcagcggcttcagcaagcagtacaactgtgccttcatctggcagaaggacggcgtgaagaagctgaacctgtacctgatcatcaactacttcaagggcggcaagctgcggttcaagaagatcaaacctgaagccttcgaagccaacagattctacaccgtgatcaacaaaaagagcggcgagatcgtgcccatggaggtgaacttcaacttcgacgaccccaacctgatcatcctgcctctggcctttggcaagagacagggcagagaattcatctggaacgacctgctgtccctggaaaccggcagcctgaagctggccaacggaagagtgatcgagaagacactgtacaacagaagaacccggcaggatgagcctgccctgttcgtggccctgaccttcgagcggcgggaggtcctggactcctccaatatcaaaccaatgaacctgatcggcgtggcaagaggcgaaaacatccccgccgtgatcgccctgaccgaccccgagggctgcccactgagccggtttaaggatagcctgggaaacccaacccacatcctgagaatcggcgagagctataaggagaagcagcggaccatccaggccaagaaggaggtggagcagcggagagccggcggctacagccggaagtacgccagcaaagccaagaatctggcagacgatatggtgagaaacaccgctagagatctgctgtactacgccgtgacccaggatgccatgctgatcttcgccaacctgagccggggcttcggccggcagggcaagcggaccttcatggccgagagacagtacacacggatggaggactggctgaccgccaagctggcctacgagggcctgagcaagacctacctgtccaagacactggcccagtacacctccaagacatgcagcaactgtgggtttaccatcaccagcgccgactacgacagggtgctggagaagctgaagaagacagcaacaggctggatgaccacaattaacggcaaggagctgaaggtggagggccagattacctactacaacagatacaagagacagaacgtagtcaaggacctgtccgtcgagctggatagactgagcgaagaatctgtgaacaacgacatctcctcctggacaaagggcagaagcggagaagctctgagcctcctgaagaaaagattctcccatagacccgtgcaggagaagttcgtgtgcctgaactgcggcttcgagacacacgcagccgagcaagccgccctgaacatcgccagatcctggctgttcctgcggagccaggagtacaagaaataccagacaaacaagacaaccggcaacaccgataagagagccttcgtcgagacctggcagtccttttaccggaagaagcttaaggaggtgtggaaacctgccgtgcggtctggcggatctggcggaggctccacaagcttccaccagctggtgaccttcgaggacgtggccgtgtacctgagcaaggaggagtggaagaggctgaacctggcccagagggagctgtacagggacgtgatgctggagaactacgagaacctgctgagcctgggcttccccgtgagcaagcccgacatcatcagccagctggagcagaggaaggaggcctggatcgtgcagggccccgagaagaggaagttcagccagaacgcccacagggacaccagccccaagaaaaagagaaaagtctaagctgccttctgcggggcttgccttctggccatgcccttcttctctcccttgcacctgtacctcttggtctttgaataaagcctgagtaggaaggctagcaaaaaaaaaaaaaaaaaaaaaaaaaaaaaaaaaaaaaaaaaaaaaaaaaaaaaaaaaaaaaaaaaaaaaaaaaaaaaaaa

SEQ ID NO: 6940 - RNA, 5797 nt, synthetic construct
  source 1..5797: mol_type = other RNA
aggaaataagagagaaaagaagagtaagaagaaatataagagccaccatggcccctaagaagaagcgtaaagtgagccggatggaacgcctcgtctacgaggtgcggcagaagtgcagaaacatcgaggacatctgcatctcctgcggatctctgaacgtgaccctggagcacccactgttcatcggcggcatgtgccagaactgtaaaaactgttttctggagtgtgcctatcaatacgacgatgacggctaccagagctactgcaccatctgttgcggcggaagagaggtgctgatgtgtggaaataacaactgctgccggtgcttctgcgtggaatgcgtggacctgctggtgggccccggcgccgcccaggccgctattaaggaagatccttggaactgctacatgtgcggccacaagggcacatacggcctgctgagacggagagaggactggcctagcagactgcagatgttcttcgccaataaccacgaccaggagttcgacccccctaaggtgtaccctcccgtccccgccgagaagagaaagcccatccgggtcctgagcctgttcgatggcatcgccaccggtctgctggtgctgaaggacctgggcatccaggtggataggtacattgcctccgaggtgtgcgaggactccatcaccgtgggaatggtgcgtcatcagggcaagatcatgtacgtgggcgacgtgcggagcgtgacacagaagcatatccaggagtggggccctttcgacctggtgatcggcggcagcccttgcaatgacctgagcatcgtgaacccagcccggaagggcctgtacgagggaaccggcagactgttcttcgagttttacagactgctgcacgacgcccggcctaaggaaggcgacgaccggcccttcttttggctgttcgagaatgtggtggccatgggagtcagcgacaagcgggatattagccggttcctggagagcaaccccgtgatgatcgatgccaaggaagtgagcgccgcccaccgggccagatacttctggggcaatctgcctggcatgaacagacccctggccagcaccgtgaacgacaagctggagctgcaggagtgcctggagcacggccggatcgccaagttcagcaaggtgagaaccatcaccacccgaagcaacagcatcaaacaaggcaaggaccagcactttcctgtgttcatgaacgagaaggaggacatcctgtggtgtaccgagatggagagagtgttcgggttcccagtccactacacagatgtcagcaacatgtctagactggccagacagagactgctgggaagaagctggtccgtccctgtgatcagacacctgttcgcccctctgaaggagtacttcgcctgcgtgagcagcggcaacagcaacgccaacagccggggccccagcttctctagcggcctggtgccactgtccctgagagggagccacatgggccccatggagatctacaaaaccgtgagcgcctggaagcggcagcctgtgcgcgtgctgagcctgtttcggaatatcgataaagtcctgaaaagcctgggattcctggagagcggctctggctccggcggtggcaccctgaagtacgtggaggatgtgacaaacgtggtcagacgggatgtggagaagtggggccccttcgatctggtgtacggcagcacccaacccctgggcagctcttgtgaccggtgccctggctggtacatgtttcagttccaccggatcctgcagtacgccctgccgagacaggagtcccagcggccattcttttggattttcatggacaacttgctgctgaccgaggatgaccaggaaactaccactcggttcctgcagaccgaagccgtgaccctgcaggacgtgagaggccgggactaccagaacgccatgcgggtgtggtccaacatccctggactgaaaagcaagcacgcacctctgacccctaaagaagaggagtacctgcaggcccaggtgcggagcagaagcaagctggacgcccctaaggtggatctgctggtgaagaattgcctcctgcccctgagagagtacttcaagtatttcagccagaatagtctgcccctgggcggcccaagcagcggcgcccctcctcccagcggcggcagcccagccggctccccaacctctaccgaggagggcacctctgagtccgccacccccgagagcggccctggcacctccaccgagcccagcgagggcagcgcacccggcagccctgccggcagccccacctccacagaggagggaaccagcaccgagcccagcgaaggcagcgccccaggcaccagcaccgagcctagtgagggcggctctggcggcggcagcgcccaggagattaaacggatcaacaagatcagaagaagacttgtgaaagacagcaacaccaagaaggccggcaagacaggccccatgaaaaccctgctggttagagtgatgacacccgatctgagagagcggctggaaaacctgagaaagaagcctgaaaatatcccccagcccatcagcaatacatctagagccaacctgaataagctgctgaccgattacaccgaaatgaagaaggcgatcctgcatgtgtactgggaagagttccagaaggaccctgtgggcctgatgagccgggtggcccagcctgccagcaagaagatcgatcagaacaagctgaaacctgagatggacgagaagggcaacctgaccaccgccggctttgcctgctctcagtgtggccagcccctgttcgtgtacaagctggagcaggtgtctgagaagggcaaggcttacaccaactacttcggacggtgcaatgtggccgagcacgaaaagctgatcctgctggcccagctgaagcccgagaaggatagcgacgaagccgtgacatatagcctgggaaagtttgggcagagggccctggatttctacagcattcatgtgaccaaggagtccacccaccccgtgaagcccctggcccagatcgccggaaacagatacgcctccggacctgtgggaaaggccctgagcgacgcatgtatgggcacaatcgcctccttcctgtctaagtaccaggacatcatcatcgaacaccagaaggtggtgaagggcaaccagaagagactggagagcctgcgggagctggccggcaaggaaaacctggaataccctagcgtgaccctgccacctcagcctcacaccaaggagggcgttgatgcctacaacgaagtgatcgcccgggtgcgaatgtgggtgaacctgaacctgtggcagaagctgaagctaagcagagatgatgccaagcctctgctgagactgaagggattcccttcctttcctctggtcgagagacaggccaacgaagtggactggtgggacatggtgtgtaacgtgaagaagctgatcaacgagaaaaaggaggatggcaaggtgttttggcagaatctggctggctacaagagacaggaagccctgagaccatacctgagcagcgaggaagatcggaagaagggaaagaaattcgctcggtaccagctgggcgacctgctgctgcacctggaaaagaagcacggcgaggactggggaaaggtgtacgacgaggcctgggagcggattgacaagaaagtggaaggcctgagcaagcacatcaagctggaagaggaacggagaagcgaggacgcccagagcaaggccgccctgaccgactggctgcgggctaaggccagcttcgtgatcgagggcctgaaggaggccgacaaggacgagttctgcagatgcgagctgaagctgcagaagtggtacggggacctgcggggaaagcccttcgccatcgaagccgagaacagcatcctggacatcagcggcttcagcaagcagtacaactgtgccttcatctggcagaaggacggcgtgaagaagctgaacctgtacctgatcatcaactacttcaagggcggcaagctgcggttcaagaagatcaaacctgaagccttcgaagccaacagattctacaccgtgatcaacaaaaagagcggcgagatcgtgcccatggaggtgaacttcaacttcgacgaccccaacctgatcatcctgcctctggcctttggcaagagacagggcagagaattcatctggaacgacctgctgtccctggaaaccggcagcctgaagctggccaacggaagagtgatcgagaagacactgtacaacagaagaacccggcaggatgagcctgccctgttcgtggccctgaccttcgagcggcgggaggtcctggactcctccaatatcaaaccaatgaacctgatcggcgtggcaagaggcgaaaacatccccgccgtgatcgccctgaccgaccccgagggctgcccactgagccggtttaaggatagcctgggaaacccaacccacatcctgagaatcggcgagagctataaggagaagcagcggaccatccaggccaagaaggaggtggagcagcggagagccggcggctacagccggaagtacgccagcaaagccaagaatctggcagacgatatggtgagaaacaccgctagagatctgctgtactacgccgtgacccaggatgccatgctgatcttcgccaacctgagccggggcttcggccggcagggcaagcggaccttcatggccgagagacagtacacacggatggaggactggctgaccgccaagctggcctacgagggcctgagcaagacctacctgtccaagacactggcccagtacacctccaagacatgcagcaactgtgggtttaccatcaccagcgccgactacgacagggtgctggagaagctgaagaagacagcaacaggctggatgaccacaattaacggcaaggagctgaaggtggagggccagattacctactacaacagatacaagagacagaacgtagtcaaggacctgtccgtcgagctggatagactgagcgaagaatctgtgaacaacgacatctcctcctggacaaagggcagaagcggagaagctctgagcctcctgaagaaaagattctcccatagacccgtgcaggagaagttcgtgtgcctgaactgcggcttcgagacacacgcagccgagcaagccgccctgaacatcgccagatcctggctgttcctgcggagccaggagtacaagaaataccagacaaacaagacaaccggcaacaccgataagagagccttcgtcgagacctggcagtccttttaccggaagaagcttaaggaggtgtggaaacctgccgtgcggtctggcggatctggcggaggctccacaagcgccagggccagcctgagcttcgaggacgtggccgtgggcttcagctgggaggagtggcagctgctggcccccagccagaaggacctgtacagggacgtgatgctggagaactacaggaacctggtgagcgtgggctaccaggccagcaagctggacagcctgttccagagcgagcagggcggccccccctggaccgtggagggcgccgcccagagccagacctgccccgaggagatctgggagaccagccccaagaaaaagagaaaagtctaagctgccttctgcggggcttgccttctggccatgcccttcttctctcccttgcacctgtacctcttggtctttgaataaagcctgagtaggaaggctagcaaaaaaaaaaaaaaaaaaaaaaaaaaaaaaaaaaaaaaaaaaaaaaaaaaaaaaaaaaaaaaaaaaaaaaaaaaaaaaaa

SEQ ID NO: 6941 - RNA, 5794 nt, synthetic construct
  source 1..5794: mol_type = other RNA
aggaaataagagagaaaagaagagtaagaagaaatataagagccaccatggcccctaagaagaagcgtaaagtgagccggatggaacgcctcgtctacgaggtgcggcagaagtgcagaaacatcgaggacatctgcatctcctgcggatctctgaacgtgaccctggagcacccactgttcatcggcggcatgtgccagaactgtaaaaactgttttctggagtgtgcctatcaatacgacgatgacggctaccagagctactgcaccatctgttgcggcggaagagaggtgctgatgtgtggaaataacaactgctgccggtgcttctgcgtggaatgcgtggacctgctggtgggccccggcgccgcccaggccgctattaaggaagatccttggaactgctacatgtgcggccacaagggcacatacggcctgctgagacggagagaggactggcctagcagactgcagatgttcttcgccaataaccacgaccaggagttcgacccccctaaggtgtaccctcccgtccccgccgagaagagaaagcccatccgggtcctgagcctgttcgatggcatcgccaccggtctgctggtgctgaaggacctgggcatccaggtggataggtacattgcctccgaggtgtgcgaggactccatcaccgtgggaatggtgcgtcatcagggcaagatcatgtacgtgggcgacgtgcggagcgtgacacagaagcatatccaggagtggggccctttcgacctggtgatcggcggcagcccttgcaatgacctgagcatcgtgaacccagcccggaagggcctgtacgagggaaccggcagactgttcttcgagttttacagactgctgcacgacgcccggcctaaggaaggcgacgaccggcccttcttttggctgttcgagaatgtggtggccatgggagtcagcgacaagcgggatattagccggttcctggagagcaaccccgtgatgatcgatgccaaggaagtgagcgccgcccaccgggccagatacttctggggcaatctgcctggcatgaacagacccctggccagcaccgtgaacgacaagctggagctgcaggagtgcctggagcacggccggatcgccaagttcagcaaggtgagaaccatcaccacccgaagcaacagcatcaaacaaggcaaggaccagcactttcctgtgttcatgaacgagaaggaggacatcctgtggtgtaccgagatggagagagtgttcgggttcccagtccactacacagatgtcagcaacatgtctagactggccagacagagactgctgggaagaagctggtccgtccctgtgatcagacacctgttcgcccctctgaaggagtacttcgcctgcgtgagcagcggcaacagcaacgccaacagccggggccccagcttctctagcggcctggtgccactgtccctgagagggagccacatgggccccatggagatctacaaaaccgtgagcgcctggaagcggcagcctgtgcgcgtgctgagcctgtttcggaatatcgataaagtcctgaaaagcctgggattcctggagagcggctctggctccggcggtggcaccctgaagtacgtggaggatgtgacaaacgtggtcagacgggatgtggagaagtggggccccttcgatctggtgtacggcagcacccaacccctgggcagctcttgtgaccggtgccctggctggtacatgtttcagttccaccggatcctgcagtacgccctgccgagacaggagtcccagcggccattcttttggattttcatggacaacttgctgctgaccgaggatgaccaggaaactaccactcggttcctgcagaccgaagccgtgaccctgcaggacgtgagaggccgggactaccagaacgccatgcgggtgtggtccaacatccctggactgaaaagcaagcacgcacctctgacccctaaagaagaggagtacctgcaggcccaggtgcggagcagaagcaagctggacgcccctaaggtggatctgctggtgaagaattgcctcctgcccctgagagagtacttcaagtatttcagccagaatagtctgcccctgggcggcccaagcagcggcgcccctcctcccagcggcggcagcccagccggctccccaacctctaccgaggagggcacctctgagtccgccacccccgagagcggccctggcacctccaccgagcccagcgagggcagcgcacccggcagccctgccggcagccccacctccacagaggagggaaccagcaccgagcccagcgaaggcagcgccccaggcaccagcaccgagcctagtgagggcggctctggcggcggcagcgcccaggagattaaacggatcaacaagatcagaagaagacttgtgaaagacagcaacaccaagaaggccggcaagacaggccccatgaaaaccctgctggttagagtgatgacacccgatctgagagagcggctggaaaacctgagaaagaagcctgaaaatatcccccagcccatcagcaatacatctagagccaacctgaataagctgctgaccgattacaccgaaatgaagaaggcgatcctgcatgtgtactgggaagagttccagaaggaccctgtgggcctgatgagccgggtggcccagcctgccagcaagaagatcgatcagaacaagctgaaacctgagatggacgagaagggcaacctgaccaccgccggctttgcctgctctcagtgtggccagcccctgttcgtgtacaagctggagcaggtgtctgagaagggcaaggcttacaccaactacttcggacggtgcaatgtggccgagcacgaaaagctgatcctgctggcccagctgaagcccgagaaggatagcgacgaagccgtgacatatagcctgggaaagtttgggcagagggccctggatttctacagcattcatgtgaccaaggagtccacccaccccgtgaagcccctggcccagatcgccggaaacagatacgcctccggacctgtgggaaaggccctgagcgacgcatgtatgggcacaatcgcctccttcctgtctaagtaccaggacatcatcatcgaacaccagaaggtggtgaagggcaaccagaagagactggagagcctgcgggagctggccggcaaggaaaacctggaataccctagcgtgaccctgccacctcagcctcacaccaaggagggcgttgatgcctacaacgaagtgatcgcccgggtgcgaatgtgggtgaacctgaacctgtggcagaagctgaagctaagcagagatgatgccaagcctctgctgagactgaagggattcccttcctttcctctggtcgagagacaggccaacgaagtggactggtgggacatggtgtgtaacgtgaagaagctgatcaacgagaaaaaggaggatggcaaggtgttttggcagaatctggctggctacaagagacaggaagccctgagaccatacctgagcagcgaggaagatcggaagaagggaaagaaattcgctcggtaccagctgggcgacctgctgctgcacctggaaaagaagcacggcgaggactggggaaaggtgtacgacgaggcctgggagcggattgacaagaaagtggaaggcctgagcaagcacatcaagctggaagaggaacggagaagcgaggacgcccagagcaaggccgccctgaccgactggctgcgggctaaggccagcttcgtgatcgagggcctgaaggaggccgacaaggacgagttctgcagatgcgagctgaagctgcagaagtggtacggggacctgcggggaaagcccttcgccatcgaagccgagaacagcatcctggacatcagcggcttcagcaagcagtacaactgtgccttcatctggcagaaggacggcgtgaagaagctgaacctgtacctgatcatcaactacttcaagggcggcaagctgcggttcaagaagatcaaacctgaagccttcgaagccaacagattctacaccgtgatcaacaaaaagagcggcgagatcgtgcccatggaggtgaacttcaacttcgacgaccccaacctgatcatcctgcctctggcctttggcaagagacagggcagagaattcatctggaacgacctgctgtccctggaaaccggcagcctgaagctggccaacggaagagtgatcgagaagacactgtacaacagaagaacccggcaggatgagcctgccctgttcgtggccctgaccttcgagcggcgggaggtcctggactcctccaatatcaaaccaatgaacctgatcggcgtggcaagaggcgaaaacatccccgccgtgatcgccctgaccgaccccgagggctgcccactgagccggtttaaggatagcctgggaaacccaacccacatcctgagaatcggcgagagctataaggagaagcagcggaccatccaggccaagaaggaggtggagcagcggagagccggcggctacagccggaagtacgccagcaaagccaagaatctggcagacgatatggtgagaaacaccgctagagatctgctgtactacgccgtgacccaggatgccatgctgatcttcgccaacctgagccggggcttcggccggcagggcaagcggaccttcatggccgagagacagtacacacggatggaggactggctgaccgccaagctggcctacgagggcctgagcaagacctacctgtccaagacactggcccagtacacctccaagacatgcagcaactgtgggtttaccatcaccagcgccgactacgacagggtgctggagaagctgaagaagacagcaacaggctggatgaccacaattaacggcaaggagctgaaggtggagggccagattacctactacaacagatacaagagacagaacgtagtcaaggacctgtccgtcgagctggatagactgagcgaagaatctgtgaacaacgacatctcctcctggacaaagggcagaagcggagaagctctgagcctcctgaagaaaagattctcccatagacccgtgcaggagaagttcgtgtgcctgaactgcggcttcgagacacacgcagccgagcaagccgccctgaacatcgccagatcctggctgttcctgcggagccaggagtacaagaaataccagacaaacaagacaaccggcaacaccgataagagagccttcgtcgagacctggcagtccttttaccggaagaagcttaaggaggtgtggaaacctgccgtgcggtctggcggatctggcggaggctccacaagcacccagcccgacgaggacctgcacctgcaggccgaggagacccagctggtgaaggagagcgtgaccttcaaggacgtggccatcgacttcaccctggaggagtggagactgatggaccccacccagagaaacctgcacaaggacgtgatgctggagaactacagaaacctggtgagcctgggcctggccgtgagcaagcccgacatgatcagccacctggagaacggcaagggcccctggaccagccccaagaaaaagagaaaagtctaagctgccttctgcggggcttgccttctggccatgcccttcttctctcccttgcacctgtacctcttggtctttgaataaagcctgagtaggaaggctagcaaaaaaaaaaaaaaaaaaaaaaaaaaaaaaaaaaaaaaaaaaaaaaaaaaaaaaaaaaaaaaaaaaaaaaaaaaaaaaaa

SEQ ID NO: 6942 - RNA, 5797 nt, synthetic construct
  source 1..5797: mol_type = other RNA
aggaaataagagagaaaagaagagtaagaagaaatataagagccaccatggcccctaagaagaagcgtaaagtgagccggatggaacgcctcgtctacgaggtgcggcagaagtgcagaaacatcgaggacatctgcatctcctgcggatctctgaacgtgaccctggagcacccactgttcatcggcggcatgtgccagaactgtaaaaactgttttctggagtgtgcctatcaatacgacgatgacggctaccagagctactgcaccatctgttgcggcggaagagaggtgctgatgtgtggaaataacaactgctgccggtgcttctgcgtggaatgcgtggacctgctggtgggccccggcgccgcccaggccgctattaaggaagatccttggaactgctacatgtgcggccacaagggcacatacggcctgctgagacggagagaggactggcctagcagactgcagatgttcttcgccaataaccacgaccaggagttcgacccccctaaggtgtaccctcccgtccccgccgagaagagaaagcccatccgggtcctgagcctgttcgatggcatcgccaccggtctgctggtgctgaaggacctgggcatccaggtggataggtacattgcctccgaggtgtgcgaggactccatcaccgtgggaatggtgcgtcatcagggcaagatcatgtacgtgggcgacgtgcggagcgtgacacagaagcatatccaggagtggggccctttcgacctggtgatcggcggcagcccttgcaatgacctgagcatcgtgaacccagcccggaagggcctgtacgagggaaccggcagactgttcttcgagttttacagactgctgcacgacgcccggcctaaggaaggcgacgaccggcccttcttttggctgttcgagaatgtggtggccatgggagtcagcgacaagcgggatattagccggttcctggagagcaaccccgtgatgatcgatgccaaggaagtgagcgccgcccaccgggccagatacttctggggcaatctgcctggcatgaacagacccctggccagcaccgtgaacgacaagctggagctgcaggagtgcctggagcacggccggatcgccaagttcagcaaggtgagaaccatcaccacccgaagcaacagcatcaaacaaggcaaggaccagcactttcctgtgttcatgaacgagaaggaggacatcctgtggtgtaccgagatggagagagtgttcgggttcccagtccactacacagatgtcagcaacatgtctagactggccagacagagactgctgggaagaagctggtccgtccctgtgatcagacacctgttcgcccctctgaaggagtacttcgcctgcgtgagcagcggcaacagcaacgccaacagccggggccccagcttctctagcggcctggtgccactgtccctgagagggagccacatgggccccatggagatctacaaaaccgtgagcgcctggaagcggcagcctgtgcgcgtgctgagcctgtttcggaatatcgataaagtcctgaaaagcctgggattcctggagagcggctctggctccggcggtggcaccctgaagtacgtggaggatgtgacaaacgtggtcagacgggatgtggagaagtggggccccttcgatctggtgtacggcagcacccaacccctgggcagctcttgtgaccggtgccctggctggtacatgtttcagttccaccggatcctgcagtacgccctgccgagacaggagtcccagcggccattcttttggattttcatggacaacttgctgctgaccgaggatgaccaggaaactaccactcggttcctgcagaccgaagccgtgaccctgcaggacgtgagaggccgggactaccagaacgccatgcgggtgtggtccaacatccctggactgaaaagcaagcacgcacctctgacccctaaagaagaggagtacctgcaggcccaggtgcggagcagaagcaagctggacgcccctaaggtggatctgctggtgaagaattgcctcctgcccctgagagagtacttcaagtatttcagccagaatagtctgcccctgggcggcccaagcagcggcgcccctcctcccagcggcggcagcccagccggctccccaacctctaccgaggagggcacctctgagtccgccacccccgagagcggccctggcacctccaccgagcccagcgagggcagcgcacccggcagccctgccggcagccccacctccacagaggagggaaccagcaccgagcccagcgaaggcagcgccccaggcaccagcaccgagcctagtgagggcggctctggcggcggcagcgcccaggagattaaacggatcaacaagatcagaagaagacttgtgaaagacagcaacaccaagaaggccggcaagacaggccccatgaaaaccctgctggttagagtgatgacacccgatctgagagagcggctggaaaacctgagaaagaagcctgaaaatatcccccagcccatcagcaatacatctagagccaacctgaataagctgctgaccgattacaccgaaatgaagaaggcgatcctgcatgtgtactgggaagagttccagaaggaccctgtgggcctgatgagccgggtggcccagcctgccagcaagaagatcgatcagaacaagctgaaacctgagatggacgagaagggcaacctgaccaccgccggctttgcctgctctcagtgtggccagcccctgttcgtgtacaagctggagcaggtgtctgagaagggcaaggcttacaccaactacttcggacggtgcaatgtggccgagcacgaaaagctgatcctgctggcccagctgaagcccgagaaggatagcgacgaagccgtgacatatagcctgggaaagtttgggcagagggccctggatttctacagcattcatgtgaccaaggagtccacccaccccgtgaagcccctggcccagatcgccggaaacagatacgcctccggacctgtgggaaaggccctgagcgacgcatgtatgggcacaatcgcctccttcctgtctaagtaccaggacatcatcatcgaacaccagaaggtggtgaagggcaaccagaagagactggagagcctgcgggagctggccggcaaggaaaacctggaataccctagcgtgaccctgccacctcagcctcacaccaaggagggcgttgatgcctacaacgaagtgatcgcccgggtgcgaatgtgggtgaacctgaacctgtggcagaagctgaagctaagcagagatgatgccaagcctctgctgagactgaagggattcccttcctttcctctggtcgagagacaggccaacgaagtggactggtgggacatggtgtgtaacgtgaagaagctgatcaacgagaaaaaggaggatggcaaggtgttttggcagaatctggctggctacaagagacaggaagccctgagaccatacctgagcagcgaggaagatcggaagaagggaaagaaattcgctcggtaccagctgggcgacctgctgctgcacctggaaaagaagcacggcgaggactggggaaaggtgtacgacgaggcctgggagcggattgacaagaaagtggaaggcctgagcaagcacatcaagctggaagaggaacggagaagcgaggacgcccagagcaaggccgccctgaccgactggctgcgggctaaggccagcttcgtgatcgagggcctgaaggaggccgacaaggacgagttctgcagatgcgagctgaagctgcagaagtggtacggggacctgcggggaaagcccttcgccatcgaagccgagaacagcatcctggacatcagcggcttcagcaagcagtacaactgtgccttcatctggcagaaggacggcgtgaagaagctgaacctgtacctgatcatcaactacttcaagggcggcaagctgcggttcaagaagatcaaacctgaagccttcgaagccaacagattctacaccgtgatcaacaaaaagagcggcgagatcgtgcccatggaggtgaacttcaacttcgacgaccccaacctgatcatcctgcctctggcctttggcaagagacagggcagagaattcatctggaacgacctgctgtccctggaaaccggcagcctgaagctggccaacggaagagtgatcgagaagacactgtacaacagaagaacccggcaggatgagcctgccctgttcgtggccctgaccttcgagcggcgggaggtcctggactcctccaatatcaaaccaatgaacctgatcggcgtggcaagaggcgaaaacatccccgccgtgatcgccctgaccgaccccgagggctgcccactgagccggtttaaggatagcctgggaaacccaacccacatcctgagaatcggcgagagctataaggagaagcagcggaccatccaggccaagaaggaggtggagcagcggagagccggcggctacagccggaagtacgccagcaaagccaagaatctggcagacgatatggtgagaaacaccgctagagatctgctgtactacgccgtgacccaggatgccatgctgatcttcgccaacctgagccggggcttcggccggcagggcaagcggaccttcatggccgagagacagtacacacggatggaggactggctgaccgccaagctggcctacgagggcctgagcaagacctacctgtccaagacactggcccagtacacctccaagacatgcagcaactgtgggtttaccatcaccagcgccgactacgacagggtgctggagaagctgaagaagacagcaacaggctggatgaccacaattaacggcaaggagctgaaggtggagggccagattacctactacaacagatacaagagacagaacgtagtcaaggacctgtccgtcgagctggatagactgagcgaagaatctgtgaacaacgacatctcctcctggacaaagggcagaagcggagaagctctgagcctcctgaagaaaagattctcccatagacccgtgcaggagaagttcgtgtgcctgaactgcggcttcgagacacacgcagccgagcaagccgccctgaacatcgccagatcctggctgttcctgcggagccaggagtacaagaaataccagacaaacaagacaaccggcaacaccgataagagagccttcgtcgagacctggcagtccttttaccggaagaagcttaaggaggtgtggaaacctgccgtgcggtctggcggatctggcggaggctccacaagcagctacaggagcaagaccatggcccagggcagcctgaccttcagcgacgtggccatcggcttcagccagcaggagtgggagtgcctggaccccgtgcagaagaccctgtacagggacgtgatgatggagaactacggcaacctggtgagcctgggccacagcatcagcaagcccaacgtgatcaccctgctggagcagggcaaggagccctggatcgtggtgagggaggagaccaggagctggaccagccccaagaaaaagagaaaagtctaagctgccttctgcggggcttgccttctggccatgcccttcttctctcccttgcacctgtacctcttggtctttgaataaagcctgagtaggaaggctagcaaaaaaaaaaaaaaaaaaaaaaaaaaaaaaaaaaaaaaaaaaaaaaaaaaaaaaaaaaaaaaaaaaaaaaaaaaaaaaaa

SEQ ID NO: 6943 - RNA, 5797 nt, synthetic construct
  source 1..5797: mol_type = other RNA
aggaaataagagagaaaagaagagtaagaagaaatataagagccaccatggcccctaagaagaagcgtaaagtgagccggatggaacgcctcgtctacgaggtgcggcagaagtgcagaaacatcgaggacatctgcatctcctgcggatctctgaacgtgaccctggagcacccactgttcatcggcggcatgtgccagaactgtaaaaactgttttctggagtgtgcctatcaatacgacgatgacggctaccagagctactgcaccatctgttgcggcggaagagaggtgctgatgtgtggaaataacaactgctgccggtgcttctgcgtggaatgcgtggacctgctggtgggccccggcgccgcccaggccgctattaaggaagatccttggaactgctacatgtgcggccacaagggcacatacggcctgctgagacggagagaggactggcctagcagactgcagatgttcttcgccaataaccacgaccaggagttcgacccccctaaggtgtaccctcccgtccccgccgagaagagaaagcccatccgggtcctgagcctgttcgatggcatcgccaccggtctgctggtgctgaaggacctgggcatccaggtggataggtacattgcctccgaggtgtgcgaggactccatcaccgtgggaatggtgcgtcatcagggcaagatcatgtacgtgggcgacgtgcggagcgtgacacagaagcatatccaggagtggggccctttcgacctggtgatcggcggcagcccttgcaatgacctgagcatcgtgaacccagcccggaagggcctgtacgagggaaccggcagactgttcttcgagttttacagactgctgcacgacgcccggcctaaggaaggcgacgaccggcccttcttttggctgttcgagaatgtggtggccatgggagtcagcgacaagcgggatattagccggttcctggagagcaaccccgtgatgatcgatgccaaggaagtgagcgccgcccaccgggccagatacttctggggcaatctgcctggcatgaacagacccctggccagcaccgtgaacgacaagctggagctgcaggagtgcctggagcacggccggatcgccaagttcagcaaggtgagaaccatcaccacccgaagcaacagcatcaaacaaggcaaggaccagcactttcctgtgttcatgaacgagaaggaggacatcctgtggtgtaccgagatggagagagtgttcgggttcccagtccactacacagatgtcagcaacatgtctagactggccagacagagactgctgggaagaagctggtccgtccctgtgatcagacacctgttcgcccctctgaaggagtacttcgcctgcgtgagcagcggcaacagcaacgccaacagccggggccccagcttctctagcggcctggtgccactgtccctgagagggagccacatgggccccatggagatctacaaaaccgtgagcgcctggaagcggcagcctgtgcgcgtgctgagcctgtttcggaatatcgataaagtcctgaaaagcctgggattcctggagagcggctctggctccggcggtggcaccctgaagtacgtggaggatgtgacaaacgtggtcagacgggatgtggagaagtggggccccttcgatctggtgtacggcagcacccaacccctgggcagctcttgtgaccggtgccctggctggtacatgtttcagttccaccggatcctgcagtacgccctgccgagacaggagtcccagcggccattcttttggattttcatggacaacttgctgctgaccgaggatgaccaggaaactaccactcggttcctgcagaccgaagccgtgaccctgcaggacgtgagaggccgggactaccagaacgccatgcgggtgtggtccaacatccctggactgaaaagcaagcacgcacctctgacccctaaagaagaggagtacctgcaggcccaggtgcggagcagaagcaagctggacgcccctaaggtggatctgctggtgaagaattgcctcctgcccctgagagagtacttcaagtatttcagccagaatagtctgcccctgggcggcccaagcagcggcgcccctcctcccagcggcggcagcccagccggctccccaacctctaccgaggagggcacctctgagtccgccacccccgagagcggccctggcacctccaccgagcccagcgagggcagcgcacccggcagccctgccggcagccccacctccacagaggagggaaccagcaccgagcccagcgaaggcagcgccccaggcaccagcaccgagcctagtgagggcggctctggcggcggcagcgcccaggagattaaacggatcaacaagatcagaagaagacttgtgaaagacagcaacaccaagaaggccggcaagacaggccccatgaaaaccctgctggttagagtgatgacacccgatctgagagagcggctggaaaacctgagaaagaagcctgaaaatatcccccagcccatcagcaatacatctagagccaacctgaataagctgctgaccgattacaccgaaatgaagaaggcgatcctgcatgtgtactgggaagagttccagaaggaccctgtgggcctgatgagccgggtggcccagcctgccagcaagaagatcgatcagaacaagctgaaacctgagatggacgagaagggcaacctgaccaccgccggctttgcctgctctcagtgtggccagcccctgttcgtgtacaagctggagcaggtgtctgagaagggcaaggcttacaccaactacttcggacggtgcaatgtggccgagcacgaaaagctgatcctgctggcccagctgaagcccgagaaggatagcgacgaagccgtgacatatagcctgggaaagtttgggcagagggccctggatttctacagcattcatgtgaccaaggagtccacccaccccgtgaagcccctggcccagatcgccggaaacagatacgcctccggacctgtgggaaaggccctgagcgacgcatgtatgggcacaatcgcctccttcctgtctaagtaccaggacatcatcatcgaacaccagaaggtggtgaagggcaaccagaagagactggagagcctgcgggagctggccggcaaggaaaacctggaataccctagcgtgaccctgccacctcagcctcacaccaaggagggcgttgatgcctacaacgaagtgatcgcccgggtgcgaatgtgggtgaacctgaacctgtggcagaagctgaagctaagcagagatgatgccaagcctctgctgagactgaagggattcccttcctttcctctggtcgagagacaggccaacgaagtggactggtgggacatggtgtgtaacgtgaagaagctgatcaacgagaaaaaggaggatggcaaggtgttttggcagaatctggctggctacaagagacaggaagccctgagaccatacctgagcagcgaggaagatcggaagaagggaaagaaattcgctcggtaccagctgggcgacctgctgctgcacctggaaaagaagcacggcgaggactggggaaaggtgtacgacgaggcctgggagcggattgacaagaaagtggaaggcctgagcaagcacatcaagctggaagaggaacggagaagcgaggacgcccagagcaaggccgccctgaccgactggctgcgggctaaggccagcttcgtgatcgagggcctgaaggaggccgacaaggacgagttctgcagatgcgagctgaagctgcagaagtggtacggggacctgcggggaaagcccttcgccatcgaagccgagaacagcatcctggacatcagcggcttcagcaagcagtacaactgtgccttcatctggcagaaggacggcgtgaagaagctgaacctgtacctgatcatcaactacttcaagggcggcaagctgcggttcaagaagatcaaacctgaagccttcgaagccaacagattctacaccgtgatcaacaaaaagagcggcgagatcgtgcccatggaggtgaacttcaacttcgacgaccccaacctgatcatcctgcctctggcctttggcaagagacagggcagagaattcatctggaacgacctgctgtccctggaaaccggcagcctgaagctggccaacggaagagtgatcgagaagacactgtacaacagaagaacccggcaggatgagcctgccctgttcgtggccctgaccttcgagcggcgggaggtcctggactcctccaatatcaaaccaatgaacctgatcggcgtggcaagaggcgaaaacatccccgccgtgatcgccctgaccgaccccgagggctgcccactgagccggtttaaggatagcctgggaaacccaacccacatcctgagaatcggcgagagctataaggagaagcagcggaccatccaggccaagaaggaggtggagcagcggagagccggcggctacagccggaagtacgccagcaaagccaagaatctggcagacgatatggtgagaaacaccgctagagatctgctgtactacgccgtgacccaggatgccatgctgatcttcgccaacctgagccggggcttcggccggcagggcaagcggaccttcatggccgagagacagtacacacggatggaggactggctgaccgccaagctggcctacgagggcctgagcaagacctacctgtccaagacactggcccagtacacctccaagacatgcagcaactgtgggtttaccatcaccagcgccgactacgacagggtgctggagaagctgaagaagacagcaacaggctggatgaccacaattaacggcaaggagctgaaggtggagggccagattacctactacaacagatacaagagacagaacgtagtcaaggacctgtccgtcgagctggatagactgagcgaagaatctgtgaacaacgacatctcctcctggacaaagggcagaagcggagaagctctgagcctcctgaagaaaagattctcccatagacccgtgcaggagaagttcgtgtgcctgaactgcggcttcgagacacacgcagccgagcaagccgccctgaacatcgccagatcctggctgttcctgcggagccaggagtacaagaaataccagacaaacaagacaaccggcaacaccgataagagagccttcgtcgagacctggcagtccttttaccggaagaagcttaaggaggtgtggaaacctgccgtgcggtctggcggatctggcggaggctccacaagcgaggaggtgcccgtggtgttcgaggacgtggccgtgtacttcaccagggaggagtggggcaccctggacaagaggcagaaggagctgtacagggacgtgatgaggatgaactacgagctgctggccagcctgggccccgccgccgccaagcccgccctgatcagcaagctggagaggagggccgccccctggatccaggaccccaacggccccaagtggggcaagggcaggccccccggcaagaccagccccaagaaaaagagaaaagtctaagctgccttctgcggggcttgccttctggccatgcccttcttctctcccttgcacctgtacctcttggtctttgaataaagcctgagtaggaaggctagcaaaaaaaaaaaaaaaaaaaaaaaaaaaaaaaaaaaaaaaaaaaaaaaaaaaaaaaaaaaaaaaaaaaaaaaaaaaaaaaa

SEQ ID NO: 6944 - RNA, 5797 nt, synthetic construct
  source 1..5797: mol_type = other RNA
aggaaataagagagaaaagaagagtaagaagaaatataagagccaccatggcccctaagaagaagcgtaaagtgagccggatggaacgcctcgtctacgaggtgcggcagaagtgcagaaacatcgaggacatctgcatctcctgcggatctctgaacgtgaccctggagcacccactgttcatcggcggcatgtgccagaactgtaaaaactgttttctggagtgtgcctatcaatacgacgatgacggctaccagagctactgcaccatctgttgcggcggaagagaggtgctgatgtgtggaaataacaactgctgccggtgcttctgcgtggaatgcgtggacctgctggtgggccccggcgccgcccaggccgctattaaggaagatccttggaactgctacatgtgcggccacaagggcacatacggcctgctgagacggagagaggactggcctagcagactgcagatgttcttcgccaataaccacgaccaggagttcgacccccctaaggtgtaccctcccgtccccgccgagaagagaaagcccatccgggtcctgagcctgttcgatggcatcgccaccggtctgctggtgctgaaggacctgggcatccaggtggataggtacattgcctccgaggtgtgcgaggactccatcaccgtgggaatggtgcgtcatcagggcaagatcatgtacgtgggcgacgtgcggagcgtgacacagaagcatatccaggagtggggccctttcgacctggtgatcggcggcagcccttgcaatgacctgagcatcgtgaacccagcccggaagggcctgtacgagggaaccggcagactgttcttcgagttttacagactgctgcacgacgcccggcctaaggaaggcgacgaccggcccttcttttggctgttcgagaatgtggtggccatgggagtcagcgacaagcgggatattagccggttcctggagagcaaccccgtgatgatcgatgccaaggaagtgagcgccgcccaccgggccagatacttctggggcaatctgcctggcatgaacagacccctggccagcaccgtgaacgacaagctggagctgcaggagtgcctggagcacggccggatcgccaagttcagcaaggtgagaaccatcaccacccgaagcaacagcatcaaacaaggcaaggaccagcactttcctgtgttcatgaacgagaaggaggacatcctgtggtgtaccgagatggagagagtgttcgggttcccagtccactacacagatgtcagcaacatgtctagactggccagacagagactgctgggaagaagctggtccgtccctgtgatcagacacctgttcgcccctctgaaggagtacttcgcctgcgtgagcagcggcaacagcaacgccaacagccggggccccagcttctctagcggcctggtgccactgtccctgagagggagccacatgggccccatggagatctacaaaaccgtgagcgcctggaagcggcagcctgtgcgcgtgctgagcctgtttcggaatatcgataaagtcctgaaaagcctgggattcctggagagcggctctggctccggcggtggcaccctgaagtacgtggaggatgtgacaaacgtggtcagacgggatgtggagaagtggggccccttcgatctggtgtacggcagcacccaacccctgggcagctcttgtgaccggtgccctggctggtacatgtttcagttccaccggatcctgcagtacgccctgccgagacaggagtcccagcggccattcttttggattttcatggacaacttgctgctgaccgaggatgaccaggaaactaccactcggttcctgcagaccgaagccgtgaccctgcaggacgtgagaggccgggactaccagaacgccatgcgggtgtggtccaacatccctggactgaaaagcaagcacgcacctctgacccctaaagaagaggagtacctgcaggcccaggtgcggagcagaagcaagctggacgcccctaaggtggatctgctggtgaagaattgcctcctgcccctgagagagtacttcaagtatttcagccagaatagtctgcccctgggcggcccaagcagcggcgcccctcctcccagcggcggcagcccagccggctccccaacctctaccgaggagggcacctctgagtccgccacccccgagagcggccctggcacctccaccgagcccagcgagggcagcgcacccggcagccctgccggcagccccacctccacagaggagggaaccagcaccgagcccagcgaaggcagcgccccaggcaccagcaccgagcctagtgagggcggctctggcggcggcagcgcccaggagattaaacggatcaacaagatcagaagaagacttgtgaaagacagcaacaccaagaaggccggcaagacaggccccatgaaaaccctgctggttagagtgatgacacccgatctgagagagcggctggaaaacctgagaaagaagcctgaaaatatcccccagcccatcagcaatacatctagagccaacctgaataagctgctgaccgattacaccgaaatgaagaaggcgatcctgcatgtgtactgggaagagttccagaaggaccctgtgggcctgatgagccgggtggcccagcctgccagcaagaagatcgatcagaacaagctgaaacctgagatggacgagaagggcaacctgaccaccgccggctttgcctgctctcagtgtggccagcccctgttcgtgtacaagctggagcaggtgtctgagaagggcaaggcttacaccaactacttcggacggtgcaatgtggccgagcacgaaaagctgatcctgctggcccagctgaagcccgagaaggatagcgacgaagccgtgacatatagcctgggaaagtttgggcagagggccctggatttctacagcattcatgtgaccaaggagtccacccaccccgtgaagcccctggcccagatcgccggaaacagatacgcctccggacctgtgggaaaggccctgagcgacgcatgtatgggcacaatcgcctccttcctgtctaagtaccaggacatcatcatcgaacaccagaaggtggtgaagggcaaccagaagagactggagagcctgcgggagctggccggcaaggaaaacctggaataccctagcgtgaccctgccacctcagcctcacaccaaggagggcgttgatgcctacaacgaagtgatcgcccgggtgcgaatgtgggtgaacctgaacctgtggcagaagctgaagctaagcagagatgatgccaagcctctgctgagactgaagggattcccttcctttcctctggtcgagagacaggccaacgaagtggactggtgggacatggtgtgtaacgtgaagaagctgatcaacgagaaaaaggaggatggcaaggtgttttggcagaatctggctggctacaagagacaggaagccctgagaccatacctgagcagcgaggaagatcggaagaagggaaagaaattcgctcggtaccagctgggcgacctgctgctgcacctggaaaagaagcacggcgaggactggggaaaggtgtacgacgaggcctgggagcggattgacaagaaagtggaaggcctgagcaagcacatcaagctggaagaggaacggagaagcgaggacgcccagagcaaggccgccctgaccgactggctgcgggctaaggccagcttcgtgatcgagggcctgaaggaggccgacaaggacgagttctgcagatgcgagctgaagctgcagaagtggtacggggacctgcggggaaagcccttcgccatcgaagccgagaacagcatcctggacatcagcggcttcagcaagcagtacaactgtgccttcatctggcagaaggacggcgtgaagaagctgaacctgtacctgatcatcaactacttcaagggcggcaagctgcggttcaagaagatcaaacctgaagccttcgaagccaacagattctacaccgtgatcaacaaaaagagcggcgagatcgtgcccatggaggtgaacttcaacttcgacgaccccaacctgatcatcctgcctctggcctttggcaagagacagggcagagaattcatctggaacgacctgctgtccctggaaaccggcagcctgaagctggccaacggaagagtgatcgagaagacactgtacaacagaagaacccggcaggatgagcctgccctgttcgtggccctgaccttcgagcggcgggaggtcctggactcctccaatatcaaaccaatgaacctgatcggcgtggcaagaggcgaaaacatccccgccgtgatcgccctgaccgaccccgagggctgcccactgagccggtttaaggatagcctgggaaacccaacccacatcctgagaatcggcgagagctataaggagaagcagcggaccatccaggccaagaaggaggtggagcagcggagagccggcggctacagccggaagtacgccagcaaagccaagaatctggcagacgatatggtgagaaacaccgctagagatctgctgtactacgccgtgacccaggatgccatgctgatcttcgccaacctgagccggggcttcggccggcagggcaagcggaccttcatggccgagagacagtacacacggatggaggactggctgaccgccaagctggcctacgagggcctgagcaagacctacctgtccaagacactggcccagtacacctccaagacatgcagcaactgtgggtttaccatcaccagcgccgactacgacagggtgctggagaagctgaagaagacagcaacaggctggatgaccacaattaacggcaaggagctgaaggtggagggccagattacctactacaacagatacaagagacagaacgtagtcaaggacctgtccgtcgagctggatagactgagcgaagaatctgtgaacaacgacatctcctcctggacaaagggcagaagcggagaagctctgagcctcctgaagaaaagattctcccatagacccgtgcaggagaagttcgtgtgcctgaactgcggcttcgagacacacgcagccgagcaagccgccctgaacatcgccagatcctggctgttcctgcggagccaggagtacaagaaataccagacaaacaagacaaccggcaacaccgataagagagccttcgtcgagacctggcagtccttttaccggaagaagcttaaggaggtgtggaaacctgccgtgcggtctggcggatctggcggaggctccacaagcatgatcgagagccagatcagcttcgaggacgtggccgtggacttcaccctggaggagtggcagctgctgaaccccacccagaagaacctgtacagggacgtgatgctggagaactacagcaacctggccttcctgggctaccagatcatcaagcccgacgccgtgttccagctggagcaggaggagcagtggatcaccgacgaggagatcctgaaccacagctgccccgaggaggtgtggctgaccagccccaagaaaaagagaaaagtctaagctgccttctgcggggcttgccttctggccatgcccttcttctctcccttgcacctgtacctcttggtctttgaataaagcctgagtaggaaggctagcaaaaaaaaaaaaaaaaaaaaaaaaaaaaaaaaaaaaaaaaaaaaaaaaaaaaaaaaaaaaaaaaaaaaaaaaaaaaaaaa

SEQ ID NO: 6945 - RNA, 5797 nt, synthetic construct
  source 1..5797: mol_type = other RNA
aggaaataagagagaaaagaagagtaagaagaaatataagagccaccatggcccctaagaagaagcgtaaagtgagccggatggaacgcctcgtctacgaggtgcggcagaagtgcagaaacatcgaggacatctgcatctcctgcggatctctgaacgtgaccctggagcacccactgttcatcggcggcatgtgccagaactgtaaaaactgttttctggagtgtgcctatcaatacgacgatgacggctaccagagctactgcaccatctgttgcggcggaagagaggtgctgatgtgtggaaataacaactgctgccggtgcttctgcgtggaatgcgtggacctgctggtgggccccggcgccgcccaggccgctattaaggaagatccttggaactgctacatgtgcggccacaagggcacatacggcctgctgagacggagagaggactggcctagcagactgcagatgttcttcgccaataaccacgaccaggagttcgacccccctaaggtgtaccctcccgtccccgccgagaagagaaagcccatccgggtcctgagcctgttcgatggcatcgccaccggtctgctggtgctgaaggacctgggcatccaggtggataggtacattgcctccgaggtgtgcgaggactccatcaccgtgggaatggtgcgtcatcagggcaagatcatgtacgtgggcgacgtgcggagcgtgacacagaagcatatccaggagtggggccctttcgacctggtgatcggcggcagcccttgcaatgacctgagcatcgtgaacccagcccggaagggcctgtacgagggaaccggcagactgttcttcgagttttacagactgctgcacgacgcccggcctaaggaaggcgacgaccggcccttcttttggctgttcgagaatgtggtggccatgggagtcagcgacaagcgggatattagccggttcctggagagcaaccccgtgatgatcgatgccaaggaagtgagcgccgcccaccgggccagatacttctggggcaatctgcctggcatgaacagacccctggccagcaccgtgaacgacaagctggagctgcaggagtgcctggagcacggccggatcgccaagttcagcaaggtgagaaccatcaccacccgaagcaacagcatcaaacaaggcaaggaccagcactttcctgtgttcatgaacgagaaggaggacatcctgtggtgtaccgagatggagagagtgttcgggttcccagtccactacacagatgtcagcaacatgtctagactggccagacagagactgctgggaagaagctggtccgtccctgtgatcagacacctgttcgcccctctgaaggagtacttcgcctgcgtgagcagcggcaacagcaacgccaacagccggggccccagcttctctagcggcctggtgccactgtccctgagagggagccacatgggccccatggagatctacaaaaccgtgagcgcctggaagcggcagcctgtgcgcgtgctgagcctgtttcggaatatcgataaagtcctgaaaagcctgggattcctggagagcggctctggctccggcggtggcaccctgaagtacgtggaggatgtgacaaacgtggtcagacgggatgtggagaagtggggccccttcgatctggtgtacggcagcacccaacccctgggcagctcttgtgaccggtgccctggctggtacatgtttcagttccaccggatcctgcagtacgccctgccgagacaggagtcccagcggccattcttttggattttcatggacaacttgctgctgaccgaggatgaccaggaaactaccactcggttcctgcagaccgaagccgtgaccctgcaggacgtgagaggccgggactaccagaacgccatgcgggtgtggtccaacatccctggactgaaaagcaagcacgcacctctgacccctaaagaagaggagtacctgcaggcccaggtgcggagcagaagcaagctggacgcccctaaggtggatctgctggtgaagaattgcctcctgcccctgagagagtacttcaagtatttcagccagaatagtctgcccctgggcggcccaagcagcggcgcccctcctcccagcggcggcagcccagccggctccccaacctctaccgaggagggcacctctgagtccgccacccccgagagcggccctggcacctccaccgagcccagcgagggcagcgcacccggcagccctgccggcagccccacctccacagaggagggaaccagcaccgagcccagcgaaggcagcgccccaggcaccagcaccgagcctagtgagggcggctctggcggcggcagcgcccaggagattaaacggatcaacaagatcagaagaagacttgtgaaagacagcaacaccaagaaggccggcaagacaggccccatgaaaaccctgctggttagagtgatgacacccgatctgagagagcggctggaaaacctgagaaagaagcctgaaaatatcccccagcccatcagcaatacatctagagccaacctgaataagctgctgaccgattacaccgaaatgaagaaggcgatcctgcatgtgtactgggaagagttccagaaggaccctgtgggcctgatgagccgggtggcccagcctgccagcaagaagatcgatcagaacaagctgaaacctgagatggacgagaagggcaacctgaccaccgccggctttgcctgctctcagtgtggccagcccctgttcgtgtacaagctggagcaggtgtctgagaagggcaaggcttacaccaactacttcggacggtgcaatgtggccgagcacgaaaagctgatcctgctggcccagctgaagcccgagaaggatagcgacgaagccgtgacatatagcctgggaaagtttgggcagagggccctggatttctacagcattcatgtgaccaaggagtccacccaccccgtgaagcccctggcccagatcgccggaaacagatacgcctccggacctgtgggaaaggccctgagcgacgcatgtatgggcacaatcgcctccttcctgtctaagtaccaggacatcatcatcgaacaccagaaggtggtgaagggcaaccagaagagactggagagcctgcgggagctggccggcaaggaaaacctggaataccctagcgtgaccctgccacctcagcctcacaccaaggagggcgttgatgcctacaacgaagtgatcgcccgggtgcgaatgtgggtgaacctgaacctgtggcagaagctgaagctaagcagagatgatgccaagcctctgctgagactgaagggattcccttcctttcctctggtcgagagacaggccaacgaagtggactggtgggacatggtgtgtaacgtgaagaagctgatcaacgagaaaaaggaggatggcaaggtgttttggcagaatctggctggctacaagagacaggaagccctgagaccatacctgagcagcgaggaagatcggaagaagggaaagaaattcgctcggtaccagctgggcgacctgctgctgcacctggaaaagaagcacggcgaggactggggaaaggtgtacgacgaggcctgggagcggattgacaagaaagtggaaggcctgagcaagcacatcaagctggaagaggaacggagaagcgaggacgcccagagcaaggccgccctgaccgactggctgcgggctaaggccagcttcgtgatcgagggcctgaaggaggccgacaaggacgagttctgcagatgcgagctgaagctgcagaagtggtacggggacctgcggggaaagcccttcgccatcgaagccgagaacagcatcctggacatcagcggcttcagcaagcagtacaactgtgccttcatctggcagaaggacggcgtgaagaagctgaacctgtacctgatcatcaactacttcaagggcggcaagctgcggttcaagaagatcaaacctgaagccttcgaagccaacagattctacaccgtgatcaacaaaaagagcggcgagatcgtgcccatggaggtgaacttcaacttcgacgaccccaacctgatcatcctgcctctggcctttggcaagagacagggcagagaattcatctggaacgacctgctgtccctggaaaccggcagcctgaagctggccaacggaagagtgatcgagaagacactgtacaacagaagaacccggcaggatgagcctgccctgttcgtggccctgaccttcgagcggcgggaggtcctggactcctccaatatcaaaccaatgaacctgatcggcgtggcaagaggcgaaaacatccccgccgtgatcgccctgaccgaccccgagggctgcccactgagccggtttaaggatagcctgggaaacccaacccacatcctgagaatcggcgagagctataaggagaagcagcggaccatccaggccaagaaggaggtggagcagcggagagccggcggctacagccggaagtacgccagcaaagccaagaatctggcagacgatatggtgagaaacaccgctagagatctgctgtactacgccgtgacccaggatgccatgctgatcttcgccaacctgagccggggcttcggccggcagggcaagcggaccttcatggccgagagacagtacacacggatggaggactggctgaccgccaagctggcctacgagggcctgagcaagacctacctgtccaagacactggcccagtacacctccaagacatgcagcaactgtgggtttaccatcaccagcgccgactacgacagggtgctggagaagctgaagaagacagcaacaggctggatgaccacaattaacggcaaggagctgaaggtggagggccagattacctactacaacagatacaagagacagaacgtagtcaaggacctgtccgtcgagctggatagactgagcgaagaatctgtgaacaacgacatctcctcctggacaaagggcagaagcggagaagctctgagcctcctgaagaaaagattctcccatagacccgtgcaggagaagttcgtgtgcctgaactgcggcttcgagacacacgcagccgagcaagccgccctgaacatcgccagatcctggctgttcctgcggagccaggagtacaagaaataccagacaaacaagacaaccggcaacaccgataagagagccttcgtcgagacctggcagtccttttaccggaagaagcttaaggaggtgtggaaacctgccgtgcggtctggcggatctggcggaggctccacaagccagatgcccgtgaagttcgaggacatcgccgtgagcttcagccaggaggagtgggagtacctggacgaggagcagaaggagctgtacagggaggtgatgaaggagaactaccagaccctgatcagcctgggcaccggcagccccagcatcacccccgacatcatcagccacatcgagaggggcgaggagccctacatcagggaggagcccggcagcgaggagagggagcccggcaggagcagcaccagccccaagaaaaagagaaaagtctaagctgccttctgcggggcttgccttctggccatgcccttcttctctcccttgcacctgtacctcttggtctttgaataaagcctgagtaggaaggctagcaaaaaaaaaaaaaaaaaaaaaaaaaaaaaaaaaaaaaaaaaaaaaaaaaaaaaaaaaaaaaaaaaaaaaaaaaaaaaaaa

SEQ ID NO: 6946 - RNA, 5797 nt, synthetic construct
  source 1..5797: mol_type = other RNA
aggaaataagagagaaaagaagagtaagaagaaatataagagccaccatggcccctaagaagaagcgtaaagtgagccggatggaacgcctcgtctacgaggtgcggcagaagtgcagaaacatcgaggacatctgcatctcctgcggatctctgaacgtgaccctggagcacccactgttcatcggcggcatgtgccagaactgtaaaaactgttttctggagtgtgcctatcaatacgacgatgacggctaccagagctactgcaccatctgttgcggcggaagagaggtgctgatgtgtggaaataacaactgctgccggtgcttctgcgtggaatgcgtggacctgctggtgggccccggcgccgcccaggccgctattaaggaagatccttggaactgctacatgtgcggccacaagggcacatacggcctgctgagacggagagaggactggcctagcagactgcagatgttcttcgccaataaccacgaccaggagttcgacccccctaaggtgtaccctcccgtccccgccgagaagagaaagcccatccgggtcctgagcctgttcgatggcatcgccaccggtctgctggtgctgaaggacctgggcatccaggtggataggtacattgcctccgaggtgtgcgaggactccatcaccgtgggaatggtgcgtcatcagggcaagatcatgtacgtgggcgacgtgcggagcgtgacacagaagcatatccaggagtggggccctttcgacctggtgatcggcggcagcccttgcaatgacctgagcatcgtgaacccagcccggaagggcctgtacgagggaaccggcagactgttcttcgagttttacagactgctgcacgacgcccggcctaaggaaggcgacgaccggcccttcttttggctgttcgagaatgtggtggccatgggagtcagcgacaagcgggatattagccggttcctggagagcaaccccgtgatgatcgatgccaaggaagtgagcgccgcccaccgggccagatacttctggggcaatctgcctggcatgaacagacccctggccagcaccgtgaacgacaagctggagctgcaggagtgcctggagcacggccggatcgccaagttcagcaaggtgagaaccatcaccacccgaagcaacagcatcaaacaaggcaaggaccagcactttcctgtgttcatgaacgagaaggaggacatcctgtggtgtaccgagatggagagagtgttcgggttcccagtccactacacagatgtcagcaacatgtctagactggccagacagagactgctgggaagaagctggtccgtccctgtgatcagacacctgttcgcccctctgaaggagtacttcgcctgcgtgagcagcggcaacagcaacgccaacagccggggccccagcttctctagcggcctggtgccactgtccctgagagggagccacatgggccccatggagatctacaaaaccgtgagcgcctggaagcggcagcctgtgcgcgtgctgagcctgtttcggaatatcgataaagtcctgaaaagcctgggattcctggagagcggctctggctccggcggtggcaccctgaagtacgtggaggatgtgacaaacgtggtcagacgggatgtggagaagtggggccccttcgatctggtgtacggcagcacccaacccctgggcagctcttgtgaccggtgccctggctggtacatgtttcagttccaccggatcctgcagtacgccctgccgagacaggagtcccagcggccattcttttggattttcatggacaacttgctgctgaccgaggatgaccaggaaactaccactcggttcctgcagaccgaagccgtgaccctgcaggacgtgagaggccgggactaccagaacgccatgcgggtgtggtccaacatccctggactgaaaagcaagcacgcacctctgacccctaaagaagaggagtacctgcaggcccaggtgcggagcagaagcaagctggacgcccctaaggtggatctgctggtgaagaattgcctcctgcccctgagagagtacttcaagtatttcagccagaatagtctgcccctgggcggcccaagcagcggcgcccctcctcccagcggcggcagcccagccggctccccaacctctaccgaggagggcacctctgagtccgccacccccgagagcggccctggcacctccaccgagcccagcgagggcagcgcacccggcagccctgccggcagccccacctccacagaggagggaaccagcaccgagcccagcgaaggcagcgccccaggcaccagcaccgagcctagtgagggcggctctggcggcggcagcgcccaggagattaaacggatcaacaagatcagaagaagacttgtgaaagacagcaacaccaagaaggccggcaagacaggccccatgaaaaccctgctggttagagtgatgacacccgatctgagagagcggctggaaaacctgagaaagaagcctgaaaatatcccccagcccatcagcaatacatctagagccaacctgaataagctgctgaccgattacaccgaaatgaagaaggcgatcctgcatgtgtactgggaagagttccagaaggaccctgtgggcctgatgagccgggtggcccagcctgccagcaagaagatcgatcagaacaagctgaaacctgagatggacgagaagggcaacctgaccaccgccggctttgcctgctctcagtgtggccagcccctgttcgtgtacaagctggagcaggtgtctgagaagggcaaggcttacaccaactacttcggacggtgcaatgtggccgagcacgaaaagctgatcctgctggcccagctgaagcccgagaaggatagcgacgaagccgtgacatatagcctgggaaagtttgggcagagggccctggatttctacagcattcatgtgaccaaggagtccacccaccccgtgaagcccctggcccagatcgccggaaacagatacgcctccggacctgtgggaaaggccctgagcgacgcatgtatgggcacaatcgcctccttcctgtctaagtaccaggacatcatcatcgaacaccagaaggtggtgaagggcaaccagaagagactggagagcctgcgggagctggccggcaaggaaaacctggaataccctagcgtgaccctgccacctcagcctcacaccaaggagggcgttgatgcctacaacgaagtgatcgcccgggtgcgaatgtgggtgaacctgaacctgtggcagaagctgaagctaagcagagatgatgccaagcctctgctgagactgaagggattcccttcctttcctctggtcgagagacaggccaacgaagtggactggtgggacatggtgtgtaacgtgaagaagctgatcaacgagaaaaaggaggatggcaaggtgttttggcagaatctggctggctacaagagacaggaagccctgagaccatacctgagcagcgaggaagatcggaagaagggaaagaaattcgctcggtaccagctgggcgacctgctgctgcacctggaaaagaagcacggcgaggactggggaaaggtgtacgacgaggcctgggagcggattgacaagaaagtggaaggcctgagcaagcacatcaagctggaagaggaacggagaagcgaggacgcccagagcaaggccgccctgaccgactggctgcgggctaaggccagcttcgtgatcgagggcctgaaggaggccgacaaggacgagttctgcagatgcgagctgaagctgcagaagtggtacggggacctgcggggaaagcccttcgccatcgaagccgagaacagcatcctggacatcagcggcttcagcaagcagtacaactgtgccttcatctggcagaaggacggcgtgaagaagctgaacctgtacctgatcatcaactacttcaagggcggcaagctgcggttcaagaagatcaaacctgaagccttcgaagccaacagattctacaccgtgatcaacaaaaagagcggcgagatcgtgcccatggaggtgaacttcaacttcgacgaccccaacctgatcatcctgcctctggcctttggcaagagacagggcagagaattcatctggaacgacctgctgtccctggaaaccggcagcctgaagctggccaacggaagagtgatcgagaagacactgtacaacagaagaacccggcaggatgagcctgccctgttcgtggccctgaccttcgagcggcgggaggtcctggactcctccaatatcaaaccaatgaacctgatcggcgtggcaagaggcgaaaacatccccgccgtgatcgccctgaccgaccccgagggctgcccactgagccggtttaaggatagcctgggaaacccaacccacatcctgagaatcggcgagagctataaggagaagcagcggaccatccaggccaagaaggaggtggagcagcggagagccggcggctacagccggaagtacgccagcaaagccaagaatctggcagacgatatggtgagaaacaccgctagagatctgctgtactacgccgtgacccaggatgccatgctgatcttcgccaacctgagccggggcttcggccggcagggcaagcggaccttcatggccgagagacagtacacacggatggaggactggctgaccgccaagctggcctacgagggcctgagcaagacctacctgtccaagacactggcccagtacacctccaagacatgcagcaactgtgggtttaccatcaccagcgccgactacgacagggtgctggagaagctgaagaagacagcaacaggctggatgaccacaattaacggcaaggagctgaaggtggagggccagattacctactacaacagatacaagagacagaacgtagtcaaggacctgtccgtcgagctggatagactgagcgaagaatctgtgaacaacgacatctcctcctggacaaagggcagaagcggagaagctctgagcctcctgaagaaaagattctcccatagacccgtgcaggagaagttcgtgtgcctgaactgcggcttcgagacacacgcagccgagcaagccgccctgaacatcgccagatcctggctgttcctgcggagccaggagtacaagaaataccagacaaacaagacaaccggcaacaccgataagagagccttcgtcgagacctggcagtccttttaccggaagaagcttaaggaggtgtggaaacctgccgtgcggtctggcggatctggcggaggctccacaagccaccaggaggtggtgaccttcgaggacgtggccgtgtacttcacccagaccgagtgggccggcctgagccccgcccagagggccctgtacaggagcgtgatgctggagatctacggcaacctgaccagcctgggctaccccgtgcccaagcccgccctggtgagcctgctggagaggggcgacctgccctggggcctggagacccaggacgacccccccgcccagggcaccaagcacatctgcaccagccccaagaaaaagagaaaagtctaagctgccttctgcggggcttgccttctggccatgcccttcttctctcccttgcacctgtacctcttggtctttgaataaagcctgagtaggaaggctagcaaaaaaaaaaaaaaaaaaaaaaaaaaaaaaaaaaaaaaaaaaaaaaaaaaaaaaaaaaaaaaaaaaaaaaaaaaaaaaaa

SEQ ID NO: 6947 - RNA, 5797 nt, synthetic construct
  source 1..5797: mol_type = other RNA
aggaaataagagagaaaagaagagtaagaagaaatataagagccaccatggcccctaagaagaagcgtaaagtgagccggatggaacgcctcgtctacgaggtgcggcagaagtgcagaaacatcgaggacatctgcatctcctgcggatctctgaacgtgaccctggagcacccactgttcatcggcggcatgtgccagaactgtaaaaactgttttctggagtgtgcctatcaatacgacgatgacggctaccagagctactgcaccatctgttgcggcggaagagaggtgctgatgtgtggaaataacaactgctgccggtgcttctgcgtggaatgcgtggacctgctggtgggccccggcgccgcccaggccgctattaaggaagatccttggaactgctacatgtgcggccacaagggcacatacggcctgctgagacggagagaggactggcctagcagactgcagatgttcttcgccaataaccacgaccaggagttcgacccccctaaggtgtaccctcccgtccccgccgagaagagaaagcccatccgggtcctgagcctgttcgatggcatcgccaccggtctgctggtgctgaaggacctgggcatccaggtggataggtacattgcctccgaggtgtgcgaggactccatcaccgtgggaatggtgcgtcatcagggcaagatcatgtacgtgggcgacgtgcggagcgtgacacagaagcatatccaggagtggggccctttcgacctggtgatcggcggcagcccttgcaatgacctgagcatcgtgaacccagcccggaagggcctgtacgagggaaccggcagactgttcttcgagttttacagactgctgcacgacgcccggcctaaggaaggcgacgaccggcccttcttttggctgttcgagaatgtggtggccatgggagtcagcgacaagcgggatattagccggttcctggagagcaaccccgtgatgatcgatgccaaggaagtgagcgccgcccaccgggccagatacttctggggcaatctgcctggcatgaacagacccctggccagcaccgtgaacgacaagctggagctgcaggagtgcctggagcacggccggatcgccaagttcagcaaggtgagaaccatcaccacccgaagcaacagcatcaaacaaggcaaggaccagcactttcctgtgttcatgaacgagaaggaggacatcctgtggtgtaccgagatggagagagtgttcgggttcccagtccactacacagatgtcagcaacatgtctagactggccagacagagactgctgggaagaagctggtccgtccctgtgatcagacacctgttcgcccctctgaaggagtacttcgcctgcgtgagcagcggcaacagcaacgccaacagccggggccccagcttctctagcggcctggtgccactgtccctgagagggagccacatgggccccatggagatctacaaaaccgtgagcgcctggaagcggcagcctgtgcgcgtgctgagcctgtttcggaatatcgataaagtcctgaaaagcctgggattcctggagagcggctctggctccggcggtggcaccctgaagtacgtggaggatgtgacaaacgtggtcagacgggatgtggagaagtggggccccttcgatctggtgtacggcagcacccaacccctgggcagctcttgtgaccggtgccctggctggtacatgtttcagttccaccggatcctgcagtacgccctgccgagacaggagtcccagcggccattcttttggattttcatggacaacttgctgctgaccgaggatgaccaggaaactaccactcggttcctgcagaccgaagccgtgaccctgcaggacgtgagaggccgggactaccagaacgccatgcgggtgtggtccaacatccctggactgaaaagcaagcacgcacctctgacccctaaagaagaggagtacctgcaggcccaggtgcggagcagaagcaagctggacgcccctaaggtggatctgctggtgaagaattgcctcctgcccctgagagagtacttcaagtatttcagccagaatagtctgcccctgggcggcccaagcagcggcgcccctcctcccagcggcggcagcccagccggctccccaacctctaccgaggagggcacctctgagtccgccacccccgagagcggccctggcacctccaccgagcccagcgagggcagcgcacccggcagccctgccggcagccccacctccacagaggagggaaccagcaccgagcccagcgaaggcagcgccccaggcaccagcaccgagcctagtgagggcggctctggcggcggcagcgcccaggagattaaacggatcaacaagatcagaagaagacttgtgaaagacagcaacaccaagaaggccggcaagacaggccccatgaaaaccctgctggttagagtgatgacacccgatctgagagagcggctggaaaacctgagaaagaagcctgaaaatatcccccagcccatcagcaatacatctagagccaacctgaataagctgctgaccgattacaccgaaatgaagaaggcgatcctgcatgtgtactgggaagagttccagaaggaccctgtgggcctgatgagccgggtggcccagcctgccagcaagaagatcgatcagaacaagctgaaacctgagatggacgagaagggcaacctgaccaccgccggctttgcctgctctcagtgtggccagcccctgttcgtgtacaagctggagcaggtgtctgagaagggcaaggcttacaccaactacttcggacggtgcaatgtggccgagcacgaaaagctgatcctgctggcccagctgaagcccgagaaggatagcgacgaagccgtgacatatagcctgggaaagtttgggcagagggccctggatttctacagcattcatgtgaccaaggagtccacccaccccgtgaagcccctggcccagatcgccggaaacagatacgcctccggacctgtgggaaaggccctgagcgacgcatgtatgggcacaatcgcctccttcctgtctaagtaccaggacatcatcatcgaacaccagaaggtggtgaagggcaaccagaagagactggagagcctgcgggagctggccggcaaggaaaacctggaataccctagcgtgaccctgccacctcagcctcacaccaaggagggcgttgatgcctacaacgaagtgatcgcccgggtgcgaatgtgggtgaacctgaacctgtggcagaagctgaagctaagcagagatgatgccaagcctctgctgagactgaagggattcccttcctttcctctggtcgagagacaggccaacgaagtggactggtgggacatggtgtgtaacgtgaagaagctgatcaacgagaaaaaggaggatggcaaggtgttttggcagaatctggctggctacaagagacaggaagccctgagaccatacctgagcagcgaggaagatcggaagaagggaaagaaattcgctcggtaccagctgggcgacctgctgctgcacctggaaaagaagcacggcgaggactggggaaaggtgtacgacgaggcctgggagcggattgacaagaaagtggaaggcctgagcaagcacatcaagctggaagaggaacggagaagcgaggacgcccagagcaaggccgccctgaccgactggctgcgggctaaggccagcttcgtgatcgagggcctgaaggaggccgacaaggacgagttctgcagatgcgagctgaagctgcagaagtggtacggggacctgcggggaaagcccttcgccatcgaagccgagaacagcatcctggacatcagcggcttcagcaagcagtacaactgtgccttcatctggcagaaggacggcgtgaagaagctgaacctgtacctgatcatcaactacttcaagggcggcaagctgcggttcaagaagatcaaacctgaagccttcgaagccaacagattctacaccgtgatcaacaaaaagagcggcgagatcgtgcccatggaggtgaacttcaacttcgacgaccccaacctgatcatcctgcctctggcctttggcaagagacagggcagagaattcatctggaacgacctgctgtccctggaaaccggcagcctgaagctggccaacggaagagtgatcgagaagacactgtacaacagaagaacccggcaggatgagcctgccctgttcgtggccctgaccttcgagcggcgggaggtcctggactcctccaatatcaaaccaatgaacctgatcggcgtggcaagaggcgaaaacatccccgccgtgatcgccctgaccgaccccgagggctgcccactgagccggtttaaggatagcctgggaaacccaacccacatcctgagaatcggcgagagctataaggagaagcagcggaccatccaggccaagaaggaggtggagcagcggagagccggcggctacagccggaagtacgccagcaaagccaagaatctggcagacgatatggtgagaaacaccgctagagatctgctgtactacgccgtgacccaggatgccatgctgatcttcgccaacctgagccggggcttcggccggcagggcaagcggaccttcatggccgagagacagtacacacggatggaggactggctgaccgccaagctggcctacgagggcctgagcaagacctacctgtccaagacactggcccagtacacctccaagacatgcagcaactgtgggtttaccatcaccagcgccgactacgacagggtgctggagaagctgaagaagacagcaacaggctggatgaccacaattaacggcaaggagctgaaggtggagggccagattacctactacaacagatacaagagacagaacgtagtcaaggacctgtccgtcgagctggatagactgagcgaagaatctgtgaacaacgacatctcctcctggacaaagggcagaagcggagaagctctgagcctcctgaagaaaagattctcccatagacccgtgcaggagaagttcgtgtgcctgaactgcggcttcgagacacacgcagccgagcaagccgccctgaacatcgccagatcctggctgttcctgcggagccaggagtacaagaaataccagacaaacaagacaaccggcaacaccgataagagagccttcgtcgagacctggcagtccttttaccggaagaagcttaaggaggtgtggaaacctgccgtgcggtctggcggatctggcggaggctccacaagcagcctggagagcgacctgttcagggacgtggccgtggtgttcagccaggaggagtgggagcagctggtgcccacccagagggacctgtacagggacgtgatgctggagacctacaacaacctggtgagcctgggcctggccatcagcaagcccgacgtgatcagcttcctggagcagggcaaggagccctggatggtggagaaggccgccaccggcggcctgtgccccgtgctggagagcaggaccagccccaagaaaaagagaaaagtctaagctgccttctgcggggcttgccttctggccatgcccttcttctctcccttgcacctgtacctcttggtctttgaataaagcctgagtaggaaggctagcaaaaaaaaaaaaaaaaaaaaaaaaaaaaaaaaaaaaaaaaaaaaaaaaaaaaaaaaaaaaaaaaaaaaaaaaaaaaaaaa

SEQ ID NO: 6948 - RNA, 5797 nt, synthetic construct
  source 1..5797: mol_type = other RNA
aggaaataagagagaaaagaagagtaagaagaaatataagagccaccatggcccctaagaagaagcgtaaagtgagccggatggaacgcctcgtctacgaggtgcggcagaagtgcagaaacatcgaggacatctgcatctcctgcggatctctgaacgtgaccctggagcacccactgttcatcggcggcatgtgccagaactgtaaaaactgttttctggagtgtgcctatcaatacgacgatgacggctaccagagctactgcaccatctgttgcggcggaagagaggtgctgatgtgtggaaataacaactgctgccggtgcttctgcgtggaatgcgtggacctgctggtgggccccggcgccgcccaggccgctattaaggaagatccttggaactgctacatgtgcggccacaagggcacatacggcctgctgagacggagagaggactggcctagcagactgcagatgttcttcgccaataaccacgaccaggagttcgacccccctaaggtgtaccctcccgtccccgccgagaagagaaagcccatccgggtcctgagcctgttcgatggcatcgccaccggtctgctggtgctgaaggacctgggcatccaggtggataggtacattgcctccgaggtgtgcgaggactccatcaccgtgggaatggtgcgtcatcagggcaagatcatgtacgtgggcgacgtgcggagcgtgacacagaagcatatccaggagtggggccctttcgacctggtgatcggcggcagcccttgcaatgacctgagcatcgtgaacccagcccggaagggcctgtacgagggaaccggcagactgttcttcgagttttacagactgctgcacgacgcccggcctaaggaaggcgacgaccggcccttcttttggctgttcgagaatgtggtggccatgggagtcagcgacaagcgggatattagccggttcctggagagcaaccccgtgatgatcgatgccaaggaagtgagcgccgcccaccgggccagatacttctggggcaatctgcctggcatgaacagacccctggccagcaccgtgaacgacaagctggagctgcaggagtgcctggagcacggccggatcgccaagttcagcaaggtgagaaccatcaccacccgaagcaacagcatcaaacaaggcaaggaccagcactttcctgtgttcatgaacgagaaggaggacatcctgtggtgtaccgagatggagagagtgttcgggttcccagtccactacacagatgtcagcaacatgtctagactggccagacagagactgctgggaagaagctggtccgtccctgtgatcagacacctgttcgcccctctgaaggagtacttcgcctgcgtgagcagcggcaacagcaacgccaacagccggggccccagcttctctagcggcctggtgccactgtccctgagagggagccacatgggccccatggagatctacaaaaccgtgagcgcctggaagcggcagcctgtgcgcgtgctgagcctgtttcggaatatcgataaagtcctgaaaagcctgggattcctggagagcggctctggctccggcggtggcaccctgaagtacgtggaggatgtgacaaacgtggtcagacgggatgtggagaagtggggccccttcgatctggtgtacggcagcacccaacccctgggcagctcttgtgaccggtgccctggctggtacatgtttcagttccaccggatcctgcagtacgccctgccgagacaggagtcccagcggccattcttttggattttcatggacaacttgctgctgaccgaggatgaccaggaaactaccactcggttcctgcagaccgaagccgtgaccctgcaggacgtgagaggccgggactaccagaacgccatgcgggtgtggtccaacatccctggactgaaaagcaagcacgcacctctgacccctaaagaagaggagtacctgcaggcccaggtgcggagcagaagcaagctggacgcccctaaggtggatctgctggtgaagaattgcctcctgcccctgagagagtacttcaagtatttcagccagaatagtctgcccctgggcggcccaagcagcggcgcccctcctcccagcggcggcagcccagccggctccccaacctctaccgaggagggcacctctgagtccgccacccccgagagcggccctggcacctccaccgagcccagcgagggcagcgcacccggcagccctgccggcagccccacctccacagaggagggaaccagcaccgagcccagcgaaggcagcgccccaggcaccagcaccgagcctagtgagggcggctctggcggcggcagcgcccaggagattaaacggatcaacaagatcagaagaagacttgtgaaagacagcaacaccaagaaggccggcaagacaggccccatgaaaaccctgctggttagagtgatgacacccgatctgagagagcggctggaaaacctgagaaagaagcctgaaaatatcccccagcccatcagcaatacatctagagccaacctgaataagctgctgaccgattacaccgaaatgaagaaggcgatcctgcatgtgtactgggaagagttccagaaggaccctgtgggcctgatgagccgggtggcccagcctgccagcaagaagatcgatcagaacaagctgaaacctgagatggacgagaagggcaacctgaccaccgccggctttgcctgctctcagtgtggccagcccctgttcgtgtacaagctggagcaggtgtctgagaagggcaaggcttacaccaactacttcggacggtgcaatgtggccgagcacgaaaagctgatcctgctggcccagctgaagcccgagaaggatagcgacgaagccgtgacatatagcctgggaaagtttgggcagagggccctggatttctacagcattcatgtgaccaaggagtccacccaccccgtgaagcccctggcccagatcgccggaaacagatacgcctccggacctgtgggaaaggccctgagcgacgcatgtatgggcacaatcgcctccttcctgtctaagtaccaggacatcatcatcgaacaccagaaggtggtgaagggcaaccagaagagactggagagcctgcgggagctggccggcaaggaaaacctggaataccctagcgtgaccctgccacctcagcctcacaccaaggagggcgttgatgcctacaacgaagtgatcgcccgggtgcgaatgtgggtgaacctgaacctgtggcagaagctgaagctaagcagagatgatgccaagcctctgctgagactgaagggattcccttcctttcctctggtcgagagacaggccaacgaagtggactggtgggacatggtgtgtaacgtgaagaagctgatcaacgagaaaaaggaggatggcaaggtgttttggcagaatctggctggctacaagagacaggaagccctgagaccatacctgagcagcgaggaagatcggaagaagggaaagaaattcgctcggtaccagctgggcgacctgctgctgcacctggaaaagaagcacggcgaggactggggaaaggtgtacgacgaggcctgggagcggattgacaagaaagtggaaggcctgagcaagcacatcaagctggaagaggaacggagaagcgaggacgcccagagcaaggccgccctgaccgactggctgcgggctaaggccagcttcgtgatcgagggcctgaaggaggccgacaaggacgagttctgcagatgcgagctgaagctgcagaagtggtacggggacctgcggggaaagcccttcgccatcgaagccgagaacagcatcctggacatcagcggcttcagcaagcagtacaactgtgccttcatctggcagaaggacggcgtgaagaagctgaacctgtacctgatcatcaactacttcaagggcggcaagctgcggttcaagaagatcaaacctgaagccttcgaagccaacagattctacaccgtgatcaacaaaaagagcggcgagatcgtgcccatggaggtgaacttcaacttcgacgaccccaacctgatcatcctgcctctggcctttggcaagagacagggcagagaattcatctggaacgacctgctgtccctggaaaccggcagcctgaagctggccaacggaagagtgatcgagaagacactgtacaacagaagaacccggcaggatgagcctgccctgttcgtggccctgaccttcgagcggcgggaggtcctggactcctccaatatcaaaccaatgaacctgatcggcgtggcaagaggcgaaaacatccccgccgtgatcgccctgaccgaccccgagggctgcccactgagccggtttaaggatagcctgggaaacccaacccacatcctgagaatcggcgagagctataaggagaagcagcggaccatccaggccaagaaggaggtggagcagcggagagccggcggctacagccggaagtacgccagcaaagccaagaatctggcagacgatatggtgagaaacaccgctagagatctgctgtactacgccgtgacccaggatgccatgctgatcttcgccaacctgagccggggcttcggccggcagggcaagcggaccttcatggccgagagacagtacacacggatggaggactggctgaccgccaagctggcctacgagggcctgagcaagacctacctgtccaagacactggcccagtacacctccaagacatgcagcaactgtgggtttaccatcaccagcgccgactacgacagggtgctggagaagctgaagaagacagcaacaggctggatgaccacaattaacggcaaggagctgaaggtggagggccagattacctactacaacagatacaagagacagaacgtagtcaaggacctgtccgtcgagctggatagactgagcgaagaatctgtgaacaacgacatctcctcctggacaaagggcagaagcggagaagctctgagcctcctgaagaaaagattctcccatagacccgtgcaggagaagttcgtgtgcctgaactgcggcttcgagacacacgcagccgagcaagccgccctgaacatcgccagatcctggctgttcctgcggagccaggagtacaagaaataccagacaaacaagacaaccggcaacaccgataagagagccttcgtcgagacctggcagtccttttaccggaagaagcttaaggaggtgtggaaacctgccgtgcggtctggcggatctggcggaggctccacaagccaggccggcagcgacctgttcagggacgtggccgtggtgttcagccaggaggagtgggagcagctggcccccacccagagggacctgtacagggacgtgatgctggagacctacagcaacctggtgagcctgggcctggccgtgagcaagcccgacgtgatcagcttcctggagcagggcaaggagccctggaccgtggagggcgtggccaccggcggcctgtgccccgtgctgaagagcaggaccagccccaagaaaaagagaaaagtctaagctgccttctgcggggcttgccttctggccatgcccttcttctctcccttgcacctgtacctcttggtctttgaataaagcctgagtaggaaggctagcaaaaaaaaaaaaaaaaaaaaaaaaaaaaaaaaaaaaaaaaaaaaaaaaaaaaaaaaaaaaaaaaaaaaaaaaaaaaaaaa

SEQ ID NO: 6949 - RNA, 5797 nt, synthetic construct
  source 1..5797: mol_type = other RNA
aggaaataagagagaaaagaagagtaagaagaaatataagagccaccatggcccctaagaagaagcgtaaagtgagccggatggaacgcctcgtctacgaggtgcggcagaagtgcagaaacatcgaggacatctgcatctcctgcggatctctgaacgtgaccctggagcacccactgttcatcggcggcatgtgccagaactgtaaaaactgttttctggagtgtgcctatcaatacgacgatgacggctaccagagctactgcaccatctgttgcggcggaagagaggtgctgatgtgtggaaataacaactgctgccggtgcttctgcgtggaatgcgtggacctgctggtgggccccggcgccgcccaggccgctattaaggaagatccttggaactgctacatgtgcggccacaagggcacatacggcctgctgagacggagagaggactggcctagcagactgcagatgttcttcgccaataaccacgaccaggagttcgacccccctaaggtgtaccctcccgtccccgccgagaagagaaagcccatccgggtcctgagcctgttcgatggcatcgccaccggtctgctggtgctgaaggacctgggcatccaggtggataggtacattgcctccgaggtgtgcgaggactccatcaccgtgggaatggtgcgtcatcagggcaagatcatgtacgtgggcgacgtgcggagcgtgacacagaagcatatccaggagtggggccctttcgacctggtgatcggcggcagcccttgcaatgacctgagcatcgtgaacccagcccggaagggcctgtacgagggaaccggcagactgttcttcgagttttacagactgctgcacgacgcccggcctaaggaaggcgacgaccggcccttcttttggctgttcgagaatgtggtggccatgggagtcagcgacaagcgggatattagccggttcctggagagcaaccccgtgatgatcgatgccaaggaagtgagcgccgcccaccgggccagatacttctggggcaatctgcctggcatgaacagacccctggccagcaccgtgaacgacaagctggagctgcaggagtgcctggagcacggccggatcgccaagttcagcaaggtgagaaccatcaccacccgaagcaacagcatcaaacaaggcaaggaccagcactttcctgtgttcatgaacgagaaggaggacatcctgtggtgtaccgagatggagagagtgttcgggttcccagtccactacacagatgtcagcaacatgtctagactggccagacagagactgctgggaagaagctggtccgtccctgtgatcagacacctgttcgcccctctgaaggagtacttcgcctgcgtgagcagcggcaacagcaacgccaacagccggggccccagcttctctagcggcctggtgccactgtccctgagagggagccacatgggccccatggagatctacaaaaccgtgagcgcctggaagcggcagcctgtgcgcgtgctgagcctgtttcggaatatcgataaagtcctgaaaagcctgggattcctggagagcggctctggctccggcggtggcaccctgaagtacgtggaggatgtgacaaacgtggtcagacgggatgtggagaagtggggccccttcgatctggtgtacggcagcacccaacccctgggcagctcttgtgaccggtgccctggctggtacatgtttcagttccaccggatcctgcagtacgccctgccgagacaggagtcccagcggccattcttttggattttcatggacaacttgctgctgaccgaggatgaccaggaaactaccactcggttcctgcagaccgaagccgtgaccctgcaggacgtgagaggccgggactaccagaacgccatgcgggtgtggtccaacatccctggactgaaaagcaagcacgcacctctgacccctaaagaagaggagtacctgcaggcccaggtgcggagcagaagcaagctggacgcccctaaggtggatctgctggtgaagaattgcctcctgcccctgagagagtacttcaagtatttcagccagaatagtctgcccctgggcggcccaagcagcggcgcccctcctcccagcggcggcagcccagccggctccccaacctctaccgaggagggcacctctgagtccgccacccccgagagcggccctggcacctccaccgagcccagcgagggcagcgcacccggcagccctgccggcagccccacctccacagaggagggaaccagcaccgagcccagcgaaggcagcgccccaggcaccagcaccgagcctagtgagggcggctctggcggcggcagcgcccaggagattaaacggatcaacaagatcagaagaagacttgtgaaagacagcaacaccaagaaggccggcaagacaggccccatgaaaaccctgctggttagagtgatgacacccgatctgagagagcggctggaaaacctgagaaagaagcctgaaaatatcccccagcccatcagcaatacatctagagccaacctgaataagctgctgaccgattacaccgaaatgaagaaggcgatcctgcatgtgtactgggaagagttccagaaggaccctgtgggcctgatgagccgggtggcccagcctgccagcaagaagatcgatcagaacaagctgaaacctgagatggacgagaagggcaacctgaccaccgccggctttgcctgctctcagtgtggccagcccctgttcgtgtacaagctggagcaggtgtctgagaagggcaaggcttacaccaactacttcggacggtgcaatgtggccgagcacgaaaagctgatcctgctggcccagctgaagcccgagaaggatagcgacgaagccgtgacatatagcctgggaaagtttgggcagagggccctggatttctacagcattcatgtgaccaaggagtccacccaccccgtgaagcccctggcccagatcgccggaaacagatacgcctccggacctgtgggaaaggccctgagcgacgcatgtatgggcacaatcgcctccttcctgtctaagtaccaggacatcatcatcgaacaccagaaggtggtgaagggcaaccagaagagactggagagcctgcgggagctggccggcaaggaaaacctggaataccctagcgtgaccctgccacctcagcctcacaccaaggagggcgttgatgcctacaacgaagtgatcgcccgggtgcgaatgtgggtgaacctgaacctgtggcagaagctgaagctaagcagagatgatgccaagcctctgctgagactgaagggattcccttcctttcctctggtcgagagacaggccaacgaagtggactggtgggacatggtgtgtaacgtgaagaagctgatcaacgagaaaaaggaggatggcaaggtgttttggcagaatctggctggctacaagagacaggaagccctgagaccatacctgagcagcgaggaagatcggaagaagggaaagaaattcgctcggtaccagctgggcgacctgctgctgcacctggaaaagaagcacggcgaggactggggaaaggtgtacgacgaggcctgggagcggattgacaagaaagtggaaggcctgagcaagcacatcaagctggaagaggaacggagaagcgaggacgcccagagcaaggccgccctgaccgactggctgcgggctaaggccagcttcgtgatcgagggcctgaaggaggccgacaaggacgagttctgcagatgcgagctgaagctgcagaagtggtacggggacctgcggggaaagcccttcgccatcgaagccgagaacagcatcctggacatcagcggcttcagcaagcagtacaactgtgccttcatctggcagaaggacggcgtgaagaagctgaacctgtacctgatcatcaactacttcaagggcggcaagctgcggttcaagaagatcaaacctgaagccttcgaagccaacagattctacaccgtgatcaacaaaaagagcggcgagatcgtgcccatggaggtgaacttcaacttcgacgaccccaacctgatcatcctgcctctggcctttggcaagagacagggcagagaattcatctggaacgacctgctgtccctggaaaccggcagcctgaagctggccaacggaagagtgatcgagaagacactgtacaacagaagaacccggcaggatgagcctgccctgttcgtggccctgaccttcgagcggcgggaggtcctggactcctccaatatcaaaccaatgaacctgatcggcgtggcaagaggcgaaaacatccccgccgtgatcgccctgaccgaccccgagggctgcccactgagccggtttaaggatagcctgggaaacccaacccacatcctgagaatcggcgagagctataaggagaagcagcggaccatccaggccaagaaggaggtggagcagcggagagccggcggctacagccggaagtacgccagcaaagccaagaatctggcagacgatatggtgagaaacaccgctagagatctgctgtactacgccgtgacccaggatgccatgctgatcttcgccaacctgagccggggcttcggccggcagggcaagcggaccttcatggccgagagacagtacacacggatggaggactggctgaccgccaagctggcctacgagggcctgagcaagacctacctgtccaagacactggcccagtacacctccaagacatgcagcaactgtgggtttaccatcaccagcgccgactacgacagggtgctggagaagctgaagaagacagcaacaggctggatgaccacaattaacggcaaggagctgaaggtggagggccagattacctactacaacagatacaagagacagaacgtagtcaaggacctgtccgtcgagctggatagactgagcgaagaatctgtgaacaacgacatctcctcctggacaaagggcagaagcggagaagctctgagcctcctgaagaaaagattctcccatagacccgtgcaggagaagttcgtgtgcctgaactgcggcttcgagacacacgcagccgagcaagccgccctgaacatcgccagatcctggctgttcctgcggagccaggagtacaagaaataccagacaaacaagacaaccggcaacaccgataagagagccttcgtcgagacctggcagtccttttaccggaagaagcttaaggaggtgtggaaacctgccgtgcggtctggcggatctggcggaggctccacaagcagccaggagcccgtgaccttcgccgacgtggccgtggtgttcacccccgaggagtgggtgttcctggacagcacccagaggagcctgtacagggacgtgatgctggagaactacaggaacctggccagcgtggccggcgaccagctgaggaagcccaacgccagcagcgacctggagcagaggggcgagcagtggaacaccgagaggggcgtgatcagcgacacctgccccgagccccagctgaccagccccaagaaaaagagaaaagtctaagctgccttctgcggggcttgccttctggccatgcccttcttctctcccttgcacctgtacctcttggtctttgaataaagcctgagtaggaaggctagcaaaaaaaaaaaaaaaaaaaaaaaaaaaaaaaaaaaaaaaaaaaaaaaaaaaaaaaaaaaaaaaaaaaaaaaaaaaaaaaa

SEQ ID NO: 6950 - RNA, 5797 nt, synthetic construct
  source 1..5797: mol_type = other RNA
aggaaataagagagaaaagaagagtaagaagaaatataagagccaccatggcccctaagaagaagcgtaaagtgagccggatggaacgcctcgtctacgaggtgcggcagaagtgcagaaacatcgaggacatctgcatctcctgcggatctctgaacgtgaccctggagcacccactgttcatcggcggcatgtgccagaactgtaaaaactgttttctggagtgtgcctatcaatacgacgatgacggctaccagagctactgcaccatctgttgcggcggaagagaggtgctgatgtgtggaaataacaactgctgccggtgcttctgcgtggaatgcgtggacctgctggtgggccccggcgccgcccaggccgctattaaggaagatccttggaactgctacatgtgcggccacaagggcacatacggcctgctgagacggagagaggactggcctagcagactgcagatgttcttcgccaataaccacgaccaggagttcgacccccctaaggtgtaccctcccgtccccgccgagaagagaaagcccatccgggtcctgagcctgttcgatggcatcgccaccggtctgctggtgctgaaggacctgggcatccaggtggataggtacattgcctccgaggtgtgcgaggactccatcaccgtgggaatggtgcgtcatcagggcaagatcatgtacgtgggcgacgtgcggagcgtgacacagaagcatatccaggagtggggccctttcgacctggtgatcggcggcagcccttgcaatgacctgagcatcgtgaacccagcccggaagggcctgtacgagggaaccggcagactgttcttcgagttttacagactgctgcacgacgcccggcctaaggaaggcgacgaccggcccttcttttggctgttcgagaatgtggtggccatgggagtcagcgacaagcgggatattagccggttcctggagagcaaccccgtgatgatcgatgccaaggaagtgagcgccgcccaccgggccagatacttctggggcaatctgcctggcatgaacagacccctggccagcaccgtgaacgacaagctggagctgcaggagtgcctggagcacggccggatcgccaagttcagcaaggtgagaaccatcaccacccgaagcaacagcatcaaacaaggcaaggaccagcactttcctgtgttcatgaacgagaaggaggacatcctgtggtgtaccgagatggagagagtgttcgggttcccagtccactacacagatgtcagcaacatgtctagactggccagacagagactgctgggaagaagctggtccgtccctgtgatcagacacctgttcgcccctctgaaggagtacttcgcctgcgtgagcagcggcaacagcaacgccaacagccggggccccagcttctctagcggcctggtgccactgtccctgagagggagccacatgggccccatggagatctacaaaaccgtgagcgcctggaagcggcagcctgtgcgcgtgctgagcctgtttcggaatatcgataaagtcctgaaaagcctgggattcctggagagcggctctggctccggcggtggcaccctgaagtacgtggaggatgtgacaaacgtggtcagacgggatgtggagaagtggggccccttcgatctggtgtacggcagcacccaacccctgggcagctcttgtgaccggtgccctggctggtacatgtttcagttccaccggatcctgcagtacgccctgccgagacaggagtcccagcggccattcttttggattttcatggacaacttgctgctgaccgaggatgaccaggaaactaccactcggttcctgcagaccgaagccgtgaccctgcaggacgtgagaggccgggactaccagaacgccatgcgggtgtggtccaacatccctggactgaaaagcaagcacgcacctctgacccctaaagaagaggagtacctgcaggcccaggtgcggagcagaagcaagctggacgcccctaaggtggatctgctggtgaagaattgcctcctgcccctgagagagtacttcaagtatttcagccagaatagtctgcccctgggcggcccaagcagcggcgcccctcctcccagcggcggcagcccagccggctccccaacctctaccgaggagggcacctctgagtccgccacccccgagagcggccctggcacctccaccgagcccagcgagggcagcgcacccggcagccctgccggcagccccacctccacagaggagggaaccagcaccgagcccagcgaaggcagcgccccaggcaccagcaccgagcctagtgagggcggctctggcggcggcagcgcccaggagattaaacggatcaacaagatcagaagaagacttgtgaaagacagcaacaccaagaaggccggcaagacaggccccatgaaaaccctgctggttagagtgatgacacccgatctgagagagcggctggaaaacctgagaaagaagcctgaaaatatcccccagcccatcagcaatacatctagagccaacctgaataagctgctgaccgattacaccgaaatgaagaaggcgatcctgcatgtgtactgggaagagttccagaaggaccctgtgggcctgatgagccgggtggcccagcctgccagcaagaagatcgatcagaacaagctgaaacctgagatggacgagaagggcaacctgaccaccgccggctttgcctgctctcagtgtggccagcccctgttcgtgtacaagctggagcaggtgtctgagaagggcaaggcttacaccaactacttcggacggtgcaatgtggccgagcacgaaaagctgatcctgctggcccagctgaagcccgagaaggatagcgacgaagccgtgacatatagcctgggaaagtttgggcagagggccctggatttctacagcattcatgtgaccaaggagtccacccaccccgtgaagcccctggcccagatcgccggaaacagatacgcctccggacctgtgggaaaggccctgagcgacgcatgtatgggcacaatcgcctccttcctgtctaagtaccaggacatcatcatcgaacaccagaaggtggtgaagggcaaccagaagagactggagagcctgcgggagctggccggcaaggaaaacctggaataccctagcgtgaccctgccacctcagcctcacaccaaggagggcgttgatgcctacaacgaagtgatcgcccgggtgcgaatgtgggtgaacctgaacctgtggcagaagctgaagctaagcagagatgatgccaagcctctgctgagactgaagggattcccttcctttcctctggtcgagagacaggccaacgaagtggactggtgggacatggtgtgtaacgtgaagaagctgatcaacgagaaaaaggaggatggcaaggtgttttggcagaatctggctggctacaagagacaggaagccctgagaccatacctgagcagcgaggaagatcggaagaagggaaagaaattcgctcggtaccagctgggcgacctgctgctgcacctggaaaagaagcacggcgaggactggggaaaggtgtacgacgaggcctgggagcggattgacaagaaagtggaaggcctgagcaagcacatcaagctggaagaggaacggagaagcgaggacgcccagagcaaggccgccctgaccgactggctgcgggctaaggccagcttcgtgatcgagggcctgaaggaggccgacaaggacgagttctgcagatgcgagctgaagctgcagaagtggtacggggacctgcggggaaagcccttcgccatcgaagccgagaacagcatcctggacatcagcggcttcagcaagcagtacaactgtgccttcatctggcagaaggacggcgtgaagaagctgaacctgtacctgatcatcaactacttcaagggcggcaagctgcggttcaagaagatcaaacctgaagccttcgaagccaacagattctacaccgtgatcaacaaaaagagcggcgagatcgtgcccatggaggtgaacttcaacttcgacgaccccaacctgatcatcctgcctctggcctttggcaagagacagggcagagaattcatctggaacgacctgctgtccctggaaaccggcagcctgaagctggccaacggaagagtgatcgagaagacactgtacaacagaagaacccggcaggatgagcctgccctgttcgtggccctgaccttcgagcggcgggaggtcctggactcctccaatatcaaaccaatgaacctgatcggcgtggcaagaggcgaaaacatccccgccgtgatcgccctgaccgaccccgagggctgcccactgagccggtttaaggatagcctgggaaacccaacccacatcctgagaatcggcgagagctataaggagaagcagcggaccatccaggccaagaaggaggtggagcagcggagagccggcggctacagccggaagtacgccagcaaagccaagaatctggcagacgatatggtgagaaacaccgctagagatctgctgtactacgccgtgacccaggatgccatgctgatcttcgccaacctgagccggggcttcggccggcagggcaagcggaccttcatggccgagagacagtacacacggatggaggactggctgaccgccaagctggcctacgagggcctgagcaagacctacctgtccaagacactggcccagtacacctccaagacatgcagcaactgtgggtttaccatcaccagcgccgactacgacagggtgctggagaagctgaagaagacagcaacaggctggatgaccacaattaacggcaaggagctgaaggtggagggccagattacctactacaacagatacaagagacagaacgtagtcaaggacctgtccgtcgagctggatagactgagcgaagaatctgtgaacaacgacatctcctcctggacaaagggcagaagcggagaagctctgagcctcctgaagaaaagattctcccatagacccgtgcaggagaagttcgtgtgcctgaactgcggcttcgagacacacgcagccgagcaagccgccctgaacatcgccagatcctggctgttcctgcggagccaggagtacaagaaataccagacaaacaagacaaccggcaacaccgataagagagccttcgtcgagacctggcagtccttttaccggaagaagcttaaggaggtgtggaaacctgccgtgcggtctggcggatctggcggaggctccacaagccccctgaccttcgaggacgtggccctgtacttcagcgaggaggagtggctgatcatggaccccaaccagaggaccctgtacctggacgtgatgcaggagctgtacgagaacgtgaccagcctgggcctgaagctgaagaacgacaccggcaacgacccccccgtgagcctgcccaccctggagatccagcccagcggctgcgaggtggtgaggaaggccaccatgaaggacgccgagaccaccaccagccccaagaaaaagagaaaagtctaagctgccttctgcggggcttgccttctggccatgcccttcttctctcccttgcacctgtacctcttggtctttgaataaagcctgagtaggaaggctagcaaaaaaaaaaaaaaaaaaaaaaaaaaaaaaaaaaaaaaaaaaaaaaaaaaaaaaaaaaaaaaaaaaaaaaaaaaaaaaaa

SEQ ID NO: 6951 - RNA, 5797 nt, synthetic construct
  source 1..5797: mol_type = other RNA
aggaaataagagagaaaagaagagtaagaagaaatataagagccaccatggcccctaagaagaagcgtaaagtgagccggatggaacgcctcgtctacgaggtgcggcagaagtgcagaaacatcgaggacatctgcatctcctgcggatctctgaacgtgaccctggagcacccactgttcatcggcggcatgtgccagaactgtaaaaactgttttctggagtgtgcctatcaatacgacgatgacggctaccagagctactgcaccatctgttgcggcggaagagaggtgctgatgtgtggaaataacaactgctgccggtgcttctgcgtggaatgcgtggacctgctggtgggccccggcgccgcccaggccgctattaaggaagatccttggaactgctacatgtgcggccacaagggcacatacggcctgctgagacggagagaggactggcctagcagactgcagatgttcttcgccaataaccacgaccaggagttcgacccccctaaggtgtaccctcccgtccccgccgagaagagaaagcccatccgggtcctgagcctgttcgatggcatcgccaccggtctgctggtgctgaaggacctgggcatccaggtggataggtacattgcctccgaggtgtgcgaggactccatcaccgtgggaatggtgcgtcatcagggcaagatcatgtacgtgggcgacgtgcggagcgtgacacagaagcatatccaggagtggggccctttcgacctggtgatcggcggcagcccttgcaatgacctgagcatcgtgaacccagcccggaagggcctgtacgagggaaccggcagactgttcttcgagttttacagactgctgcacgacgcccggcctaaggaaggcgacgaccggcccttcttttggctgttcgagaatgtggtggccatgggagtcagcgacaagcgggatattagccggttcctggagagcaaccccgtgatgatcgatgccaaggaagtgagcgccgcccaccgggccagatacttctggggcaatctgcctggcatgaacagacccctggccagcaccgtgaacgacaagctggagctgcaggagtgcctggagcacggccggatcgccaagttcagcaaggtgagaaccatcaccacccgaagcaacagcatcaaacaaggcaaggaccagcactttcctgtgttcatgaacgagaaggaggacatcctgtggtgtaccgagatggagagagtgttcgggttcccagtccactacacagatgtcagcaacatgtctagactggccagacagagactgctgggaagaagctggtccgtccctgtgatcagacacctgttcgcccctctgaaggagtacttcgcctgcgtgagcagcggcaacagcaacgccaacagccggggccccagcttctctagcggcctggtgccactgtccctgagagggagccacatgggccccatggagatctacaaaaccgtgagcgcctggaagcggcagcctgtgcgcgtgctgagcctgtttcggaatatcgataaagtcctgaaaagcctgggattcctggagagcggctctggctccggcggtggcaccctgaagtacgtggaggatgtgacaaacgtggtcagacgggatgtggagaagtggggccccttcgatctggtgtacggcagcacccaacccctgggcagctcttgtgaccggtgccctggctggtacatgtttcagttccaccggatcctgcagtacgccctgccgagacaggagtcccagcggccattcttttggattttcatggacaacttgctgctgaccgaggatgaccaggaaactaccactcggttcctgcagaccgaagccgtgaccctgcaggacgtgagaggccgggactaccagaacgccatgcgggtgtggtccaacatccctggactgaaaagcaagcacgcacctctgacccctaaagaagaggagtacctgcaggcccaggtgcggagcagaagcaagctggacgcccctaaggtggatctgctggtgaagaattgcctcctgcccctgagagagtacttcaagtatttcagccagaatagtctgcccctgggcggcccaagcagcggcgcccctcctcccagcggcggcagcccagccggctccccaacctctaccgaggagggcacctctgagtccgccacccccgagagcggccctggcacctccaccgagcccagcgagggcagcgcacccggcagccctgccggcagccccacctccacagaggagggaaccagcaccgagcccagcgaaggcagcgccccaggcaccagcaccgagcctagtgagggcggctctggcggcggcagcgcccaggagattaaacggatcaacaagatcagaagaagacttgtgaaagacagcaacaccaagaaggccggcaagacaggccccatgaaaaccctgctggttagagtgatgacacccgatctgagagagcggctggaaaacctgagaaagaagcctgaaaatatcccccagcccatcagcaatacatctagagccaacctgaataagctgctgaccgattacaccgaaatgaagaaggcgatcctgcatgtgtactgggaagagttccagaaggaccctgtgggcctgatgagccgggtggcccagcctgccagcaagaagatcgatcagaacaagctgaaacctgagatggacgagaagggcaacctgaccaccgccggctttgcctgctctcagtgtggccagcccctgttcgtgtacaagctggagcaggtgtctgagaagggcaaggcttacaccaactacttcggacggtgcaatgtggccgagcacgaaaagctgatcctgctggcccagctgaagcccgagaaggatagcgacgaagccgtgacatatagcctgggaaagtttgggcagagggccctggatttctacagcattcatgtgaccaaggagtccacccaccccgtgaagcccctggcccagatcgccggaaacagatacgcctccggacctgtgggaaaggccctgagcgacgcatgtatgggcacaatcgcctccttcctgtctaagtaccaggacatcatcatcgaacaccagaaggtggtgaagggcaaccagaagagactggagagcctgcgggagctggccggcaaggaaaacctggaataccctagcgtgaccctgccacctcagcctcacaccaaggagggcgttgatgcctacaacgaagtgatcgcccgggtgcgaatgtgggtgaacctgaacctgtggcagaagctgaagctaagcagagatgatgccaagcctctgctgagactgaagggattcccttcctttcctctggtcgagagacaggccaacgaagtggactggtgggacatggtgtgtaacgtgaagaagctgatcaacgagaaaaaggaggatggcaaggtgttttggcagaatctggctggctacaagagacaggaagccctgagaccatacctgagcagcgaggaagatcggaagaagggaaagaaattcgctcggtaccagctgggcgacctgctgctgcacctggaaaagaagcacggcgaggactggggaaaggtgtacgacgaggcctgggagcggattgacaagaaagtggaaggcctgagcaagcacatcaagctggaagaggaacggagaagcgaggacgcccagagcaaggccgccctgaccgactggctgcgggctaaggccagcttcgtgatcgagggcctgaaggaggccgacaaggacgagttctgcagatgcgagctgaagctgcagaagtggtacggggacctgcggggaaagcccttcgccatcgaagccgagaacagcatcctggacatcagcggcttcagcaagcagtacaactgtgccttcatctggcagaaggacggcgtgaagaagctgaacctgtacctgatcatcaactacttcaagggcggcaagctgcggttcaagaagatcaaacctgaagccttcgaagccaacagattctacaccgtgatcaacaaaaagagcggcgagatcgtgcccatggaggtgaacttcaacttcgacgaccccaacctgatcatcctgcctctggcctttggcaagagacagggcagagaattcatctggaacgacctgctgtccctggaaaccggcagcctgaagctggccaacggaagagtgatcgagaagacactgtacaacagaagaacccggcaggatgagcctgccctgttcgtggccctgaccttcgagcggcgggaggtcctggactcctccaatatcaaaccaatgaacctgatcggcgtggcaagaggcgaaaacatccccgccgtgatcgccctgaccgaccccgagggctgcccactgagccggtttaaggatagcctgggaaacccaacccacatcctgagaatcggcgagagctataaggagaagcagcggaccatccaggccaagaaggaggtggagcagcggagagccggcggctacagccggaagtacgccagcaaagccaagaatctggcagacgatatggtgagaaacaccgctagagatctgctgtactacgccgtgacccaggatgccatgctgatcttcgccaacctgagccggggcttcggccggcagggcaagcggaccttcatggccgagagacagtacacacggatggaggactggctgaccgccaagctggcctacgagggcctgagcaagacctacctgtccaagacactggcccagtacacctccaagacatgcagcaactgtgggtttaccatcaccagcgccgactacgacagggtgctggagaagctgaagaagacagcaacaggctggatgaccacaattaacggcaaggagctgaaggtggagggccagattacctactacaacagatacaagagacagaacgtagtcaaggacctgtccgtcgagctggatagactgagcgaagaatctgtgaacaacgacatctcctcctggacaaagggcagaagcggagaagctctgagcctcctgaagaaaagattctcccatagacccgtgcaggagaagttcgtgtgcctgaactgcggcttcgagacacacgcagccgagcaagccgccctgaacatcgccagatcctggctgttcctgcggagccaggagtacaagaaataccagacaaacaagacaaccggcaacaccgataagagagccttcgtcgagacctggcagtccttttaccggaagaagcttaaggaggtgtggaaacctgccgtgcggtctggcggatctggcggaggctccacaagcagcaggaagcccgtgagcttcgccgacgtggccgtgtacttcagccccgaggagtggggctgcctgaggcccgtgcagagggccctgtacagggacgtgatgagggagacctacggccacctgggcgccctgggcttccaggacaccaagcccgccctgatcagctggatggaggaggaggccgagctgtggggcagcgacgccagggaccccgagctgggcgagtgcctgagcgaggacaccaccagccccaagaaaaagagaaaagtctaagctgccttctgcggggcttgccttctggccatgcccttcttctctcccttgcacctgtacctcttggtctttgaataaagcctgagtaggaaggctagcaaaaaaaaaaaaaaaaaaaaaaaaaaaaaaaaaaaaaaaaaaaaaaaaaaaaaaaaaaaaaaaaaaaaaaaaaaaaaaaa

SEQ ID NO: 6952 - RNA, 5797 nt, synthetic construct
  source 1..5797: mol_type = other RNA
aggaaataagagagaaaagaagagtaagaagaaatataagagccaccatggcccctaagaagaagcgtaaagtgagccggatggaacgcctcgtctacgaggtgcggcagaagtgcagaaacatcgaggacatctgcatctcctgcggatctctgaacgtgaccctggagcacccactgttcatcggcggcatgtgccagaactgtaaaaactgttttctggagtgtgcctatcaatacgacgatgacggctaccagagctactgcaccatctgttgcggcggaagagaggtgctgatgtgtggaaataacaactgctgccggtgcttctgcgtggaatgcgtggacctgctggtgggccccggcgccgcccaggccgctattaaggaagatccttggaactgctacatgtgcggccacaagggcacatacggcctgctgagacggagagaggactggcctagcagactgcagatgttcttcgccaataaccacgaccaggagttcgacccccctaaggtgtaccctcccgtccccgccgagaagagaaagcccatccgggtcctgagcctgttcgatggcatcgccaccggtctgctggtgctgaaggacctgggcatccaggtggataggtacattgcctccgaggtgtgcgaggactccatcaccgtgggaatggtgcgtcatcagggcaagatcatgtacgtgggcgacgtgcggagcgtgacacagaagcatatccaggagtggggccctttcgacctggtgatcggcggcagcccttgcaatgacctgagcatcgtgaacccagcccggaagggcctgtacgagggaaccggcagactgttcttcgagttttacagactgctgcacgacgcccggcctaaggaaggcgacgaccggcccttcttttggctgttcgagaatgtggtggccatgggagtcagcgacaagcgggatattagccggttcctggagagcaaccccgtgatgatcgatgccaaggaagtgagcgccgcccaccgggccagatacttctggggcaatctgcctggcatgaacagacccctggccagcaccgtgaacgacaagctggagctgcaggagtgcctggagcacggccggatcgccaagttcagcaaggtgagaaccatcaccacccgaagcaacagcatcaaacaaggcaaggaccagcactttcctgtgttcatgaacgagaaggaggacatcctgtggtgtaccgagatggagagagtgttcgggttcccagtccactacacagatgtcagcaacatgtctagactggccagacagagactgctgggaagaagctggtccgtccctgtgatcagacacctgttcgcccctctgaaggagtacttcgcctgcgtgagcagcggcaacagcaacgccaacagccggggccccagcttctctagcggcctggtgccactgtccctgagagggagccacatgggccccatggagatctacaaaaccgtgagcgcctggaagcggcagcctgtgcgcgtgctgagcctgtttcggaatatcgataaagtcctgaaaagcctgggattcctggagagcggctctggctccggcggtggcaccctgaagtacgtggaggatgtgacaaacgtggtcagacgggatgtggagaagtggggccccttcgatctggtgtacggcagcacccaacccctgggcagctcttgtgaccggtgccctggctggtacatgtttcagttccaccggatcctgcagtacgccctgccgagacaggagtcccagcggccattcttttggattttcatggacaacttgctgctgaccgaggatgaccaggaaactaccactcggttcctgcagaccgaagccgtgaccctgcaggacgtgagaggccgggactaccagaacgccatgcgggtgtggtccaacatccctggactgaaaagcaagcacgcacctctgacccctaaagaagaggagtacctgcaggcccaggtgcggagcagaagcaagctggacgcccctaaggtggatctgctggtgaagaattgcctcctgcccctgagagagtacttcaagtatttcagccagaatagtctgcccctgggcggcccaagcagcggcgcccctcctcccagcggcggcagcccagccggctccccaacctctaccgaggagggcacctctgagtccgccacccccgagagcggccctggcacctccaccgagcccagcgagggcagcgcacccggcagccctgccggcagccccacctccacagaggagggaaccagcaccgagcccagcgaaggcagcgccccaggcaccagcaccgagcctagtgagggcggctctggcggcggcagcgcccaggagattaaacggatcaacaagatcagaagaagacttgtgaaagacagcaacaccaagaaggccggcaagacaggccccatgaaaaccctgctggttagagtgatgacacccgatctgagagagcggctggaaaacctgagaaagaagcctgaaaatatcccccagcccatcagcaatacatctagagccaacctgaataagctgctgaccgattacaccgaaatgaagaaggcgatcctgcatgtgtactgggaagagttccagaaggaccctgtgggcctgatgagccgggtggcccagcctgccagcaagaagatcgatcagaacaagctgaaacctgagatggacgagaagggcaacctgaccaccgccggctttgcctgctctcagtgtggccagcccctgttcgtgtacaagctggagcaggtgtctgagaagggcaaggcttacaccaactacttcggacggtgcaatgtggccgagcacgaaaagctgatcctgctggcccagctgaagcccgagaaggatagcgacgaagccgtgacatatagcctgggaaagtttgggcagagggccctggatttctacagcattcatgtgaccaaggagtccacccaccccgtgaagcccctggcccagatcgccggaaacagatacgcctccggacctgtgggaaaggccctgagcgacgcatgtatgggcacaatcgcctccttcctgtctaagtaccaggacatcatcatcgaacaccagaaggtggtgaagggcaaccagaagagactggagagcctgcgggagctggccggcaaggaaaacctggaataccctagcgtgaccctgccacctcagcctcacaccaaggagggcgttgatgcctacaacgaagtgatcgcccgggtgcgaatgtgggtgaacctgaacctgtggcagaagctgaagctaagcagagatgatgccaagcctctgctgagactgaagggattcccttcctttcctctggtcgagagacaggccaacgaagtggactggtgggacatggtgtgtaacgtgaagaagctgatcaacgagaaaaaggaggatggcaaggtgttttggcagaatctggctggctacaagagacaggaagccctgagaccatacctgagcagcgaggaagatcggaagaagggaaagaaattcgctcggtaccagctgggcgacctgctgctgcacctggaaaagaagcacggcgaggactggggaaaggtgtacgacgaggcctgggagcggattgacaagaaagtggaaggcctgagcaagcacatcaagctggaagaggaacggagaagcgaggacgcccagagcaaggccgccctgaccgactggctgcgggctaaggccagcttcgtgatcgagggcctgaaggaggccgacaaggacgagttctgcagatgcgagctgaagctgcagaagtggtacggggacctgcggggaaagcccttcgccatcgaagccgagaacagcatcctggacatcagcggcttcagcaagcagtacaactgtgccttcatctggcagaaggacggcgtgaagaagctgaacctgtacctgatcatcaactacttcaagggcggcaagctgcggttcaagaagatcaaacctgaagccttcgaagccaacagattctacaccgtgatcaacaaaaagagcggcgagatcgtgcccatggaggtgaacttcaacttcgacgaccccaacctgatcatcctgcctctggcctttggcaagagacagggcagagaattcatctggaacgacctgctgtccctggaaaccggcagcctgaagctggccaacggaagagtgatcgagaagacactgtacaacagaagaacccggcaggatgagcctgccctgttcgtggccctgaccttcgagcggcgggaggtcctggactcctccaatatcaaaccaatgaacctgatcggcgtggcaagaggcgaaaacatccccgccgtgatcgccctgaccgaccccgagggctgcccactgagccggtttaaggatagcctgggaaacccaacccacatcctgagaatcggcgagagctataaggagaagcagcggaccatccaggccaagaaggaggtggagcagcggagagccggcggctacagccggaagtacgccagcaaagccaagaatctggcagacgatatggtgagaaacaccgctagagatctgctgtactacgccgtgacccaggatgccatgctgatcttcgccaacctgagccggggcttcggccggcagggcaagcggaccttcatggccgagagacagtacacacggatggaggactggctgaccgccaagctggcctacgagggcctgagcaagacctacctgtccaagacactggcccagtacacctccaagacatgcagcaactgtgggtttaccatcaccagcgccgactacgacagggtgctggagaagctgaagaagacagcaacaggctggatgaccacaattaacggcaaggagctgaaggtggagggccagattacctactacaacagatacaagagacagaacgtagtcaaggacctgtccgtcgagctggatagactgagcgaagaatctgtgaacaacgacatctcctcctggacaaagggcagaagcggagaagctctgagcctcctgaagaaaagattctcccatagacccgtgcaggagaagttcgtgtgcctgaactgcggcttcgagacacacgcagccgagcaagccgccctgaacatcgccagatcctggctgttcctgcggagccaggagtacaagaaataccagacaaacaagacaaccggcaacaccgataagagagccttcgtcgagacctggcagtccttttaccggaagaagcttaaggaggtgtggaaacctgccgtgcggtctggcggatctggcggaggctccacaagcagccaggagcccgtgagcttcctggacgtggccgtggacttcacccaggaggagtggcagcagctggaccccgtgcagaggaccacctacagggacgtgatgctggagaactacagccacctggtggccctgggctacgacagcgccaagcccaacgtgatcgtgaagctggagcagggcgaggagccctgggtggccgagggcgacctgccctgcaggagcaggcccgaggaggtgtggcagaccagccccaagaaaaagagaaaagtctaagctgccttctgcggggcttgccttctggccatgcccttcttctctcccttgcacctgtacctcttggtctttgaataaagcctgagtaggaaggctagcaaaaaaaaaaaaaaaaaaaaaaaaaaaaaaaaaaaaaaaaaaaaaaaaaaaaaaaaaaaaaaaaaaaaaaaaaaaaaaaa

SEQ ID NO: 6953 - RNA, 5797 nt, synthetic construct
  source 1..5797: mol_type = other RNA
aggaaataagagagaaaagaagagtaagaagaaatataagagccaccatggcccctaagaagaagcgtaaagtgagccggatggaacgcctcgtctacgaggtgcggcagaagtgcagaaacatcgaggacatctgcatctcctgcggatctctgaacgtgaccctggagcacccactgttcatcggcggcatgtgccagaactgtaaaaactgttttctggagtgtgcctatcaatacgacgatgacggctaccagagctactgcaccatctgttgcggcggaagagaggtgctgatgtgtggaaataacaactgctgccggtgcttctgcgtggaatgcgtggacctgctggtgggccccggcgccgcccaggccgctattaaggaagatccttggaactgctacatgtgcggccacaagggcacatacggcctgctgagacggagagaggactggcctagcagactgcagatgttcttcgccaataaccacgaccaggagttcgacccccctaaggtgtaccctcccgtccccgccgagaagagaaagcccatccgggtcctgagcctgttcgatggcatcgccaccggtctgctggtgctgaaggacctgggcatccaggtggataggtacattgcctccgaggtgtgcgaggactccatcaccgtgggaatggtgcgtcatcagggcaagatcatgtacgtgggcgacgtgcggagcgtgacacagaagcatatccaggagtggggccctttcgacctggtgatcggcggcagcccttgcaatgacctgagcatcgtgaacccagcccggaagggcctgtacgagggaaccggcagactgttcttcgagttttacagactgctgcacgacgcccggcctaaggaaggcgacgaccggcccttcttttggctgttcgagaatgtggtggccatgggagtcagcgacaagcgggatattagccggttcctggagagcaaccccgtgatgatcgatgccaaggaagtgagcgccgcccaccgggccagatacttctggggcaatctgcctggcatgaacagacccctggccagcaccgtgaacgacaagctggagctgcaggagtgcctggagcacggccggatcgccaagttcagcaaggtgagaaccatcaccacccgaagcaacagcatcaaacaaggcaaggaccagcactttcctgtgttcatgaacgagaaggaggacatcctgtggtgtaccgagatggagagagtgttcgggttcccagtccactacacagatgtcagcaacatgtctagactggccagacagagactgctgggaagaagctggtccgtccctgtgatcagacacctgttcgcccctctgaaggagtacttcgcctgcgtgagcagcggcaacagcaacgccaacagccggggccccagcttctctagcggcctggtgccactgtccctgagagggagccacatgggccccatggagatctacaaaaccgtgagcgcctggaagcggcagcctgtgcgcgtgctgagcctgtttcggaatatcgataaagtcctgaaaagcctgggattcctggagagcggctctggctccggcggtggcaccctgaagtacgtggaggatgtgacaaacgtggtcagacgggatgtggagaagtggggccccttcgatctggtgtacggcagcacccaacccctgggcagctcttgtgaccggtgccctggctggtacatgtttcagttccaccggatcctgcagtacgccctgccgagacaggagtcccagcggccattcttttggattttcatggacaacttgctgctgaccgaggatgaccaggaaactaccactcggttcctgcagaccgaagccgtgaccctgcaggacgtgagaggccgggactaccagaacgccatgcgggtgtggtccaacatccctggactgaaaagcaagcacgcacctctgacccctaaagaagaggagtacctgcaggcccaggtgcggagcagaagcaagctggacgcccctaaggtggatctgctggtgaagaattgcctcctgcccctgagagagtacttcaagtatttcagccagaatagtctgcccctgggcggcccaagcagcggcgcccctcctcccagcggcggcagcccagccggctccccaacctctaccgaggagggcacctctgagtccgccacccccgagagcggccctggcacctccaccgagcccagcgagggcagcgcacccggcagccctgccggcagccccacctccacagaggagggaaccagcaccgagcccagcgaaggcagcgccccaggcaccagcaccgagcctagtgagggcggctctggcggcggcagcgcccaggagattaaacggatcaacaagatcagaagaagacttgtgaaagacagcaacaccaagaaggccggcaagacaggccccatgaaaaccctgctggttagagtgatgacacccgatctgagagagcggctggaaaacctgagaaagaagcctgaaaatatcccccagcccatcagcaatacatctagagccaacctgaataagctgctgaccgattacaccgaaatgaagaaggcgatcctgcatgtgtactgggaagagttccagaaggaccctgtgggcctgatgagccgggtggcccagcctgccagcaagaagatcgatcagaacaagctgaaacctgagatggacgagaagggcaacctgaccaccgccggctttgcctgctctcagtgtggccagcccctgttcgtgtacaagctggagcaggtgtctgagaagggcaaggcttacaccaactacttcggacggtgcaatgtggccgagcacgaaaagctgatcctgctggcccagctgaagcccgagaaggatagcgacgaagccgtgacatatagcctgggaaagtttgggcagagggccctggatttctacagcattcatgtgaccaaggagtccacccaccccgtgaagcccctggcccagatcgccggaaacagatacgcctccggacctgtgggaaaggccctgagcgacgcatgtatgggcacaatcgcctccttcctgtctaagtaccaggacatcatcatcgaacaccagaaggtggtgaagggcaaccagaagagactggagagcctgcgggagctggccggcaaggaaaacctggaataccctagcgtgaccctgccacctcagcctcacaccaaggagggcgttgatgcctacaacgaagtgatcgcccgggtgcgaatgtgggtgaacctgaacctgtggcagaagctgaagctaagcagagatgatgccaagcctctgctgagactgaagggattcccttcctttcctctggtcgagagacaggccaacgaagtggactggtgggacatggtgtgtaacgtgaagaagctgatcaacgagaaaaaggaggatggcaaggtgttttggcagaatctggctggctacaagagacaggaagccctgagaccatacctgagcagcgaggaagatcggaagaagggaaagaaattcgctcggtaccagctgggcgacctgctgctgcacctggaaaagaagcacggcgaggactggggaaaggtgtacgacgaggcctgggagcggattgacaagaaagtggaaggcctgagcaagcacatcaagctggaagaggaacggagaagcgaggacgcccagagcaaggccgccctgaccgactggctgcgggctaaggccagcttcgtgatcgagggcctgaaggaggccgacaaggacgagttctgcagatgcgagctgaagctgcagaagtggtacggggacctgcggggaaagcccttcgccatcgaagccgagaacagcatcctggacatcagcggcttcagcaagcagtacaactgtgccttcatctggcagaaggacggcgtgaagaagctgaacctgtacctgatcatcaactacttcaagggcggcaagctgcggttcaagaagatcaaacctgaagccttcgaagccaacagattctacaccgtgatcaacaaaaagagcggcgagatcgtgcccatggaggtgaacttcaacttcgacgaccccaacctgatcatcctgcctctggcctttggcaagagacagggcagagaattcatctggaacgacctgctgtccctggaaaccggcagcctgaagctggccaacggaagagtgatcgagaagacactgtacaacagaagaacccggcaggatgagcctgccctgttcgtggccctgaccttcgagcggcgggaggtcctggactcctccaatatcaaaccaatgaacctgatcggcgtggcaagaggcgaaaacatccccgccgtgatcgccctgaccgaccccgagggctgcccactgagccggtttaaggatagcctgggaaacccaacccacatcctgagaatcggcgagagctataaggagaagcagcggaccatccaggccaagaaggaggtggagcagcggagagccggcggctacagccggaagtacgccagcaaagccaagaatctggcagacgatatggtgagaaacaccgctagagatctgctgtactacgccgtgacccaggatgccatgctgatcttcgccaacctgagccggggcttcggccggcagggcaagcggaccttcatggccgagagacagtacacacggatggaggactggctgaccgccaagctggcctacgagggcctgagcaagacctacctgtccaagacactggcccagtacacctccaagacatgcagcaactgtgggtttaccatcaccagcgccgactacgacagggtgctggagaagctgaagaagacagcaacaggctggatgaccacaattaacggcaaggagctgaaggtggagggccagattacctactacaacagatacaagagacagaacgtagtcaaggacctgtccgtcgagctggatagactgagcgaagaatctgtgaacaacgacatctcctcctggacaaagggcagaagcggagaagctctgagcctcctgaagaaaagattctcccatagacccgtgcaggagaagttcgtgtgcctgaactgcggcttcgagacacacgcagccgagcaagccgccctgaacatcgccagatcctggctgttcctgcggagccaggagtacaagaaataccagacaaacaagacaaccggcaacaccgataagagagccttcgtcgagacctggcagtccttttaccggaagaagcttaaggaggtgtggaaacctgccgtgcggtctggcggatctggcggaggctccacaagcagccagggcctggtgaccttcgaggacgtggccgtgtacttcagcctggaggagtgggagaggctggacgccgcccagagggacctgtacaaggaggtgatgcaggagaactacggcatcctggtgagcctgggctaccccatccccaagcccgacctgatcttcaggctggagcagggcgaggagccctgggtgcccgacagccccaggcccgaggagggcgacatcgtgaccggcgtgtacaccagccccaagaaaaagagaaaagtctaagctgccttctgcggggcttgccttctggccatgcccttcttctctcccttgcacctgtacctcttggtctttgaataaagcctgagtaggaaggctagcaaaaaaaaaaaaaaaaaaaaaaaaaaaaaaaaaaaaaaaaaaaaaaaaaaaaaaaaaaaaaaaaaaaaaaaaaaaaaaaa

SEQ ID NO: 6954 - RNA, 5797 nt, synthetic construct
  source 1..5797: mol_type = other RNA
aggaaataagagagaaaagaagagtaagaagaaatataagagccaccatggcccctaagaagaagcgtaaagtgagccggatggaacgcctcgtctacgaggtgcggcagaagtgcagaaacatcgaggacatctgcatctcctgcggatctctgaacgtgaccctggagcacccactgttcatcggcggcatgtgccagaactgtaaaaactgttttctggagtgtgcctatcaatacgacgatgacggctaccagagctactgcaccatctgttgcggcggaagagaggtgctgatgtgtggaaataacaactgctgccggtgcttctgcgtggaatgcgtggacctgctggtgggccccggcgccgcccaggccgctattaaggaagatccttggaactgctacatgtgcggccacaagggcacatacggcctgctgagacggagagaggactggcctagcagactgcagatgttcttcgccaataaccacgaccaggagttcgacccccctaaggtgtaccctcccgtccccgccgagaagagaaagcccatccgggtcctgagcctgttcgatggcatcgccaccggtctgctggtgctgaaggacctgggcatccaggtggataggtacattgcctccgaggtgtgcgaggactccatcaccgtgggaatggtgcgtcatcagggcaagatcatgtacgtgggcgacgtgcggagcgtgacacagaagcatatccaggagtggggccctttcgacctggtgatcggcggcagcccttgcaatgacctgagcatcgtgaacccagcccggaagggcctgtacgagggaaccggcagactgttcttcgagttttacagactgctgcacgacgcccggcctaaggaaggcgacgaccggcccttcttttggctgttcgagaatgtggtggccatgggagtcagcgacaagcgggatattagccggttcctggagagcaaccccgtgatgatcgatgccaaggaagtgagcgccgcccaccgggccagatacttctggggcaatctgcctggcatgaacagacccctggccagcaccgtgaacgacaagctggagctgcaggagtgcctggagcacggccggatcgccaagttcagcaaggtgagaaccatcaccacccgaagcaacagcatcaaacaaggcaaggaccagcactttcctgtgttcatgaacgagaaggaggacatcctgtggtgtaccgagatggagagagtgttcgggttcccagtccactacacagatgtcagcaacatgtctagactggccagacagagactgctgggaagaagctggtccgtccctgtgatcagacacctgttcgcccctctgaaggagtacttcgcctgcgtgagcagcggcaacagcaacgccaacagccggggccccagcttctctagcggcctggtgccactgtccctgagagggagccacatgggccccatggagatctacaaaaccgtgagcgcctggaagcggcagcctgtgcgcgtgctgagcctgtttcggaatatcgataaagtcctgaaaagcctgggattcctggagagcggctctggctccggcggtggcaccctgaagtacgtggaggatgtgacaaacgtggtcagacgggatgtggagaagtggggccccttcgatctggtgtacggcagcacccaacccctgggcagctcttgtgaccggtgccctggctggtacatgtttcagttccaccggatcctgcagtacgccctgccgagacaggagtcccagcggccattcttttggattttcatggacaacttgctgctgaccgaggatgaccaggaaactaccactcggttcctgcagaccgaagccgtgaccctgcaggacgtgagaggccgggactaccagaacgccatgcgggtgtggtccaacatccctggactgaaaagcaagcacgcacctctgacccctaaagaagaggagtacctgcaggcccaggtgcggagcagaagcaagctggacgcccctaaggtggatctgctggtgaagaattgcctcctgcccctgagagagtacttcaagtatttcagccagaatagtctgcccctgggcggcccaagcagcggcgcccctcctcccagcggcggcagcccagccggctccccaacctctaccgaggagggcacctctgagtccgccacccccgagagcggccctggcacctccaccgagcccagcgagggcagcgcacccggcagccctgccggcagccccacctccacagaggagggaaccagcaccgagcccagcgaaggcagcgccccaggcaccagcaccgagcctagtgagggcggctctggcggcggcagcgcccaggagattaaacggatcaacaagatcagaagaagacttgtgaaagacagcaacaccaagaaggccggcaagacaggccccatgaaaaccctgctggttagagtgatgacacccgatctgagagagcggctggaaaacctgagaaagaagcctgaaaatatcccccagcccatcagcaatacatctagagccaacctgaataagctgctgaccgattacaccgaaatgaagaaggcgatcctgcatgtgtactgggaagagttccagaaggaccctgtgggcctgatgagccgggtggcccagcctgccagcaagaagatcgatcagaacaagctgaaacctgagatggacgagaagggcaacctgaccaccgccggctttgcctgctctcagtgtggccagcccctgttcgtgtacaagctggagcaggtgtctgagaagggcaaggcttacaccaactacttcggacggtgcaatgtggccgagcacgaaaagctgatcctgctggcccagctgaagcccgagaaggatagcgacgaagccgtgacatatagcctgggaaagtttgggcagagggccctggatttctacagcattcatgtgaccaaggagtccacccaccccgtgaagcccctggcccagatcgccggaaacagatacgcctccggacctgtgggaaaggccctgagcgacgcatgtatgggcacaatcgcctccttcctgtctaagtaccaggacatcatcatcgaacaccagaaggtggtgaagggcaaccagaagagactggagagcctgcgggagctggccggcaaggaaaacctggaataccctagcgtgaccctgccacctcagcctcacaccaaggagggcgttgatgcctacaacgaagtgatcgcccgggtgcgaatgtgggtgaacctgaacctgtggcagaagctgaagctaagcagagatgatgccaagcctctgctgagactgaagggattcccttcctttcctctggtcgagagacaggccaacgaagtggactggtgggacatggtgtgtaacgtgaagaagctgatcaacgagaaaaaggaggatggcaaggtgttttggcagaatctggctggctacaagagacaggaagccctgagaccatacctgagcagcgaggaagatcggaagaagggaaagaaattcgctcggtaccagctgggcgacctgctgctgcacctggaaaagaagcacggcgaggactggggaaaggtgtacgacgaggcctgggagcggattgacaagaaagtggaaggcctgagcaagcacatcaagctggaagaggaacggagaagcgaggacgcccagagcaaggccgccctgaccgactggctgcgggctaaggccagcttcgtgatcgagggcctgaaggaggccgacaaggacgagttctgcagatgcgagctgaagctgcagaagtggtacggggacctgcggggaaagcccttcgccatcgaagccgagaacagcatcctggacatcagcggcttcagcaagcagtacaactgtgccttcatctggcagaaggacggcgtgaagaagctgaacctgtacctgatcatcaactacttcaagggcggcaagctgcggttcaagaagatcaaacctgaagccttcgaagccaacagattctacaccgtgatcaacaaaaagagcggcgagatcgtgcccatggaggtgaacttcaacttcgacgaccccaacctgatcatcctgcctctggcctttggcaagagacagggcagagaattcatctggaacgacctgctgtccctggaaaccggcagcctgaagctggccaacggaagagtgatcgagaagacactgtacaacagaagaacccggcaggatgagcctgccctgttcgtggccctgaccttcgagcggcgggaggtcctggactcctccaatatcaaaccaatgaacctgatcggcgtggcaagaggcgaaaacatccccgccgtgatcgccctgaccgaccccgagggctgcccactgagccggtttaaggatagcctgggaaacccaacccacatcctgagaatcggcgagagctataaggagaagcagcggaccatccaggccaagaaggaggtggagcagcggagagccggcggctacagccggaagtacgccagcaaagccaagaatctggcagacgatatggtgagaaacaccgctagagatctgctgtactacgccgtgacccaggatgccatgctgatcttcgccaacctgagccggggcttcggccggcagggcaagcggaccttcatggccgagagacagtacacacggatggaggactggctgaccgccaagctggcctacgagggcctgagcaagacctacctgtccaagacactggcccagtacacctccaagacatgcagcaactgtgggtttaccatcaccagcgccgactacgacagggtgctggagaagctgaagaagacagcaacaggctggatgaccacaattaacggcaaggagctgaaggtggagggccagattacctactacaacagatacaagagacagaacgtagtcaaggacctgtccgtcgagctggatagactgagcgaagaatctgtgaacaacgacatctcctcctggacaaagggcagaagcggagaagctctgagcctcctgaagaaaagattctcccatagacccgtgcaggagaagttcgtgtgcctgaactgcggcttcgagacacacgcagccgagcaagccgccctgaacatcgccagatcctggctgttcctgcggagccaggagtacaagaaataccagacaaacaagacaaccggcaacaccgataagagagccttcgtcgagacctggcagtccttttaccggaagaagcttaaggaggtgtggaaacctgccgtgcggtctggcggatctggcggaggctccacaagcagccaggagagcgtgagcttcgaggacgtggccgtgtacttcaccaggaaccagtgggccagcctggacagcgcccagaggaccctgtacagggaggtgatgctggagaactacgccaacgtgaccagcctggccgccttccccttccccaagcccgacctgatcttccagctggagaggggcaaggcccccggcggcctggacccctggacccccatcaggagggaggtgaggggcgtgtgcaccagccccaagaaaaagagaaaagtctaagctgccttctgcggggcttgccttctggccatgcccttcttctctcccttgcacctgtacctcttggtctttgaataaagcctgagtaggaaggctagcaaaaaaaaaaaaaaaaaaaaaaaaaaaaaaaaaaaaaaaaaaaaaaaaaaaaaaaaaaaaaaaaaaaaaaaaaaaaaaaa

SEQ ID NO: 6955 - RNA, 5797 nt, synthetic construct
  source 1..5797: mol_type = other RNA
aggaaataagagagaaaagaagagtaagaagaaatataagagccaccatggcccctaagaagaagcgtaaagtgagccggatggaacgcctcgtctacgaggtgcggcagaagtgcagaaacatcgaggacatctgcatctcctgcggatctctgaacgtgaccctggagcacccactgttcatcggcggcatgtgccagaactgtaaaaactgttttctggagtgtgcctatcaatacgacgatgacggctaccagagctactgcaccatctgttgcggcggaagagaggtgctgatgtgtggaaataacaactgctgccggtgcttctgcgtggaatgcgtggacctgctggtgggccccggcgccgcccaggccgctattaaggaagatccttggaactgctacatgtgcggccacaagggcacatacggcctgctgagacggagagaggactggcctagcagactgcagatgttcttcgccaataaccacgaccaggagttcgacccccctaaggtgtaccctcccgtccccgccgagaagagaaagcccatccgggtcctgagcctgttcgatggcatcgccaccggtctgctggtgctgaaggacctgggcatccaggtggataggtacattgcctccgaggtgtgcgaggactccatcaccgtgggaatggtgcgtcatcagggcaagatcatgtacgtgggcgacgtgcggagcgtgacacagaagcatatccaggagtggggccctttcgacctggtgatcggcggcagcccttgcaatgacctgagcatcgtgaacccagcccggaagggcctgtacgagggaaccggcagactgttcttcgagttttacagactgctgcacgacgcccggcctaaggaaggcgacgaccggcccttcttttggctgttcgagaatgtggtggccatgggagtcagcgacaagcgggatattagccggttcctggagagcaaccccgtgatgatcgatgccaaggaagtgagcgccgcccaccgggccagatacttctggggcaatctgcctggcatgaacagacccctggccagcaccgtgaacgacaagctggagctgcaggagtgcctggagcacggccggatcgccaagttcagcaaggtgagaaccatcaccacccgaagcaacagcatcaaacaaggcaaggaccagcactttcctgtgttcatgaacgagaaggaggacatcctgtggtgtaccgagatggagagagtgttcgggttcccagtccactacacagatgtcagcaacatgtctagactggccagacagagactgctgggaagaagctggtccgtccctgtgatcagacacctgttcgcccctctgaaggagtacttcgcctgcgtgagcagcggcaacagcaacgccaacagccggggccccagcttctctagcggcctggtgccactgtccctgagagggagccacatgggccccatggagatctacaaaaccgtgagcgcctggaagcggcagcctgtgcgcgtgctgagcctgtttcggaatatcgataaagtcctgaaaagcctgggattcctggagagcggctctggctccggcggtggcaccctgaagtacgtggaggatgtgacaaacgtggtcagacgggatgtggagaagtggggccccttcgatctggtgtacggcagcacccaacccctgggcagctcttgtgaccggtgccctggctggtacatgtttcagttccaccggatcctgcagtacgccctgccgagacaggagtcccagcggccattcttttggattttcatggacaacttgctgctgaccgaggatgaccaggaaactaccactcggttcctgcagaccgaagccgtgaccctgcaggacgtgagaggccgggactaccagaacgccatgcgggtgtggtccaacatccctggactgaaaagcaagcacgcacctctgacccctaaagaagaggagtacctgcaggcccaggtgcggagcagaagcaagctggacgcccctaaggtggatctgctggtgaagaattgcctcctgcccctgagagagtacttcaagtatttcagccagaatagtctgcccctgggcggcccaagcagcggcgcccctcctcccagcggcggcagcccagccggctccccaacctctaccgaggagggcacctctgagtccgccacccccgagagcggccctggcacctccaccgagcccagcgagggcagcgcacccggcagccctgccggcagccccacctccacagaggagggaaccagcaccgagcccagcgaaggcagcgccccaggcaccagcaccgagcctagtgagggcggctctggcggcggcagcgcccaggagattaaacggatcaacaagatcagaagaagacttgtgaaagacagcaacaccaagaaggccggcaagacaggccccatgaaaaccctgctggttagagtgatgacacccgatctgagagagcggctggaaaacctgagaaagaagcctgaaaatatcccccagcccatcagcaatacatctagagccaacctgaataagctgctgaccgattacaccgaaatgaagaaggcgatcctgcatgtgtactgggaagagttccagaaggaccctgtgggcctgatgagccgggtggcccagcctgccagcaagaagatcgatcagaacaagctgaaacctgagatggacgagaagggcaacctgaccaccgccggctttgcctgctctcagtgtggccagcccctgttcgtgtacaagctggagcaggtgtctgagaagggcaaggcttacaccaactacttcggacggtgcaatgtggccgagcacgaaaagctgatcctgctggcccagctgaagcccgagaaggatagcgacgaagccgtgacatatagcctgggaaagtttgggcagagggccctggatttctacagcattcatgtgaccaaggagtccacccaccccgtgaagcccctggcccagatcgccggaaacagatacgcctccggacctgtgggaaaggccctgagcgacgcatgtatgggcacaatcgcctccttcctgtctaagtaccaggacatcatcatcgaacaccagaaggtggtgaagggcaaccagaagagactggagagcctgcgggagctggccggcaaggaaaacctggaataccctagcgtgaccctgccacctcagcctcacaccaaggagggcgttgatgcctacaacgaagtgatcgcccgggtgcgaatgtgggtgaacctgaacctgtggcagaagctgaagctaagcagagatgatgccaagcctctgctgagactgaagggattcccttcctttcctctggtcgagagacaggccaacgaagtggactggtgggacatggtgtgtaacgtgaagaagctgatcaacgagaaaaaggaggatggcaaggtgttttggcagaatctggctggctacaagagacaggaagccctgagaccatacctgagcagcgaggaagatcggaagaagggaaagaaattcgctcggtaccagctgggcgacctgctgctgcacctggaaaagaagcacggcgaggactggggaaaggtgtacgacgaggcctgggagcggattgacaagaaagtggaaggcctgagcaagcacatcaagctggaagaggaacggagaagcgaggacgcccagagcaaggccgccctgaccgactggctgcgggctaaggccagcttcgtgatcgagggcctgaaggaggccgacaaggacgagttctgcagatgcgagctgaagctgcagaagtggtacggggacctgcggggaaagcccttcgccatcgaagccgagaacagcatcctggacatcagcggcttcagcaagcagtacaactgtgccttcatctggcagaaggacggcgtgaagaagctgaacctgtacctgatcatcaactacttcaagggcggcaagctgcggttcaagaagatcaaacctgaagccttcgaagccaacagattctacaccgtgatcaacaaaaagagcggcgagatcgtgcccatggaggtgaacttcaacttcgacgaccccaacctgatcatcctgcctctggcctttggcaagagacagggcagagaattcatctggaacgacctgctgtccctggaaaccggcagcctgaagctggccaacggaagagtgatcgagaagacactgtacaacagaagaacccggcaggatgagcctgccctgttcgtggccctgaccttcgagcggcgggaggtcctggactcctccaatatcaaaccaatgaacctgatcggcgtggcaagaggcgaaaacatccccgccgtgatcgccctgaccgaccccgagggctgcccactgagccggtttaaggatagcctgggaaacccaacccacatcctgagaatcggcgagagctataaggagaagcagcggaccatccaggccaagaaggaggtggagcagcggagagccggcggctacagccggaagtacgccagcaaagccaagaatctggcagacgatatggtgagaaacaccgctagagatctgctgtactacgccgtgacccaggatgccatgctgatcttcgccaacctgagccggggcttcggccggcagggcaagcggaccttcatggccgagagacagtacacacggatggaggactggctgaccgccaagctggcctacgagggcctgagcaagacctacctgtccaagacactggcccagtacacctccaagacatgcagcaactgtgggtttaccatcaccagcgccgactacgacagggtgctggagaagctgaagaagacagcaacaggctggatgaccacaattaacggcaaggagctgaaggtggagggccagattacctactacaacagatacaagagacagaacgtagtcaaggacctgtccgtcgagctggatagactgagcgaagaatctgtgaacaacgacatctcctcctggacaaagggcagaagcggagaagctctgagcctcctgaagaaaagattctcccatagacccgtgcaggagaagttcgtgtgcctgaactgcggcttcgagacacacgcagccgagcaagccgccctgaacatcgccagatcctggctgttcctgcggagccaggagtacaagaaataccagacaaacaagacaaccggcaacaccgataagagagccttcgtcgagacctggcagtccttttaccggaagaagcttaaggaggtgtggaaacctgccgtgcggtctggcggatctggcggaggctccacaagcggcatgagggtgaccttcgaggacatcgccgtgagcttcagccaggaggagtgggagtacctgggcgagggccagaaggagctgtacagggaggtgatgaaggagaactacgagaccctgatcagcctgggcaccgacagcagcgccctgacccccgagatcatcagcaggatcgagaggggcgaggagccctgcatcagggacaagcccggcagcgaggagagggagaccggcaagagcagcaccagccccaagaaaaagagaaaagtctaagctgccttctgcggggcttgccttctggccatgcccttcttctctcccttgcacctgtacctcttggtctttgaataaagcctgagtaggaaggctagcaaaaaaaaaaaaaaaaaaaaaaaaaaaaaaaaaaaaaaaaaaaaaaaaaaaaaaaaaaaaaaaaaaaaaaaaaaaaaaaa

SEQ ID NO: 6956 - RNA, 5797 nt, synthetic construct
  source 1..5797: mol_type = other RNA
aggaaataagagagaaaagaagagtaagaagaaatataagagccaccatggcccctaagaagaagcgtaaagtgagccggatggaacgcctcgtctacgaggtgcggcagaagtgcagaaacatcgaggacatctgcatctcctgcggatctctgaacgtgaccctggagcacccactgttcatcggcggcatgtgccagaactgtaaaaactgttttctggagtgtgcctatcaatacgacgatgacggctaccagagctactgcaccatctgttgcggcggaagagaggtgctgatgtgtggaaataacaactgctgccggtgcttctgcgtggaatgcgtggacctgctggtgggccccggcgccgcccaggccgctattaaggaagatccttggaactgctacatgtgcggccacaagggcacatacggcctgctgagacggagagaggactggcctagcagactgcagatgttcttcgccaataaccacgaccaggagttcgacccccctaaggtgtaccctcccgtccccgccgagaagagaaagcccatccgggtcctgagcctgttcgatggcatcgccaccggtctgctggtgctgaaggacctgggcatccaggtggataggtacattgcctccgaggtgtgcgaggactccatcaccgtgggaatggtgcgtcatcagggcaagatcatgtacgtgggcgacgtgcggagcgtgacacagaagcatatccaggagtggggccctttcgacctggtgatcggcggcagcccttgcaatgacctgagcatcgtgaacccagcccggaagggcctgtacgagggaaccggcagactgttcttcgagttttacagactgctgcacgacgcccggcctaaggaaggcgacgaccggcccttcttttggctgttcgagaatgtggtggccatgggagtcagcgacaagcgggatattagccggttcctggagagcaaccccgtgatgatcgatgccaaggaagtgagcgccgcccaccgggccagatacttctggggcaatctgcctggcatgaacagacccctggccagcaccgtgaacgacaagctggagctgcaggagtgcctggagcacggccggatcgccaagttcagcaaggtgagaaccatcaccacccgaagcaacagcatcaaacaaggcaaggaccagcactttcctgtgttcatgaacgagaaggaggacatcctgtggtgtaccgagatggagagagtgttcgggttcccagtccactacacagatgtcagcaacatgtctagactggccagacagagactgctgggaagaagctggtccgtccctgtgatcagacacctgttcgcccctctgaaggagtacttcgcctgcgtgagcagcggcaacagcaacgccaacagccggggccccagcttctctagcggcctggtgccactgtccctgagagggagccacatgggccccatggagatctacaaaaccgtgagcgcctggaagcggcagcctgtgcgcgtgctgagcctgtttcggaatatcgataaagtcctgaaaagcctgggattcctggagagcggctctggctccggcggtggcaccctgaagtacgtggaggatgtgacaaacgtggtcagacgggatgtggagaagtggggccccttcgatctggtgtacggcagcacccaacccctgggcagctcttgtgaccggtgccctggctggtacatgtttcagttccaccggatcctgcagtacgccctgccgagacaggagtcccagcggccattcttttggattttcatggacaacttgctgctgaccgaggatgaccaggaaactaccactcggttcctgcagaccgaagccgtgaccctgcaggacgtgagaggccgggactaccagaacgccatgcgggtgtggtccaacatccctggactgaaaagcaagcacgcacctctgacccctaaagaagaggagtacctgcaggcccaggtgcggagcagaagcaagctggacgcccctaaggtggatctgctggtgaagaattgcctcctgcccctgagagagtacttcaagtatttcagccagaatagtctgcccctgggcggcccaagcagcggcgcccctcctcccagcggcggcagcccagccggctccccaacctctaccgaggagggcacctctgagtccgccacccccgagagcggccctggcacctccaccgagcccagcgagggcagcgcacccggcagccctgccggcagccccacctccacagaggagggaaccagcaccgagcccagcgaaggcagcgccccaggcaccagcaccgagcctagtgagggcggctctggcggcggcagcgcccaggagattaaacggatcaacaagatcagaagaagacttgtgaaagacagcaacaccaagaaggccggcaagacaggccccatgaaaaccctgctggttagagtgatgacacccgatctgagagagcggctggaaaacctgagaaagaagcctgaaaatatcccccagcccatcagcaatacatctagagccaacctgaataagctgctgaccgattacaccgaaatgaagaaggcgatcctgcatgtgtactgggaagagttccagaaggaccctgtgggcctgatgagccgggtggcccagcctgccagcaagaagatcgatcagaacaagctgaaacctgagatggacgagaagggcaacctgaccaccgccggctttgcctgctctcagtgtggccagcccctgttcgtgtacaagctggagcaggtgtctgagaagggcaaggcttacaccaactacttcggacggtgcaatgtggccgagcacgaaaagctgatcctgctggcccagctgaagcccgagaaggatagcgacgaagccgtgacatatagcctgggaaagtttgggcagagggccctggatttctacagcattcatgtgaccaaggagtccacccaccccgtgaagcccctggcccagatcgccggaaacagatacgcctccggacctgtgggaaaggccctgagcgacgcatgtatgggcacaatcgcctccttcctgtctaagtaccaggacatcatcatcgaacaccagaaggtggtgaagggcaaccagaagagactggagagcctgcgggagctggccggcaaggaaaacctggaataccctagcgtgaccctgccacctcagcctcacaccaaggagggcgttgatgcctacaacgaagtgatcgcccgggtgcgaatgtgggtgaacctgaacctgtggcagaagctgaagctaagcagagatgatgccaagcctctgctgagactgaagggattcccttcctttcctctggtcgagagacaggccaacgaagtggactggtgggacatggtgtgtaacgtgaagaagctgatcaacgagaaaaaggaggatggcaaggtgttttggcagaatctggctggctacaagagacaggaagccctgagaccatacctgagcagcgaggaagatcggaagaagggaaagaaattcgctcggtaccagctgggcgacctgctgctgcacctggaaaagaagcacggcgaggactggggaaaggtgtacgacgaggcctgggagcggattgacaagaaagtggaaggcctgagcaagcacatcaagctggaagaggaacggagaagcgaggacgcccagagcaaggccgccctgaccgactggctgcgggctaaggccagcttcgtgatcgagggcctgaaggaggccgacaaggacgagttctgcagatgcgagctgaagctgcagaagtggtacggggacctgcggggaaagcccttcgccatcgaagccgagaacagcatcctggacatcagcggcttcagcaagcagtacaactgtgccttcatctggcagaaggacggcgtgaagaagctgaacctgtacctgatcatcaactacttcaagggcggcaagctgcggttcaagaagatcaaacctgaagccttcgaagccaacagattctacaccgtgatcaacaaaaagagcggcgagatcgtgcccatggaggtgaacttcaacttcgacgaccccaacctgatcatcctgcctctggcctttggcaagagacagggcagagaattcatctggaacgacctgctgtccctggaaaccggcagcctgaagctggccaacggaagagtgatcgagaagacactgtacaacagaagaacccggcaggatgagcctgccctgttcgtggccctgaccttcgagcggcgggaggtcctggactcctccaatatcaaaccaatgaacctgatcggcgtggcaagaggcgaaaacatccccgccgtgatcgccctgaccgaccccgagggctgcccactgagccggtttaaggatagcctgggaaacccaacccacatcctgagaatcggcgagagctataaggagaagcagcggaccatccaggccaagaaggaggtggagcagcggagagccggcggctacagccggaagtacgccagcaaagccaagaatctggcagacgatatggtgagaaacaccgctagagatctgctgtactacgccgtgacccaggatgccatgctgatcttcgccaacctgagccggggcttcggccggcagggcaagcggaccttcatggccgagagacagtacacacggatggaggactggctgaccgccaagctggcctacgagggcctgagcaagacctacctgtccaagacactggcccagtacacctccaagacatgcagcaactgtgggtttaccatcaccagcgccgactacgacagggtgctggagaagctgaagaagacagcaacaggctggatgaccacaattaacggcaaggagctgaaggtggagggccagattacctactacaacagatacaagagacagaacgtagtcaaggacctgtccgtcgagctggatagactgagcgaagaatctgtgaacaacgacatctcctcctggacaaagggcagaagcggagaagctctgagcctcctgaagaaaagattctcccatagacccgtgcaggagaagttcgtgtgcctgaactgcggcttcgagacacacgcagccgagcaagccgccctgaacatcgccagatcctggctgttcctgcggagccaggagtacaagaaataccagacaaacaagacaaccggcaacaccgataagagagccttcgtcgagacctggcagtccttttaccggaagaagcttaaggaggtgtggaaacctgccgtgcggtctggcggatctggcggaggctccacaagcagccccgtgctggtgagcttcgacgacgtgttcgtgagcttcaccagggaggagtggcaggtgctggacaacgcccagagggccctgtacggcgacgtgatgctggagacctacaggagcctggtgctgctgggccagtgcatcaccaagcccgaggtgatcttcaagctggagcagggcgtggagccctggaccggcggcgagccccacaaccagagcccccccgacgtgcaggaggtggacaccagccccaagaaaaagagaaaagtctaagctgccttctgcggggcttgccttctggccatgcccttcttctctcccttgcacctgtacctcttggtctttgaataaagcctgagtaggaaggctagcaaaaaaaaaaaaaaaaaaaaaaaaaaaaaaaaaaaaaaaaaaaaaaaaaaaaaaaaaaaaaaaaaaaaaaaaaaaaaaaa

SEQ ID NO: 6957 - RNA, 5797 nt, synthetic construct
  source 1..5797: mol_type = other RNA
aggaaataagagagaaaagaagagtaagaagaaatataagagccaccatggcccctaagaagaagcgtaaagtgagccggatggaacgcctcgtctacgaggtgcggcagaagtgcagaaacatcgaggacatctgcatctcctgcggatctctgaacgtgaccctggagcacccactgttcatcggcggcatgtgccagaactgtaaaaactgttttctggagtgtgcctatcaatacgacgatgacggctaccagagctactgcaccatctgttgcggcggaagagaggtgctgatgtgtggaaataacaactgctgccggtgcttctgcgtggaatgcgtggacctgctggtgggccccggcgccgcccaggccgctattaaggaagatccttggaactgctacatgtgcggccacaagggcacatacggcctgctgagacggagagaggactggcctagcagactgcagatgttcttcgccaataaccacgaccaggagttcgacccccctaaggtgtaccctcccgtccccgccgagaagagaaagcccatccgggtcctgagcctgttcgatggcatcgccaccggtctgctggtgctgaaggacctgggcatccaggtggataggtacattgcctccgaggtgtgcgaggactccatcaccgtgggaatggtgcgtcatcagggcaagatcatgtacgtgggcgacgtgcggagcgtgacacagaagcatatccaggagtggggccctttcgacctggtgatcggcggcagcccttgcaatgacctgagcatcgtgaacccagcccggaagggcctgtacgagggaaccggcagactgttcttcgagttttacagactgctgcacgacgcccggcctaaggaaggcgacgaccggcccttcttttggctgttcgagaatgtggtggccatgggagtcagcgacaagcgggatattagccggttcctggagagcaaccccgtgatgatcgatgccaaggaagtgagcgccgcccaccgggccagatacttctggggcaatctgcctggcatgaacagacccctggccagcaccgtgaacgacaagctggagctgcaggagtgcctggagcacggccggatcgccaagttcagcaaggtgagaaccatcaccacccgaagcaacagcatcaaacaaggcaaggaccagcactttcctgtgttcatgaacgagaaggaggacatcctgtggtgtaccgagatggagagagtgttcgggttcccagtccactacacagatgtcagcaacatgtctagactggccagacagagactgctgggaagaagctggtccgtccctgtgatcagacacctgttcgcccctctgaaggagtacttcgcctgcgtgagcagcggcaacagcaacgccaacagccggggccccagcttctctagcggcctggtgccactgtccctgagagggagccacatgggccccatggagatctacaaaaccgtgagcgcctggaagcggcagcctgtgcgcgtgctgagcctgtttcggaatatcgataaagtcctgaaaagcctgggattcctggagagcggctctggctccggcggtggcaccctgaagtacgtggaggatgtgacaaacgtggtcagacgggatgtggagaagtggggccccttcgatctggtgtacggcagcacccaacccctgggcagctcttgtgaccggtgccctggctggtacatgtttcagttccaccggatcctgcagtacgccctgccgagacaggagtcccagcggccattcttttggattttcatggacaacttgctgctgaccgaggatgaccaggaaactaccactcggttcctgcagaccgaagccgtgaccctgcaggacgtgagaggccgggactaccagaacgccatgcgggtgtggtccaacatccctggactgaaaagcaagcacgcacctctgacccctaaagaagaggagtacctgcaggcccaggtgcggagcagaagcaagctggacgcccctaaggtggatctgctggtgaagaattgcctcctgcccctgagagagtacttcaagtatttcagccagaatagtctgcccctgggcggcccaagcagcggcgcccctcctcccagcggcggcagcccagccggctccccaacctctaccgaggagggcacctctgagtccgccacccccgagagcggccctggcacctccaccgagcccagcgagggcagcgcacccggcagccctgccggcagccccacctccacagaggagggaaccagcaccgagcccagcgaaggcagcgccccaggcaccagcaccgagcctagtgagggcggctctggcggcggcagcgcccaggagattaaacggatcaacaagatcagaagaagacttgtgaaagacagcaacaccaagaaggccggcaagacaggccccatgaaaaccctgctggttagagtgatgacacccgatctgagagagcggctggaaaacctgagaaagaagcctgaaaatatcccccagcccatcagcaatacatctagagccaacctgaataagctgctgaccgattacaccgaaatgaagaaggcgatcctgcatgtgtactgggaagagttccagaaggaccctgtgggcctgatgagccgggtggcccagcctgccagcaagaagatcgatcagaacaagctgaaacctgagatggacgagaagggcaacctgaccaccgccggctttgcctgctctcagtgtggccagcccctgttcgtgtacaagctggagcaggtgtctgagaagggcaaggcttacaccaactacttcggacggtgcaatgtggccgagcacgaaaagctgatcctgctggcccagctgaagcccgagaaggatagcgacgaagccgtgacatatagcctgggaaagtttgggcagagggccctggatttctacagcattcatgtgaccaaggagtccacccaccccgtgaagcccctggcccagatcgccggaaacagatacgcctccggacctgtgggaaaggccctgagcgacgcatgtatgggcacaatcgcctccttcctgtctaagtaccaggacatcatcatcgaacaccagaaggtggtgaagggcaaccagaagagactggagagcctgcgggagctggccggcaaggaaaacctggaataccctagcgtgaccctgccacctcagcctcacaccaaggagggcgttgatgcctacaacgaagtgatcgcccgggtgcgaatgtgggtgaacctgaacctgtggcagaagctgaagctaagcagagatgatgccaagcctctgctgagactgaagggattcccttcctttcctctggtcgagagacaggccaacgaagtggactggtgggacatggtgtgtaacgtgaagaagctgatcaacgagaaaaaggaggatggcaaggtgttttggcagaatctggctggctacaagagacaggaagccctgagaccatacctgagcagcgaggaagatcggaagaagggaaagaaattcgctcggtaccagctgggcgacctgctgctgcacctggaaaagaagcacggcgaggactggggaaaggtgtacgacgaggcctgggagcggattgacaagaaagtggaaggcctgagcaagcacatcaagctggaagaggaacggagaagcgaggacgcccagagcaaggccgccctgaccgactggctgcgggctaaggccagcttcgtgatcgagggcctgaaggaggccgacaaggacgagttctgcagatgcgagctgaagctgcagaagtggtacggggacctgcggggaaagcccttcgccatcgaagccgagaacagcatcctggacatcagcggcttcagcaagcagtacaactgtgccttcatctggcagaaggacggcgtgaagaagctgaacctgtacctgatcatcaactacttcaagggcggcaagctgcggttcaagaagatcaaacctgaagccttcgaagccaacagattctacaccgtgatcaacaaaaagagcggcgagatcgtgcccatggaggtgaacttcaacttcgacgaccccaacctgatcatcctgcctctggcctttggcaagagacagggcagagaattcatctggaacgacctgctgtccctggaaaccggcagcctgaagctggccaacggaagagtgatcgagaagacactgtacaacagaagaacccggcaggatgagcctgccctgttcgtggccctgaccttcgagcggcgggaggtcctggactcctccaatatcaaaccaatgaacctgatcggcgtggcaagaggcgaaaacatccccgccgtgatcgccctgaccgaccccgagggctgcccactgagccggtttaaggatagcctgggaaacccaacccacatcctgagaatcggcgagagctataaggagaagcagcggaccatccaggccaagaaggaggtggagcagcggagagccggcggctacagccggaagtacgccagcaaagccaagaatctggcagacgatatggtgagaaacaccgctagagatctgctgtactacgccgtgacccaggatgccatgctgatcttcgccaacctgagccggggcttcggccggcagggcaagcggaccttcatggccgagagacagtacacacggatggaggactggctgaccgccaagctggcctacgagggcctgagcaagacctacctgtccaagacactggcccagtacacctccaagacatgcagcaactgtgggtttaccatcaccagcgccgactacgacagggtgctggagaagctgaagaagacagcaacaggctggatgaccacaattaacggcaaggagctgaaggtggagggccagattacctactacaacagatacaagagacagaacgtagtcaaggacctgtccgtcgagctggatagactgagcgaagaatctgtgaacaacgacatctcctcctggacaaagggcagaagcggagaagctctgagcctcctgaagaaaagattctcccatagacccgtgcaggagaagttcgtgtgcctgaactgcggcttcgagacacacgcagccgagcaagccgccctgaacatcgccagatcctggctgttcctgcggagccaggagtacaagaaataccagacaaacaagacaaccggcaacaccgataagagagccttcgtcgagacctggcagtccttttaccggaagaagcttaaggaggtgtggaaacctgccgtgcggtctggcggatctggcggaggctccacaagcttccaggagagcgtgaccttcaaggacgtggccgtggacttcacccaggaggagtggaagcagctggaccccgcccagagggacctgtacagggacgtgatgctggagaactacaggaacctggtgagcctgggcctgcccgtgttcaagcccgacgtgatcagccagctggagaggggcgaggccccctggatccccgaggtgcccaggagcatctgccagggcgaggtggtgaggaccaggaccagccccaagaaaaagagaaaagtctaagctgccttctgcggggcttgccttctggccatgcccttcttctctcccttgcacctgtacctcttggtctttgaataaagcctgagtaggaaggctagcaaaaaaaaaaaaaaaaaaaaaaaaaaaaaaaaaaaaaaaaaaaaaaaaaaaaaaaaaaaaaaaaaaaaaaaaaaaaaaaa

SEQ ID NO: 6958 - RNA, 5797 nt, synthetic construct
  source 1..5797: mol_type = other RNA
aggaaataagagagaaaagaagagtaagaagaaatataagagccaccatggcccctaagaagaagcgtaaagtgagccggatggaacgcctcgtctacgaggtgcggcagaagtgcagaaacatcgaggacatctgcatctcctgcggatctctgaacgtgaccctggagcacccactgttcatcggcggcatgtgccagaactgtaaaaactgttttctggagtgtgcctatcaatacgacgatgacggctaccagagctactgcaccatctgttgcggcggaagagaggtgctgatgtgtggaaataacaactgctgccggtgcttctgcgtggaatgcgtggacctgctggtgggccccggcgccgcccaggccgctattaaggaagatccttggaactgctacatgtgcggccacaagggcacatacggcctgctgagacggagagaggactggcctagcagactgcagatgttcttcgccaataaccacgaccaggagttcgacccccctaaggtgtaccctcccgtccccgccgagaagagaaagcccatccgggtcctgagcctgttcgatggcatcgccaccggtctgctggtgctgaaggacctgggcatccaggtggataggtacattgcctccgaggtgtgcgaggactccatcaccgtgggaatggtgcgtcatcagggcaagatcatgtacgtgggcgacgtgcggagcgtgacacagaagcatatccaggagtggggccctttcgacctggtgatcggcggcagcccttgcaatgacctgagcatcgtgaacccagcccggaagggcctgtacgagggaaccggcagactgttcttcgagttttacagactgctgcacgacgcccggcctaaggaaggcgacgaccggcccttcttttggctgttcgagaatgtggtggccatgggagtcagcgacaagcgggatattagccggttcctggagagcaaccccgtgatgatcgatgccaaggaagtgagcgccgcccaccgggccagatacttctggggcaatctgcctggcatgaacagacccctggccagcaccgtgaacgacaagctggagctgcaggagtgcctggagcacggccggatcgccaagttcagcaaggtgagaaccatcaccacccgaagcaacagcatcaaacaaggcaaggaccagcactttcctgtgttcatgaacgagaaggaggacatcctgtggtgtaccgagatggagagagtgttcgggttcccagtccactacacagatgtcagcaacatgtctagactggccagacagagactgctgggaagaagctggtccgtccctgtgatcagacacctgttcgcccctctgaaggagtacttcgcctgcgtgagcagcggcaacagcaacgccaacagccggggccccagcttctctagcggcctggtgccactgtccctgagagggagccacatgggccccatggagatctacaaaaccgtgagcgcctggaagcggcagcctgtgcgcgtgctgagcctgtttcggaatatcgataaagtcctgaaaagcctgggattcctggagagcggctctggctccggcggtggcaccctgaagtacgtggaggatgtgacaaacgtggtcagacgggatgtggagaagtggggccccttcgatctggtgtacggcagcacccaacccctgggcagctcttgtgaccggtgccctggctggtacatgtttcagttccaccggatcctgcagtacgccctgccgagacaggagtcccagcggccattcttttggattttcatggacaacttgctgctgaccgaggatgaccaggaaactaccactcggttcctgcagaccgaagccgtgaccctgcaggacgtgagaggccgggactaccagaacgccatgcgggtgtggtccaacatccctggactgaaaagcaagcacgcacctctgacccctaaagaagaggagtacctgcaggcccaggtgcggagcagaagcaagctggacgcccctaaggtggatctgctggtgaagaattgcctcctgcccctgagagagtacttcaagtatttcagccagaatagtctgcccctgggcggcccaagcagcggcgcccctcctcccagcggcggcagcccagccggctccccaacctctaccgaggagggcacctctgagtccgccacccccgagagcggccctggcacctccaccgagcccagcgagggcagcgcacccggcagccctgccggcagccccacctccacagaggagggaaccagcaccgagcccagcgaaggcagcgccccaggcaccagcaccgagcctagtgagggcggctctggcggcggcagcgcccaggagattaaacggatcaacaagatcagaagaagacttgtgaaagacagcaacaccaagaaggccggcaagacaggccccatgaaaaccctgctggttagagtgatgacacccgatctgagagagcggctggaaaacctgagaaagaagcctgaaaatatcccccagcccatcagcaatacatctagagccaacctgaataagctgctgaccgattacaccgaaatgaagaaggcgatcctgcatgtgtactgggaagagttccagaaggaccctgtgggcctgatgagccgggtggcccagcctgccagcaagaagatcgatcagaacaagctgaaacctgagatggacgagaagggcaacctgaccaccgccggctttgcctgctctcagtgtggccagcccctgttcgtgtacaagctggagcaggtgtctgagaagggcaaggcttacaccaactacttcggacggtgcaatgtggccgagcacgaaaagctgatcctgctggcccagctgaagcccgagaaggatagcgacgaagccgtgacatatagcctgggaaagtttgggcagagggccctggatttctacagcattcatgtgaccaaggagtccacccaccccgtgaagcccctggcccagatcgccggaaacagatacgcctccggacctgtgggaaaggccctgagcgacgcatgtatgggcacaatcgcctccttcctgtctaagtaccaggacatcatcatcgaacaccagaaggtggtgaagggcaaccagaagagactggagagcctgcgggagctggccggcaaggaaaacctggaataccctagcgtgaccctgccacctcagcctcacaccaaggagggcgttgatgcctacaacgaagtgatcgcccgggtgcgaatgtgggtgaacctgaacctgtggcagaagctgaagctaagcagagatgatgccaagcctctgctgagactgaagggattcccttcctttcctctggtcgagagacaggccaacgaagtggactggtgggacatggtgtgtaacgtgaagaagctgatcaacgagaaaaaggaggatggcaaggtgttttggcagaatctggctggctacaagagacaggaagccctgagaccatacctgagcagcgaggaagatcggaagaagggaaagaaattcgctcggtaccagctgggcgacctgctgctgcacctggaaaagaagcacggcgaggactggggaaaggtgtacgacgaggcctgggagcggattgacaagaaagtggaaggcctgagcaagcacatcaagctggaagaggaacggagaagcgaggacgcccagagcaaggccgccctgaccgactggctgcgggctaaggccagcttcgtgatcgagggcctgaaggaggccgacaaggacgagttctgcagatgcgagctgaagctgcagaagtggtacggggacctgcggggaaagcccttcgccatcgaagccgagaacagcatcctggacatcagcggcttcagcaagcagtacaactgtgccttcatctggcagaaggacggcgtgaagaagctgaacctgtacctgatcatcaactacttcaagggcggcaagctgcggttcaagaagatcaaacctgaagccttcgaagccaacagattctacaccgtgatcaacaaaaagagcggcgagatcgtgcccatggaggtgaacttcaacttcgacgaccccaacctgatcatcctgcctctggcctttggcaagagacagggcagagaattcatctggaacgacctgctgtccctggaaaccggcagcctgaagctggccaacggaagagtgatcgagaagacactgtacaacagaagaacccggcaggatgagcctgccctgttcgtggccctgaccttcgagcggcgggaggtcctggactcctccaatatcaaaccaatgaacctgatcggcgtggcaagaggcgaaaacatccccgccgtgatcgccctgaccgaccccgagggctgcccactgagccggtttaaggatagcctgggaaacccaacccacatcctgagaatcggcgagagctataaggagaagcagcggaccatccaggccaagaaggaggtggagcagcggagagccggcggctacagccggaagtacgccagcaaagccaagaatctggcagacgatatggtgagaaacaccgctagagatctgctgtactacgccgtgacccaggatgccatgctgatcttcgccaacctgagccggggcttcggccggcagggcaagcggaccttcatggccgagagacagtacacacggatggaggactggctgaccgccaagctggcctacgagggcctgagcaagacctacctgtccaagacactggcccagtacacctccaagacatgcagcaactgtgggtttaccatcaccagcgccgactacgacagggtgctggagaagctgaagaagacagcaacaggctggatgaccacaattaacggcaaggagctgaaggtggagggccagattacctactacaacagatacaagagacagaacgtagtcaaggacctgtccgtcgagctggatagactgagcgaagaatctgtgaacaacgacatctcctcctggacaaagggcagaagcggagaagctctgagcctcctgaagaaaagattctcccatagacccgtgcaggagaagttcgtgtgcctgaactgcggcttcgagacacacgcagccgagcaagccgccctgaacatcgccagatcctggctgttcctgcggagccaggagtacaagaaataccagacaaacaagacaaccggcaacaccgataagagagccttcgtcgagacctggcagtccttttaccggaagaagcttaaggaggtgtggaaacctgccgtgcggtctggcggatctggcggaggctccacaagcgcccaggtgcccgtgaccttcgaggacatcgccgtgtacttcagccaggaggagtgggaggacctggaggagcagcagagggagctgtacaaggacgtgatgaaggagaactacgagaccctgagcagcctgggcccccccgccgtgacccccgacatcatcagccacatcgagaggggcgaggagccctacatcaggttcgagagcggccccgaggagagggagatcggcaagagcagctgcaccagccccaagaaaaagagaaaagtctaagctgccttctgcggggcttgccttctggccatgcccttcttctctcccttgcacctgtacctcttggtctttgaataaagcctgagtaggaaggctagcaaaaaaaaaaaaaaaaaaaaaaaaaaaaaaaaaaaaaaaaaaaaaaaaaaaaaaaaaaaaaaaaaaaaaaaaaaaaaaaa

SEQ ID NO: 6959 - RNA, 5797 nt, synthetic construct
  source 1..5797: mol_type = other RNA
aggaaataagagagaaaagaagagtaagaagaaatataagagccaccatggcccctaagaagaagcgtaaagtgagccggatggaacgcctcgtctacgaggtgcggcagaagtgcagaaacatcgaggacatctgcatctcctgcggatctctgaacgtgaccctggagcacccactgttcatcggcggcatgtgccagaactgtaaaaactgttttctggagtgtgcctatcaatacgacgatgacggctaccagagctactgcaccatctgttgcggcggaagagaggtgctgatgtgtggaaataacaactgctgccggtgcttctgcgtggaatgcgtggacctgctggtgggccccggcgccgcccaggccgctattaaggaagatccttggaactgctacatgtgcggccacaagggcacatacggcctgctgagacggagagaggactggcctagcagactgcagatgttcttcgccaataaccacgaccaggagttcgacccccctaaggtgtaccctcccgtccccgccgagaagagaaagcccatccgggtcctgagcctgttcgatggcatcgccaccggtctgctggtgctgaaggacctgggcatccaggtggataggtacattgcctccgaggtgtgcgaggactccatcaccgtgggaatggtgcgtcatcagggcaagatcatgtacgtgggcgacgtgcggagcgtgacacagaagcatatccaggagtggggccctttcgacctggtgatcggcggcagcccttgcaatgacctgagcatcgtgaacccagcccggaagggcctgtacgagggaaccggcagactgttcttcgagttttacagactgctgcacgacgcccggcctaaggaaggcgacgaccggcccttcttttggctgttcgagaatgtggtggccatgggagtcagcgacaagcgggatattagccggttcctggagagcaaccccgtgatgatcgatgccaaggaagtgagcgccgcccaccgggccagatacttctggggcaatctgcctggcatgaacagacccctggccagcaccgtgaacgacaagctggagctgcaggagtgcctggagcacggccggatcgccaagttcagcaaggtgagaaccatcaccacccgaagcaacagcatcaaacaaggcaaggaccagcactttcctgtgttcatgaacgagaaggaggacatcctgtggtgtaccgagatggagagagtgttcgggttcccagtccactacacagatgtcagcaacatgtctagactggccagacagagactgctgggaagaagctggtccgtccctgtgatcagacacctgttcgcccctctgaaggagtacttcgcctgcgtgagcagcggcaacagcaacgccaacagccggggccccagcttctctagcggcctggtgccactgtccctgagagggagccacatgggccccatggagatctacaaaaccgtgagcgcctggaagcggcagcctgtgcgcgtgctgagcctgtttcggaatatcgataaagtcctgaaaagcctgggattcctggagagcggctctggctccggcggtggcaccctgaagtacgtggaggatgtgacaaacgtggtcagacgggatgtggagaagtggggccccttcgatctggtgtacggcagcacccaacccctgggcagctcttgtgaccggtgccctggctggtacatgtttcagttccaccggatcctgcagtacgccctgccgagacaggagtcccagcggccattcttttggattttcatggacaacttgctgctgaccgaggatgaccaggaaactaccactcggttcctgcagaccgaagccgtgaccctgcaggacgtgagaggccgggactaccagaacgccatgcgggtgtggtccaacatccctggactgaaaagcaagcacgcacctctgacccctaaagaagaggagtacctgcaggcccaggtgcggagcagaagcaagctggacgcccctaaggtggatctgctggtgaagaattgcctcctgcccctgagagagtacttcaagtatttcagccagaatagtctgcccctgggcggcccaagcagcggcgcccctcctcccagcggcggcagcccagccggctccccaacctctaccgaggagggcacctctgagtccgccacccccgagagcggccctggcacctccaccgagcccagcgagggcagcgcacccggcagccctgccggcagccccacctccacagaggagggaaccagcaccgagcccagcgaaggcagcgccccaggcaccagcaccgagcctagtgagggcggctctggcggcggcagcgcccaggagattaaacggatcaacaagatcagaagaagacttgtgaaagacagcaacaccaagaaggccggcaagacaggccccatgaaaaccctgctggttagagtgatgacacccgatctgagagagcggctggaaaacctgagaaagaagcctgaaaatatcccccagcccatcagcaatacatctagagccaacctgaataagctgctgaccgattacaccgaaatgaagaaggcgatcctgcatgtgtactgggaagagttccagaaggaccctgtgggcctgatgagccgggtggcccagcctgccagcaagaagatcgatcagaacaagctgaaacctgagatggacgagaagggcaacctgaccaccgccggctttgcctgctctcagtgtggccagcccctgttcgtgtacaagctggagcaggtgtctgagaagggcaaggcttacaccaactacttcggacggtgcaatgtggccgagcacgaaaagctgatcctgctggcccagctgaagcccgagaaggatagcgacgaagccgtgacatatagcctgggaaagtttgggcagagggccctggatttctacagcattcatgtgaccaaggagtccacccaccccgtgaagcccctggcccagatcgccggaaacagatacgcctccggacctgtgggaaaggccctgagcgacgcatgtatgggcacaatcgcctccttcctgtctaagtaccaggacatcatcatcgaacaccagaaggtggtgaagggcaaccagaagagactggagagcctgcgggagctggccggcaaggaaaacctggaataccctagcgtgaccctgccacctcagcctcacaccaaggagggcgttgatgcctacaacgaagtgatcgcccgggtgcgaatgtgggtgaacctgaacctgtggcagaagctgaagctaagcagagatgatgccaagcctctgctgagactgaagggattcccttcctttcctctggtcgagagacaggccaacgaagtggactggtgggacatggtgtgtaacgtgaagaagctgatcaacgagaaaaaggaggatggcaaggtgttttggcagaatctggctggctacaagagacaggaagccctgagaccatacctgagcagcgaggaagatcggaagaagggaaagaaattcgctcggtaccagctgggcgacctgctgctgcacctggaaaagaagcacggcgaggactggggaaaggtgtacgacgaggcctgggagcggattgacaagaaagtggaaggcctgagcaagcacatcaagctggaagaggaacggagaagcgaggacgcccagagcaaggccgccctgaccgactggctgcgggctaaggccagcttcgtgatcgagggcctgaaggaggccgacaaggacgagttctgcagatgcgagctgaagctgcagaagtggtacggggacctgcggggaaagcccttcgccatcgaagccgagaacagcatcctggacatcagcggcttcagcaagcagtacaactgtgccttcatctggcagaaggacggcgtgaagaagctgaacctgtacctgatcatcaactacttcaagggcggcaagctgcggttcaagaagatcaaacctgaagccttcgaagccaacagattctacaccgtgatcaacaaaaagagcggcgagatcgtgcccatggaggtgaacttcaacttcgacgaccccaacctgatcatcctgcctctggcctttggcaagagacagggcagagaattcatctggaacgacctgctgtccctggaaaccggcagcctgaagctggccaacggaagagtgatcgagaagacactgtacaacagaagaacccggcaggatgagcctgccctgttcgtggccctgaccttcgagcggcgggaggtcctggactcctccaatatcaaaccaatgaacctgatcggcgtggcaagaggcgaaaacatccccgccgtgatcgccctgaccgaccccgagggctgcccactgagccggtttaaggatagcctgggaaacccaacccacatcctgagaatcggcgagagctataaggagaagcagcggaccatccaggccaagaaggaggtggagcagcggagagccggcggctacagccggaagtacgccagcaaagccaagaatctggcagacgatatggtgagaaacaccgctagagatctgctgtactacgccgtgacccaggatgccatgctgatcttcgccaacctgagccggggcttcggccggcagggcaagcggaccttcatggccgagagacagtacacacggatggaggactggctgaccgccaagctggcctacgagggcctgagcaagacctacctgtccaagacactggcccagtacacctccaagacatgcagcaactgtgggtttaccatcaccagcgccgactacgacagggtgctggagaagctgaagaagacagcaacaggctggatgaccacaattaacggcaaggagctgaaggtggagggccagattacctactacaacagatacaagagacagaacgtagtcaaggacctgtccgtcgagctggatagactgagcgaagaatctgtgaacaacgacatctcctcctggacaaagggcagaagcggagaagctctgagcctcctgaagaaaagattctcccatagacccgtgcaggagaagttcgtgtgcctgaactgcggcttcgagacacacgcagccgagcaagccgccctgaacatcgccagatcctggctgttcctgcggagccaggagtacaagaaataccagacaaacaagacaaccggcaacaccgataagagagccttcgtcgagacctggcagtccttttaccggaagaagcttaaggaggtgtggaaacctgccgtgcggtctggcggatctggcggaggctccacaagcagctacgagggcagcgtgagcttcagggacgtggccatcgacttcagcagggaggagtggaggcacctggacctgagccagaggaacctgtacagggacgtgatgctggagacctacagccacctgctgagcgtgggctaccaggtgcccgaggccgaggtggtgatgctggagcagggcaacgagccctgggccctgcagggcgagaggccccaccagagctgccccggcgagaagctgtggaccagccccaagaaaaagagaaaagtctaagctgccttctgcggggcttgccttctggccatgcccttcttctctcccttgcacctgtacctcttggtctttgaataaagcctgagtaggaaggctagcaaaaaaaaaaaaaaaaaaaaaaaaaaaaaaaaaaaaaaaaaaaaaaaaaaaaaaaaaaaaaaaaaaaaaaaaaaaaaaaa

SEQ ID NO: 6960 - RNA, 5797 nt, synthetic construct
  source 1..5797: mol_type = other RNA
aggaaataagagagaaaagaagagtaagaagaaatataagagccaccatggcccctaagaagaagcgtaaagtgagccggatggaacgcctcgtctacgaggtgcggcagaagtgcagaaacatcgaggacatctgcatctcctgcggatctctgaacgtgaccctggagcacccactgttcatcggcggcatgtgccagaactgtaaaaactgttttctggagtgtgcctatcaatacgacgatgacggctaccagagctactgcaccatctgttgcggcggaagagaggtgctgatgtgtggaaataacaactgctgccggtgcttctgcgtggaatgcgtggacctgctggtgggccccggcgccgcccaggccgctattaaggaagatccttggaactgctacatgtgcggccacaagggcacatacggcctgctgagacggagagaggactggcctagcagactgcagatgttcttcgccaataaccacgaccaggagttcgacccccctaaggtgtaccctcccgtccccgccgagaagagaaagcccatccgggtcctgagcctgttcgatggcatcgccaccggtctgctggtgctgaaggacctgggcatccaggtggataggtacattgcctccgaggtgtgcgaggactccatcaccgtgggaatggtgcgtcatcagggcaagatcatgtacgtgggcgacgtgcggagcgtgacacagaagcatatccaggagtggggccctttcgacctggtgatcggcggcagcccttgcaatgacctgagcatcgtgaacccagcccggaagggcctgtacgagggaaccggcagactgttcttcgagttttacagactgctgcacgacgcccggcctaaggaaggcgacgaccggcccttcttttggctgttcgagaatgtggtggccatgggagtcagcgacaagcgggatattagccggttcctggagagcaaccccgtgatgatcgatgccaaggaagtgagcgccgcccaccgggccagatacttctggggcaatctgcctggcatgaacagacccctggccagcaccgtgaacgacaagctggagctgcaggagtgcctggagcacggccggatcgccaagttcagcaaggtgagaaccatcaccacccgaagcaacagcatcaaacaaggcaaggaccagcactttcctgtgttcatgaacgagaaggaggacatcctgtggtgtaccgagatggagagagtgttcgggttcccagtccactacacagatgtcagcaacatgtctagactggccagacagagactgctgggaagaagctggtccgtccctgtgatcagacacctgttcgcccctctgaaggagtacttcgcctgcgtgagcagcggcaacagcaacgccaacagccggggccccagcttctctagcggcctggtgccactgtccctgagagggagccacatgggccccatggagatctacaaaaccgtgagcgcctggaagcggcagcctgtgcgcgtgctgagcctgtttcggaatatcgataaagtcctgaaaagcctgggattcctggagagcggctctggctccggcggtggcaccctgaagtacgtggaggatgtgacaaacgtggtcagacgggatgtggagaagtggggccccttcgatctggtgtacggcagcacccaacccctgggcagctcttgtgaccggtgccctggctggtacatgtttcagttccaccggatcctgcagtacgccctgccgagacaggagtcccagcggccattcttttggattttcatggacaacttgctgctgaccgaggatgaccaggaaactaccactcggttcctgcagaccgaagccgtgaccctgcaggacgtgagaggccgggactaccagaacgccatgcgggtgtggtccaacatccctggactgaaaagcaagcacgcacctctgacccctaaagaagaggagtacctgcaggcccaggtgcggagcagaagcaagctggacgcccctaaggtggatctgctggtgaagaattgcctcctgcccctgagagagtacttcaagtatttcagccagaatagtctgcccctgggcggcccaagcagcggcgcccctcctcccagcggcggcagcccagccggctccccaacctctaccgaggagggcacctctgagtccgccacccccgagagcggccctggcacctccaccgagcccagcgagggcagcgcacccggcagccctgccggcagccccacctccacagaggagggaaccagcaccgagcccagcgaaggcagcgccccaggcaccagcaccgagcctagtgagggcggctctggcggcggcagcgcccaggagattaaacggatcaacaagatcagaagaagacttgtgaaagacagcaacaccaagaaggccggcaagacaggccccatgaaaaccctgctggttagagtgatgacacccgatctgagagagcggctggaaaacctgagaaagaagcctgaaaatatcccccagcccatcagcaatacatctagagccaacctgaataagctgctgaccgattacaccgaaatgaagaaggcgatcctgcatgtgtactgggaagagttccagaaggaccctgtgggcctgatgagccgggtggcccagcctgccagcaagaagatcgatcagaacaagctgaaacctgagatggacgagaagggcaacctgaccaccgccggctttgcctgctctcagtgtggccagcccctgttcgtgtacaagctggagcaggtgtctgagaagggcaaggcttacaccaactacttcggacggtgcaatgtggccgagcacgaaaagctgatcctgctggcccagctgaagcccgagaaggatagcgacgaagccgtgacatatagcctgggaaagtttgggcagagggccctggatttctacagcattcatgtgaccaaggagtccacccaccccgtgaagcccctggcccagatcgccggaaacagatacgcctccggacctgtgggaaaggccctgagcgacgcatgtatgggcacaatcgcctccttcctgtctaagtaccaggacatcatcatcgaacaccagaaggtggtgaagggcaaccagaagagactggagagcctgcgggagctggccggcaaggaaaacctggaataccctagcgtgaccctgccacctcagcctcacaccaaggagggcgttgatgcctacaacgaagtgatcgcccgggtgcgaatgtgggtgaacctgaacctgtggcagaagctgaagctaagcagagatgatgccaagcctctgctgagactgaagggattcccttcctttcctctggtcgagagacaggccaacgaagtggactggtgggacatggtgtgtaacgtgaagaagctgatcaacgagaaaaaggaggatggcaaggtgttttggcagaatctggctggctacaagagacaggaagccctgagaccatacctgagcagcgaggaagatcggaagaagggaaagaaattcgctcggtaccagctgggcgacctgctgctgcacctggaaaagaagcacggcgaggactggggaaaggtgtacgacgaggcctgggagcggattgacaagaaagtggaaggcctgagcaagcacatcaagctggaagaggaacggagaagcgaggacgcccagagcaaggccgccctgaccgactggctgcgggctaaggccagcttcgtgatcgagggcctgaaggaggccgacaaggacgagttctgcagatgcgagctgaagctgcagaagtggtacggggacctgcggggaaagcccttcgccatcgaagccgagaacagcatcctggacatcagcggcttcagcaagcagtacaactgtgccttcatctggcagaaggacggcgtgaagaagctgaacctgtacctgatcatcaactacttcaagggcggcaagctgcggttcaagaagatcaaacctgaagccttcgaagccaacagattctacaccgtgatcaacaaaaagagcggcgagatcgtgcccatggaggtgaacttcaacttcgacgaccccaacctgatcatcctgcctctggcctttggcaagagacagggcagagaattcatctggaacgacctgctgtccctggaaaccggcagcctgaagctggccaacggaagagtgatcgagaagacactgtacaacagaagaacccggcaggatgagcctgccctgttcgtggccctgaccttcgagcggcgggaggtcctggactcctccaatatcaaaccaatgaacctgatcggcgtggcaagaggcgaaaacatccccgccgtgatcgccctgaccgaccccgagggctgcccactgagccggtttaaggatagcctgggaaacccaacccacatcctgagaatcggcgagagctataaggagaagcagcggaccatccaggccaagaaggaggtggagcagcggagagccggcggctacagccggaagtacgccagcaaagccaagaatctggcagacgatatggtgagaaacaccgctagagatctgctgtactacgccgtgacccaggatgccatgctgatcttcgccaacctgagccggggcttcggccggcagggcaagcggaccttcatggccgagagacagtacacacggatggaggactggctgaccgccaagctggcctacgagggcctgagcaagacctacctgtccaagacactggcccagtacacctccaagacatgcagcaactgtgggtttaccatcaccagcgccgactacgacagggtgctggagaagctgaagaagacagcaacaggctggatgaccacaattaacggcaaggagctgaaggtggagggccagattacctactacaacagatacaagagacagaacgtagtcaaggacctgtccgtcgagctggatagactgagcgaagaatctgtgaacaacgacatctcctcctggacaaagggcagaagcggagaagctctgagcctcctgaagaaaagattctcccatagacccgtgcaggagaagttcgtgtgcctgaactgcggcttcgagacacacgcagccgagcaagccgccctgaacatcgccagatcctggctgttcctgcggagccaggagtacaagaaataccagacaaacaagacaaccggcaacaccgataagagagccttcgtcgagacctggcagtccttttaccggaagaagcttaaggaggtgtggaaacctgccgtgcggtctggcggatctggcggaggctccacaagcatggcccaggagagcgtgatgttcagcgacgtgagcatcgacttcagccaggaggagtgggagtgcctgaacgacgaccagagggacctgtacagggacgtgatgctggagaactacagcaacctggtgagcatggccggccacagcatcagcaagcccaacgtgatcagctacctggagcagggcaaggagccctggctggtggacagggagctgaccaggggccagtggcccgccctggagaccagccccaagaaaaagagaaaagtctaagctgccttctgcggggcttgccttctggccatgcccttcttctctcccttgcacctgtacctcttggtctttgaataaagcctgagtaggaaggctagcaaaaaaaaaaaaaaaaaaaaaaaaaaaaaaaaaaaaaaaaaaaaaaaaaaaaaaaaaaaaaaaaaaaaaaaaaaaaaaaa

SEQ ID NO: 6961 - RNA, 5797 nt, synthetic construct
  source 1..5797: mol_type = other RNA
aggaaataagagagaaaagaagagtaagaagaaatataagagccaccatggcccctaagaagaagcgtaaagtgagccggatggaacgcctcgtctacgaggtgcggcagaagtgcagaaacatcgaggacatctgcatctcctgcggatctctgaacgtgaccctggagcacccactgttcatcggcggcatgtgccagaactgtaaaaactgttttctggagtgtgcctatcaatacgacgatgacggctaccagagctactgcaccatctgttgcggcggaagagaggtgctgatgtgtggaaataacaactgctgccggtgcttctgcgtggaatgcgtggacctgctggtgggccccggcgccgcccaggccgctattaaggaagatccttggaactgctacatgtgcggccacaagggcacatacggcctgctgagacggagagaggactggcctagcagactgcagatgttcttcgccaataaccacgaccaggagttcgacccccctaaggtgtaccctcccgtccccgccgagaagagaaagcccatccgggtcctgagcctgttcgatggcatcgccaccggtctgctggtgctgaaggacctgggcatccaggtggataggtacattgcctccgaggtgtgcgaggactccatcaccgtgggaatggtgcgtcatcagggcaagatcatgtacgtgggcgacgtgcggagcgtgacacagaagcatatccaggagtggggccctttcgacctggtgatcggcggcagcccttgcaatgacctgagcatcgtgaacccagcccggaagggcctgtacgagggaaccggcagactgttcttcgagttttacagactgctgcacgacgcccggcctaaggaaggcgacgaccggcccttcttttggctgttcgagaatgtggtggccatgggagtcagcgacaagcgggatattagccggttcctggagagcaaccccgtgatgatcgatgccaaggaagtgagcgccgcccaccgggccagatacttctggggcaatctgcctggcatgaacagacccctggccagcaccgtgaacgacaagctggagctgcaggagtgcctggagcacggccggatcgccaagttcagcaaggtgagaaccatcaccacccgaagcaacagcatcaaacaaggcaaggaccagcactttcctgtgttcatgaacgagaaggaggacatcctgtggtgtaccgagatggagagagtgttcgggttcccagtccactacacagatgtcagcaacatgtctagactggccagacagagactgctgggaagaagctggtccgtccctgtgatcagacacctgttcgcccctctgaaggagtacttcgcctgcgtgagcagcggcaacagcaacgccaacagccggggccccagcttctctagcggcctggtgccactgtccctgagagggagccacatgggccccatggagatctacaaaaccgtgagcgcctggaagcggcagcctgtgcgcgtgctgagcctgtttcggaatatcgataaagtcctgaaaagcctgggattcctggagagcggctctggctccggcggtggcaccctgaagtacgtggaggatgtgacaaacgtggtcagacgggatgtggagaagtggggccccttcgatctggtgtacggcagcacccaacccctgggcagctcttgtgaccggtgccctggctggtacatgtttcagttccaccggatcctgcagtacgccctgccgagacaggagtcccagcggccattcttttggattttcatggacaacttgctgctgaccgaggatgaccaggaaactaccactcggttcctgcagaccgaagccgtgaccctgcaggacgtgagaggccgggactaccagaacgccatgcgggtgtggtccaacatccctggactgaaaagcaagcacgcacctctgacccctaaagaagaggagtacctgcaggcccaggtgcggagcagaagcaagctggacgcccctaaggtggatctgctggtgaagaattgcctcctgcccctgagagagtacttcaagtatttcagccagaatagtctgcccctgggcggcccaagcagcggcgcccctcctcccagcggcggcagcccagccggctccccaacctctaccgaggagggcacctctgagtccgccacccccgagagcggccctggcacctccaccgagcccagcgagggcagcgcacccggcagccctgccggcagccccacctccacagaggagggaaccagcaccgagcccagcgaaggcagcgccccaggcaccagcaccgagcctagtgagggcggctctggcggcggcagcgcccaggagattaaacggatcaacaagatcagaagaagacttgtgaaagacagcaacaccaagaaggccggcaagacaggccccatgaaaaccctgctggttagagtgatgacacccgatctgagagagcggctggaaaacctgagaaagaagcctgaaaatatcccccagcccatcagcaatacatctagagccaacctgaataagctgctgaccgattacaccgaaatgaagaaggcgatcctgcatgtgtactgggaagagttccagaaggaccctgtgggcctgatgagccgggtggcccagcctgccagcaagaagatcgatcagaacaagctgaaacctgagatggacgagaagggcaacctgaccaccgccggctttgcctgctctcagtgtggccagcccctgttcgtgtacaagctggagcaggtgtctgagaagggcaaggcttacaccaactacttcggacggtgcaatgtggccgagcacgaaaagctgatcctgctggcccagctgaagcccgagaaggatagcgacgaagccgtgacatatagcctgggaaagtttgggcagagggccctggatttctacagcattcatgtgaccaaggagtccacccaccccgtgaagcccctggcccagatcgccggaaacagatacgcctccggacctgtgggaaaggccctgagcgacgcatgtatgggcacaatcgcctccttcctgtctaagtaccaggacatcatcatcgaacaccagaaggtggtgaagggcaaccagaagagactggagagcctgcgggagctggccggcaaggaaaacctggaataccctagcgtgaccctgccacctcagcctcacaccaaggagggcgttgatgcctacaacgaagtgatcgcccgggtgcgaatgtgggtgaacctgaacctgtggcagaagctgaagctaagcagagatgatgccaagcctctgctgagactgaagggattcccttcctttcctctggtcgagagacaggccaacgaagtggactggtgggacatggtgtgtaacgtgaagaagctgatcaacgagaaaaaggaggatggcaaggtgttttggcagaatctggctggctacaagagacaggaagccctgagaccatacctgagcagcgaggaagatcggaagaagggaaagaaattcgctcggtaccagctgggcgacctgctgctgcacctggaaaagaagcacggcgaggactggggaaaggtgtacgacgaggcctgggagcggattgacaagaaagtggaaggcctgagcaagcacatcaagctggaagaggaacggagaagcgaggacgcccagagcaaggccgccctgaccgactggctgcgggctaaggccagcttcgtgatcgagggcctgaaggaggccgacaaggacgagttctgcagatgcgagctgaagctgcagaagtggtacggggacctgcggggaaagcccttcgccatcgaagccgagaacagcatcctggacatcagcggcttcagcaagcagtacaactgtgccttcatctggcagaaggacggcgtgaagaagctgaacctgtacctgatcatcaactacttcaagggcggcaagctgcggttcaagaagatcaaacctgaagccttcgaagccaacagattctacaccgtgatcaacaaaaagagcggcgagatcgtgcccatggaggtgaacttcaacttcgacgaccccaacctgatcatcctgcctctggcctttggcaagagacagggcagagaattcatctggaacgacctgctgtccctggaaaccggcagcctgaagctggccaacggaagagtgatcgagaagacactgtacaacagaagaacccggcaggatgagcctgccctgttcgtggccctgaccttcgagcggcgggaggtcctggactcctccaatatcaaaccaatgaacctgatcggcgtggcaagaggcgaaaacatccccgccgtgatcgccctgaccgaccccgagggctgcccactgagccggtttaaggatagcctgggaaacccaacccacatcctgagaatcggcgagagctataaggagaagcagcggaccatccaggccaagaaggaggtggagcagcggagagccggcggctacagccggaagtacgccagcaaagccaagaatctggcagacgatatggtgagaaacaccgctagagatctgctgtactacgccgtgacccaggatgccatgctgatcttcgccaacctgagccggggcttcggccggcagggcaagcggaccttcatggccgagagacagtacacacggatggaggactggctgaccgccaagctggcctacgagggcctgagcaagacctacctgtccaagacactggcccagtacacctccaagacatgcagcaactgtgggtttaccatcaccagcgccgactacgacagggtgctggagaagctgaagaagacagcaacaggctggatgaccacaattaacggcaaggagctgaaggtggagggccagattacctactacaacagatacaagagacagaacgtagtcaaggacctgtccgtcgagctggatagactgagcgaagaatctgtgaacaacgacatctcctcctggacaaagggcagaagcggagaagctctgagcctcctgaagaaaagattctcccatagacccgtgcaggagaagttcgtgtgcctgaactgcggcttcgagacacacgcagccgagcaagccgccctgaacatcgccagatcctggctgttcctgcggagccaggagtacaagaaataccagacaaacaagacaaccggcaacaccgataagagagccttcgtcgagacctggcagtccttttaccggaagaagcttaaggaggtgtggaaacctgccgtgcggtctggcggatctggcggaggctccacaagcccccaggagagcgtggccttcgaggacgtggccgtgtacttcaccgccaaggagtgggacatcatggtgcccgccgagagggccctgtacagggacgtgatgctggagaactacgaggccgtggccttcgtggtgccccccaccagcaagcccgccctggtgagccacctggagcagggcaaggagagctgcttcaccaggccccagggcgtgctgtgcaggaacgactggagggccggcctgaccagccccaagaaaaagagaaaagtctaagctgccttctgcggggcttgccttctggccatgcccttcttctctcccttgcacctgtacctcttggtctttgaataaagcctgagtaggaaggctagcaaaaaaaaaaaaaaaaaaaaaaaaaaaaaaaaaaaaaaaaaaaaaaaaaaaaaaaaaaaaaaaaaaaaaaaaaaaaaaaa

SEQ ID NO: 6962 - RNA, 5797 nt, synthetic construct
  source 1..5797: mol_type = other RNA
aggaaataagagagaaaagaagagtaagaagaaatataagagccaccatggcccctaagaagaagcgtaaagtgagccggatggaacgcctcgtctacgaggtgcggcagaagtgcagaaacatcgaggacatctgcatctcctgcggatctctgaacgtgaccctggagcacccactgttcatcggcggcatgtgccagaactgtaaaaactgttttctggagtgtgcctatcaatacgacgatgacggctaccagagctactgcaccatctgttgcggcggaagagaggtgctgatgtgtggaaataacaactgctgccggtgcttctgcgtggaatgcgtggacctgctggtgggccccggcgccgcccaggccgctattaaggaagatccttggaactgctacatgtgcggccacaagggcacatacggcctgctgagacggagagaggactggcctagcagactgcagatgttcttcgccaataaccacgaccaggagttcgacccccctaaggtgtaccctcccgtccccgccgagaagagaaagcccatccgggtcctgagcctgttcgatggcatcgccaccggtctgctggtgctgaaggacctgggcatccaggtggataggtacattgcctccgaggtgtgcgaggactccatcaccgtgggaatggtgcgtcatcagggcaagatcatgtacgtgggcgacgtgcggagcgtgacacagaagcatatccaggagtggggccctttcgacctggtgatcggcggcagcccttgcaatgacctgagcatcgtgaacccagcccggaagggcctgtacgagggaaccggcagactgttcttcgagttttacagactgctgcacgacgcccggcctaaggaaggcgacgaccggcccttcttttggctgttcgagaatgtggtggccatgggagtcagcgacaagcgggatattagccggttcctggagagcaaccccgtgatgatcgatgccaaggaagtgagcgccgcccaccgggccagatacttctggggcaatctgcctggcatgaacagacccctggccagcaccgtgaacgacaagctggagctgcaggagtgcctggagcacggccggatcgccaagttcagcaaggtgagaaccatcaccacccgaagcaacagcatcaaacaaggcaaggaccagcactttcctgtgttcatgaacgagaaggaggacatcctgtggtgtaccgagatggagagagtgttcgggttcccagtccactacacagatgtcagcaacatgtctagactggccagacagagactgctgggaagaagctggtccgtccctgtgatcagacacctgttcgcccctctgaaggagtacttcgcctgcgtgagcagcggcaacagcaacgccaacagccggggccccagcttctctagcggcctggtgccactgtccctgagagggagccacatgggccccatggagatctacaaaaccgtgagcgcctggaagcggcagcctgtgcgcgtgctgagcctgtttcggaatatcgataaagtcctgaaaagcctgggattcctggagagcggctctggctccggcggtggcaccctgaagtacgtggaggatgtgacaaacgtggtcagacgggatgtggagaagtggggccccttcgatctggtgtacggcagcacccaacccctgggcagctcttgtgaccggtgccctggctggtacatgtttcagttccaccggatcctgcagtacgccctgccgagacaggagtcccagcggccattcttttggattttcatggacaacttgctgctgaccgaggatgaccaggaaactaccactcggttcctgcagaccgaagccgtgaccctgcaggacgtgagaggccgggactaccagaacgccatgcgggtgtggtccaacatccctggactgaaaagcaagcacgcacctctgacccctaaagaagaggagtacctgcaggcccaggtgcggagcagaagcaagctggacgcccctaaggtggatctgctggtgaagaattgcctcctgcccctgagagagtacttcaagtatttcagccagaatagtctgcccctgggcggcccaagcagcggcgcccctcctcccagcggcggcagcccagccggctccccaacctctaccgaggagggcacctctgagtccgccacccccgagagcggccctggcacctccaccgagcccagcgagggcagcgcacccggcagccctgccggcagccccacctccacagaggagggaaccagcaccgagcccagcgaaggcagcgccccaggcaccagcaccgagcctagtgagggcggctctggcggcggcagcgcccaggagattaaacggatcaacaagatcagaagaagacttgtgaaagacagcaacaccaagaaggccggcaagacaggccccatgaaaaccctgctggttagagtgatgacacccgatctgagagagcggctggaaaacctgagaaagaagcctgaaaatatcccccagcccatcagcaatacatctagagccaacctgaataagctgctgaccgattacaccgaaatgaagaaggcgatcctgcatgtgtactgggaagagttccagaaggaccctgtgggcctgatgagccgggtggcccagcctgccagcaagaagatcgatcagaacaagctgaaacctgagatggacgagaagggcaacctgaccaccgccggctttgcctgctctcagtgtggccagcccctgttcgtgtacaagctggagcaggtgtctgagaagggcaaggcttacaccaactacttcggacggtgcaatgtggccgagcacgaaaagctgatcctgctggcccagctgaagcccgagaaggatagcgacgaagccgtgacatatagcctgggaaagtttgggcagagggccctggatttctacagcattcatgtgaccaaggagtccacccaccccgtgaagcccctggcccagatcgccggaaacagatacgcctccggacctgtgggaaaggccctgagcgacgcatgtatgggcacaatcgcctccttcctgtctaagtaccaggacatcatcatcgaacaccagaaggtggtgaagggcaaccagaagagactggagagcctgcgggagctggccggcaaggaaaacctggaataccctagcgtgaccctgccacctcagcctcacaccaaggagggcgttgatgcctacaacgaagtgatcgcccgggtgcgaatgtgggtgaacctgaacctgtggcagaagctgaagctaagcagagatgatgccaagcctctgctgagactgaagggattcccttcctttcctctggtcgagagacaggccaacgaagtggactggtgggacatggtgtgtaacgtgaagaagctgatcaacgagaaaaaggaggatggcaaggtgttttggcagaatctggctggctacaagagacaggaagccctgagaccatacctgagcagcgaggaagatcggaagaagggaaagaaattcgctcggtaccagctgggcgacctgctgctgcacctggaaaagaagcacggcgaggactggggaaaggtgtacgacgaggcctgggagcggattgacaagaaagtggaaggcctgagcaagcacatcaagctggaagaggaacggagaagcgaggacgcccagagcaaggccgccctgaccgactggctgcgggctaaggccagcttcgtgatcgagggcctgaaggaggccgacaaggacgagttctgcagatgcgagctgaagctgcagaagtggtacggggacctgcggggaaagcccttcgccatcgaagccgagaacagcatcctggacatcagcggcttcagcaagcagtacaactgtgccttcatctggcagaaggacggcgtgaagaagctgaacctgtacctgatcatcaactacttcaagggcggcaagctgcggttcaagaagatcaaacctgaagccttcgaagccaacagattctacaccgtgatcaacaaaaagagcggcgagatcgtgcccatggaggtgaacttcaacttcgacgaccccaacctgatcatcctgcctctggcctttggcaagagacagggcagagaattcatctggaacgacctgctgtccctggaaaccggcagcctgaagctggccaacggaagagtgatcgagaagacactgtacaacagaagaacccggcaggatgagcctgccctgttcgtggccctgaccttcgagcggcgggaggtcctggactcctccaatatcaaaccaatgaacctgatcggcgtggcaagaggcgaaaacatccccgccgtgatcgccctgaccgaccccgagggctgcccactgagccggtttaaggatagcctgggaaacccaacccacatcctgagaatcggcgagagctataaggagaagcagcggaccatccaggccaagaaggaggtggagcagcggagagccggcggctacagccggaagtacgccagcaaagccaagaatctggcagacgatatggtgagaaacaccgctagagatctgctgtactacgccgtgacccaggatgccatgctgatcttcgccaacctgagccggggcttcggccggcagggcaagcggaccttcatggccgagagacagtacacacggatggaggactggctgaccgccaagctggcctacgagggcctgagcaagacctacctgtccaagacactggcccagtacacctccaagacatgcagcaactgtgggtttaccatcaccagcgccgactacgacagggtgctggagaagctgaagaagacagcaacaggctggatgaccacaattaacggcaaggagctgaaggtggagggccagattacctactacaacagatacaagagacagaacgtagtcaaggacctgtccgtcgagctggatagactgagcgaagaatctgtgaacaacgacatctcctcctggacaaagggcagaagcggagaagctctgagcctcctgaagaaaagattctcccatagacccgtgcaggagaagttcgtgtgcctgaactgcggcttcgagacacacgcagccgagcaagccgccctgaacatcgccagatcctggctgttcctgcggagccaggagtacaagaaataccagacaaacaagacaaccggcaacaccgataagagagccttcgtcgagacctggcagtccttttaccggaagaagcttaaggaggtgtggaaacctgccgtgcggtctggcggatctggcggaggctccacaagcgaggagctggtgggccagaaccacggcatggagggcgaggcctgcaccggcggcgacgtgaccttcagcgacgtggccatcgacttcagccacgaggagtgggcctgcctggacaccgcccagagggacctgtacaaggacgtgatggtgcagaactacgagaacctggtgagcgtgggcctgagcgtgaccaagccctacgtgatcatgctgctggaggacggcaaggagccctggatgatgaccagccccaagaaaaagagaaaagtctaagctgccttctgcggggcttgccttctggccatgcccttcttctctcccttgcacctgtacctcttggtctttgaataaagcctgagtaggaaggctagcaaaaaaaaaaaaaaaaaaaaaaaaaaaaaaaaaaaaaaaaaaaaaaaaaaaaaaaaaaaaaaaaaaaaaaaaaaaaaaaa

SEQ ID NO: 6963 - RNA, 5797 nt, synthetic construct
  source 1..5797: mol_type = other RNA
aggaaataagagagaaaagaagagtaagaagaaatataagagccaccatggcccctaagaagaagcgtaaagtgagccggatggaacgcctcgtctacgaggtgcggcagaagtgcagaaacatcgaggacatctgcatctcctgcggatctctgaacgtgaccctggagcacccactgttcatcggcggcatgtgccagaactgtaaaaactgttttctggagtgtgcctatcaatacgacgatgacggctaccagagctactgcaccatctgttgcggcggaagagaggtgctgatgtgtggaaataacaactgctgccggtgcttctgcgtggaatgcgtggacctgctggtgggccccggcgccgcccaggccgctattaaggaagatccttggaactgctacatgtgcggccacaagggcacatacggcctgctgagacggagagaggactggcctagcagactgcagatgttcttcgccaataaccacgaccaggagttcgacccccctaaggtgtaccctcccgtccccgccgagaagagaaagcccatccgggtcctgagcctgttcgatggcatcgccaccggtctgctggtgctgaaggacctgggcatccaggtggataggtacattgcctccgaggtgtgcgaggactccatcaccgtgggaatggtgcgtcatcagggcaagatcatgtacgtgggcgacgtgcggagcgtgacacagaagcatatccaggagtggggccctttcgacctggtgatcggcggcagcccttgcaatgacctgagcatcgtgaacccagcccggaagggcctgtacgagggaaccggcagactgttcttcgagttttacagactgctgcacgacgcccggcctaaggaaggcgacgaccggcccttcttttggctgttcgagaatgtggtggccatgggagtcagcgacaagcgggatattagccggttcctggagagcaaccccgtgatgatcgatgccaaggaagtgagcgccgcccaccgggccagatacttctggggcaatctgcctggcatgaacagacccctggccagcaccgtgaacgacaagctggagctgcaggagtgcctggagcacggccggatcgccaagttcagcaaggtgagaaccatcaccacccgaagcaacagcatcaaacaaggcaaggaccagcactttcctgtgttcatgaacgagaaggaggacatcctgtggtgtaccgagatggagagagtgttcgggttcccagtccactacacagatgtcagcaacatgtctagactggccagacagagactgctgggaagaagctggtccgtccctgtgatcagacacctgttcgcccctctgaaggagtacttcgcctgcgtgagcagcggcaacagcaacgccaacagccggggccccagcttctctagcggcctggtgccactgtccctgagagggagccacatgggccccatggagatctacaaaaccgtgagcgcctggaagcggcagcctgtgcgcgtgctgagcctgtttcggaatatcgataaagtcctgaaaagcctgggattcctggagagcggctctggctccggcggtggcaccctgaagtacgtggaggatgtgacaaacgtggtcagacgggatgtggagaagtggggccccttcgatctggtgtacggcagcacccaacccctgggcagctcttgtgaccggtgccctggctggtacatgtttcagttccaccggatcctgcagtacgccctgccgagacaggagtcccagcggccattcttttggattttcatggacaacttgctgctgaccgaggatgaccaggaaactaccactcggttcctgcagaccgaagccgtgaccctgcaggacgtgagaggccgggactaccagaacgccatgcgggtgtggtccaacatccctggactgaaaagcaagcacgcacctctgacccctaaagaagaggagtacctgcaggcccaggtgcggagcagaagcaagctggacgcccctaaggtggatctgctggtgaagaattgcctcctgcccctgagagagtacttcaagtatttcagccagaatagtctgcccctgggcggcccaagcagcggcgcccctcctcccagcggcggcagcccagccggctccccaacctctaccgaggagggcacctctgagtccgccacccccgagagcggccctggcacctccaccgagcccagcgagggcagcgcacccggcagccctgccggcagccccacctccacagaggagggaaccagcaccgagcccagcgaaggcagcgccccaggcaccagcaccgagcctagtgagggcggctctggcggcggcagcgcccaggagattaaacggatcaacaagatcagaagaagacttgtgaaagacagcaacaccaagaaggccggcaagacaggccccatgaaaaccctgctggttagagtgatgacacccgatctgagagagcggctggaaaacctgagaaagaagcctgaaaatatcccccagcccatcagcaatacatctagagccaacctgaataagctgctgaccgattacaccgaaatgaagaaggcgatcctgcatgtgtactgggaagagttccagaaggaccctgtgggcctgatgagccgggtggcccagcctgccagcaagaagatcgatcagaacaagctgaaacctgagatggacgagaagggcaacctgaccaccgccggctttgcctgctctcagtgtggccagcccctgttcgtgtacaagctggagcaggtgtctgagaagggcaaggcttacaccaactacttcggacggtgcaatgtggccgagcacgaaaagctgatcctgctggcccagctgaagcccgagaaggatagcgacgaagccgtgacatatagcctgggaaagtttgggcagagggccctggatttctacagcattcatgtgaccaaggagtccacccaccccgtgaagcccctggcccagatcgccggaaacagatacgcctccggacctgtgggaaaggccctgagcgacgcatgtatgggcacaatcgcctccttcctgtctaagtaccaggacatcatcatcgaacaccagaaggtggtgaagggcaaccagaagagactggagagcctgcgggagctggccggcaaggaaaacctggaataccctagcgtgaccctgccacctcagcctcacaccaaggagggcgttgatgcctacaacgaagtgatcgcccgggtgcgaatgtgggtgaacctgaacctgtggcagaagctgaagctaagcagagatgatgccaagcctctgctgagactgaagggattcccttcctttcctctggtcgagagacaggccaacgaagtggactggtgggacatggtgtgtaacgtgaagaagctgatcaacgagaaaaaggaggatggcaaggtgttttggcagaatctggctggctacaagagacaggaagccctgagaccatacctgagcagcgaggaagatcggaagaagggaaagaaattcgctcggtaccagctgggcgacctgctgctgcacctggaaaagaagcacggcgaggactggggaaaggtgtacgacgaggcctgggagcggattgacaagaaagtggaaggcctgagcaagcacatcaagctggaagaggaacggagaagcgaggacgcccagagcaaggccgccctgaccgactggctgcgggctaaggccagcttcgtgatcgagggcctgaaggaggccgacaaggacgagttctgcagatgcgagctgaagctgcagaagtggtacggggacctgcggggaaagcccttcgccatcgaagccgagaacagcatcctggacatcagcggcttcagcaagcagtacaactgtgccttcatctggcagaaggacggcgtgaagaagctgaacctgtacctgatcatcaactacttcaagggcggcaagctgcggttcaagaagatcaaacctgaagccttcgaagccaacagattctacaccgtgatcaacaaaaagagcggcgagatcgtgcccatggaggtgaacttcaacttcgacgaccccaacctgatcatcctgcctctggcctttggcaagagacagggcagagaattcatctggaacgacctgctgtccctggaaaccggcagcctgaagctggccaacggaagagtgatcgagaagacactgtacaacagaagaacccggcaggatgagcctgccctgttcgtggccctgaccttcgagcggcgggaggtcctggactcctccaatatcaaaccaatgaacctgatcggcgtggcaagaggcgaaaacatccccgccgtgatcgccctgaccgaccccgagggctgcccactgagccggtttaaggatagcctgggaaacccaacccacatcctgagaatcggcgagagctataaggagaagcagcggaccatccaggccaagaaggaggtggagcagcggagagccggcggctacagccggaagtacgccagcaaagccaagaatctggcagacgatatggtgagaaacaccgctagagatctgctgtactacgccgtgacccaggatgccatgctgatcttcgccaacctgagccggggcttcggccggcagggcaagcggaccttcatggccgagagacagtacacacggatggaggactggctgaccgccaagctggcctacgagggcctgagcaagacctacctgtccaagacactggcccagtacacctccaagacatgcagcaactgtgggtttaccatcaccagcgccgactacgacagggtgctggagaagctgaagaagacagcaacaggctggatgaccacaattaacggcaaggagctgaaggtggagggccagattacctactacaacagatacaagagacagaacgtagtcaaggacctgtccgtcgagctggatagactgagcgaagaatctgtgaacaacgacatctcctcctggacaaagggcagaagcggagaagctctgagcctcctgaagaaaagattctcccatagacccgtgcaggagaagttcgtgtgcctgaactgcggcttcgagacacacgcagccgagcaagccgccctgaacatcgccagatcctggctgttcctgcggagccaggagtacaagaaataccagacaaacaagacaaccggcaacaccgataagagagccttcgtcgagacctggcagtccttttaccggaagaagcttaaggaggtgtggaaacctgccgtgcggtctggcggatctggcggaggctccacaagcgcctgcgagagcatcaccttcggcgacgtggccatcgacttcagccaccaggagtgggagtacctgaacctggtgcagaagaccctgtaccaggaggtgatgatggagaactacgacaacctggtgagcctgggccacttcatcagcaagcccgacctgatcaccctgctggagcagggcaaggagccctggatgatcgtgggcgaggagaccaggggcgagtgcaccgacctggacagcaggaccagccccaagaaaaagagaaaagtctaagctgccttctgcggggcttgccttctggccatgcccttcttctctcccttgcacctgtacctcttggtctttgaataaagcctgagtaggaaggctagcaaaaaaaaaaaaaaaaaaaaaaaaaaaaaaaaaaaaaaaaaaaaaaaaaaaaaaaaaaaaaaaaaaaaaaaaaaaaaaaa

SEQ ID NO: 6964 - RNA, 5797 nt, synthetic construct
  source 1..5797: mol_type = other RNA
aggaaataagagagaaaagaagagtaagaagaaatataagagccaccatggcccctaagaagaagcgtaaagtgagccggatggaacgcctcgtctacgaggtgcggcagaagtgcagaaacatcgaggacatctgcatctcctgcggatctctgaacgtgaccctggagcacccactgttcatcggcggcatgtgccagaactgtaaaaactgttttctggagtgtgcctatcaatacgacgatgacggctaccagagctactgcaccatctgttgcggcggaagagaggtgctgatgtgtggaaataacaactgctgccggtgcttctgcgtggaatgcgtggacctgctggtgggccccggcgccgcccaggccgctattaaggaagatccttggaactgctacatgtgcggccacaagggcacatacggcctgctgagacggagagaggactggcctagcagactgcagatgttcttcgccaataaccacgaccaggagttcgacccccctaaggtgtaccctcccgtccccgccgagaagagaaagcccatccgggtcctgagcctgttcgatggcatcgccaccggtctgctggtgctgaaggacctgggcatccaggtggataggtacattgcctccgaggtgtgcgaggactccatcaccgtgggaatggtgcgtcatcagggcaagatcatgtacgtgggcgacgtgcggagcgtgacacagaagcatatccaggagtggggccctttcgacctggtgatcggcggcagcccttgcaatgacctgagcatcgtgaacccagcccggaagggcctgtacgagggaaccggcagactgttcttcgagttttacagactgctgcacgacgcccggcctaaggaaggcgacgaccggcccttcttttggctgttcgagaatgtggtggccatgggagtcagcgacaagcgggatattagccggttcctggagagcaaccccgtgatgatcgatgccaaggaagtgagcgccgcccaccgggccagatacttctggggcaatctgcctggcatgaacagacccctggccagcaccgtgaacgacaagctggagctgcaggagtgcctggagcacggccggatcgccaagttcagcaaggtgagaaccatcaccacccgaagcaacagcatcaaacaaggcaaggaccagcactttcctgtgttcatgaacgagaaggaggacatcctgtggtgtaccgagatggagagagtgttcgggttcccagtccactacacagatgtcagcaacatgtctagactggccagacagagactgctgggaagaagctggtccgtccctgtgatcagacacctgttcgcccctctgaaggagtacttcgcctgcgtgagcagcggcaacagcaacgccaacagccggggccccagcttctctagcggcctggtgccactgtccctgagagggagccacatgggccccatggagatctacaaaaccgtgagcgcctggaagcggcagcctgtgcgcgtgctgagcctgtttcggaatatcgataaagtcctgaaaagcctgggattcctggagagcggctctggctccggcggtggcaccctgaagtacgtggaggatgtgacaaacgtggtcagacgggatgtggagaagtggggccccttcgatctggtgtacggcagcacccaacccctgggcagctcttgtgaccggtgccctggctggtacatgtttcagttccaccggatcctgcagtacgccctgccgagacaggagtcccagcggccattcttttggattttcatggacaacttgctgctgaccgaggatgaccaggaaactaccactcggttcctgcagaccgaagccgtgaccctgcaggacgtgagaggccgggactaccagaacgccatgcgggtgtggtccaacatccctggactgaaaagcaagcacgcacctctgacccctaaagaagaggagtacctgcaggcccaggtgcggagcagaagcaagctggacgcccctaaggtggatctgctggtgaagaattgcctcctgcccctgagagagtacttcaagtatttcagccagaatagtctgcccctgggcggcccaagcagcggcgcccctcctcccagcggcggcagcccagccggctccccaacctctaccgaggagggcacctctgagtccgccacccccgagagcggccctggcacctccaccgagcccagcgagggcagcgcacccggcagccctgccggcagccccacctccacagaggagggaaccagcaccgagcccagcgaaggcagcgccccaggcaccagcaccgagcctagtgagggcggctctggcggcggcagcgcccaggagattaaacggatcaacaagatcagaagaagacttgtgaaagacagcaacaccaagaaggccggcaagacaggccccatgaaaaccctgctggttagagtgatgacacccgatctgagagagcggctggaaaacctgagaaagaagcctgaaaatatcccccagcccatcagcaatacatctagagccaacctgaataagctgctgaccgattacaccgaaatgaagaaggcgatcctgcatgtgtactgggaagagttccagaaggaccctgtgggcctgatgagccgggtggcccagcctgccagcaagaagatcgatcagaacaagctgaaacctgagatggacgagaagggcaacctgaccaccgccggctttgcctgctctcagtgtggccagcccctgttcgtgtacaagctggagcaggtgtctgagaagggcaaggcttacaccaactacttcggacggtgcaatgtggccgagcacgaaaagctgatcctgctggcccagctgaagcccgagaaggatagcgacgaagccgtgacatatagcctgggaaagtttgggcagagggccctggatttctacagcattcatgtgaccaaggagtccacccaccccgtgaagcccctggcccagatcgccggaaacagatacgcctccggacctgtgggaaaggccctgagcgacgcatgtatgggcacaatcgcctccttcctgtctaagtaccaggacatcatcatcgaacaccagaaggtggtgaagggcaaccagaagagactggagagcctgcgggagctggccggcaaggaaaacctggaataccctagcgtgaccctgccacctcagcctcacaccaaggagggcgttgatgcctacaacgaagtgatcgcccgggtgcgaatgtgggtgaacctgaacctgtggcagaagctgaagctaagcagagatgatgccaagcctctgctgagactgaagggattcccttcctttcctctggtcgagagacaggccaacgaagtggactggtgggacatggtgtgtaacgtgaagaagctgatcaacgagaaaaaggaggatggcaaggtgttttggcagaatctggctggctacaagagacaggaagccctgagaccatacctgagcagcgaggaagatcggaagaagggaaagaaattcgctcggtaccagctgggcgacctgctgctgcacctggaaaagaagcacggcgaggactggggaaaggtgtacgacgaggcctgggagcggattgacaagaaagtggaaggcctgagcaagcacatcaagctggaagaggaacggagaagcgaggacgcccagagcaaggccgccctgaccgactggctgcgggctaaggccagcttcgtgatcgagggcctgaaggaggccgacaaggacgagttctgcagatgcgagctgaagctgcagaagtggtacggggacctgcggggaaagcccttcgccatcgaagccgagaacagcatcctggacatcagcggcttcagcaagcagtacaactgtgccttcatctggcagaaggacggcgtgaagaagctgaacctgtacctgatcatcaactacttcaagggcggcaagctgcggttcaagaagatcaaacctgaagccttcgaagccaacagattctacaccgtgatcaacaaaaagagcggcgagatcgtgcccatggaggtgaacttcaacttcgacgaccccaacctgatcatcctgcctctggcctttggcaagagacagggcagagaattcatctggaacgacctgctgtccctggaaaccggcagcctgaagctggccaacggaagagtgatcgagaagacactgtacaacagaagaacccggcaggatgagcctgccctgttcgtggccctgaccttcgagcggcgggaggtcctggactcctccaatatcaaaccaatgaacctgatcggcgtggcaagaggcgaaaacatccccgccgtgatcgccctgaccgaccccgagggctgcccactgagccggtttaaggatagcctgggaaacccaacccacatcctgagaatcggcgagagctataaggagaagcagcggaccatccaggccaagaaggaggtggagcagcggagagccggcggctacagccggaagtacgccagcaaagccaagaatctggcagacgatatggtgagaaacaccgctagagatctgctgtactacgccgtgacccaggatgccatgctgatcttcgccaacctgagccggggcttcggccggcagggcaagcggaccttcatggccgagagacagtacacacggatggaggactggctgaccgccaagctggcctacgagggcctgagcaagacctacctgtccaagacactggcccagtacacctccaagacatgcagcaactgtgggtttaccatcaccagcgccgactacgacagggtgctggagaagctgaagaagacagcaacaggctggatgaccacaattaacggcaaggagctgaaggtggagggccagattacctactacaacagatacaagagacagaacgtagtcaaggacctgtccgtcgagctggatagactgagcgaagaatctgtgaacaacgacatctcctcctggacaaagggcagaagcggagaagctctgagcctcctgaagaaaagattctcccatagacccgtgcaggagaagttcgtgtgcctgaactgcggcttcgagacacacgcagccgagcaagccgccctgaacatcgccagatcctggctgttcctgcggagccaggagtacaagaaataccagacaaacaagacaaccggcaacaccgataagagagccttcgtcgagacctggcagtccttttaccggaagaagcttaaggaggtgtggaaacctgccgtgcggtctggcggatctggcggaggctccacaagcagccaggtgagcctgaccttcagggacgtggccgtggacttcagccaggaggagtggggcctgctggagcccgcccagaaggacatgtacagggacgtgatgctggagaactacgagaacttcctgagcctgggcctgcccatcagcaagcccaacatgatcagccagctgaagaggagggaggcccccagctggatcgccgagggcaaggtgagcctgagcacctacctgggcaccctgaggaccagccccaagaaaaagagaaaagtctaagctgccttctgcggggcttgccttctggccatgcccttcttctctcccttgcacctgtacctcttggtctttgaataaagcctgagtaggaaggctagcaaaaaaaaaaaaaaaaaaaaaaaaaaaaaaaaaaaaaaaaaaaaaaaaaaaaaaaaaaaaaaaaaaaaaaaaaaaaaaaa

SEQ ID NO: 6965 - RNA, 5797 nt, synthetic construct
  source 1..5797: mol_type = other RNA
aggaaataagagagaaaagaagagtaagaagaaatataagagccaccatggcccctaagaagaagcgtaaagtgagccggatggaacgcctcgtctacgaggtgcggcagaagtgcagaaacatcgaggacatctgcatctcctgcggatctctgaacgtgaccctggagcacccactgttcatcggcggcatgtgccagaactgtaaaaactgttttctggagtgtgcctatcaatacgacgatgacggctaccagagctactgcaccatctgttgcggcggaagagaggtgctgatgtgtggaaataacaactgctgccggtgcttctgcgtggaatgcgtggacctgctggtgggccccggcgccgcccaggccgctattaaggaagatccttggaactgctacatgtgcggccacaagggcacatacggcctgctgagacggagagaggactggcctagcagactgcagatgttcttcgccaataaccacgaccaggagttcgacccccctaaggtgtaccctcccgtccccgccgagaagagaaagcccatccgggtcctgagcctgttcgatggcatcgccaccggtctgctggtgctgaaggacctgggcatccaggtggataggtacattgcctccgaggtgtgcgaggactccatcaccgtgggaatggtgcgtcatcagggcaagatcatgtacgtgggcgacgtgcggagcgtgacacagaagcatatccaggagtggggccctttcgacctggtgatcggcggcagcccttgcaatgacctgagcatcgtgaacccagcccggaagggcctgtacgagggaaccggcagactgttcttcgagttttacagactgctgcacgacgcccggcctaaggaaggcgacgaccggcccttcttttggctgttcgagaatgtggtggccatgggagtcagcgacaagcgggatattagccggttcctggagagcaaccccgtgatgatcgatgccaaggaagtgagcgccgcccaccgggccagatacttctggggcaatctgcctggcatgaacagacccctggccagcaccgtgaacgacaagctggagctgcaggagtgcctggagcacggccggatcgccaagttcagcaaggtgagaaccatcaccacccgaagcaacagcatcaaacaaggcaaggaccagcactttcctgtgttcatgaacgagaaggaggacatcctgtggtgtaccgagatggagagagtgttcgggttcccagtccactacacagatgtcagcaacatgtctagactggccagacagagactgctgggaagaagctggtccgtccctgtgatcagacacctgttcgcccctctgaaggagtacttcgcctgcgtgagcagcggcaacagcaacgccaacagccggggccccagcttctctagcggcctggtgccactgtccctgagagggagccacatgggccccatggagatctacaaaaccgtgagcgcctggaagcggcagcctgtgcgcgtgctgagcctgtttcggaatatcgataaagtcctgaaaagcctgggattcctggagagcggctctggctccggcggtggcaccctgaagtacgtggaggatgtgacaaacgtggtcagacgggatgtggagaagtggggccccttcgatctggtgtacggcagcacccaacccctgggcagctcttgtgaccggtgccctggctggtacatgtttcagttccaccggatcctgcagtacgccctgccgagacaggagtcccagcggccattcttttggattttcatggacaacttgctgctgaccgaggatgaccaggaaactaccactcggttcctgcagaccgaagccgtgaccctgcaggacgtgagaggccgggactaccagaacgccatgcgggtgtggtccaacatccctggactgaaaagcaagcacgcacctctgacccctaaagaagaggagtacctgcaggcccaggtgcggagcagaagcaagctggacgcccctaaggtggatctgctggtgaagaattgcctcctgcccctgagagagtacttcaagtatttcagccagaatagtctgcccctgggcggcccaagcagcggcgcccctcctcccagcggcggcagcccagccggctccccaacctctaccgaggagggcacctctgagtccgccacccccgagagcggccctggcacctccaccgagcccagcgagggcagcgcacccggcagccctgccggcagccccacctccacagaggagggaaccagcaccgagcccagcgaaggcagcgccccaggcaccagcaccgagcctagtgagggcggctctggcggcggcagcgcccaggagattaaacggatcaacaagatcagaagaagacttgtgaaagacagcaacaccaagaaggccggcaagacaggccccatgaaaaccctgctggttagagtgatgacacccgatctgagagagcggctggaaaacctgagaaagaagcctgaaaatatcccccagcccatcagcaatacatctagagccaacctgaataagctgctgaccgattacaccgaaatgaagaaggcgatcctgcatgtgtactgggaagagttccagaaggaccctgtgggcctgatgagccgggtggcccagcctgccagcaagaagatcgatcagaacaagctgaaacctgagatggacgagaagggcaacctgaccaccgccggctttgcctgctctcagtgtggccagcccctgttcgtgtacaagctggagcaggtgtctgagaagggcaaggcttacaccaactacttcggacggtgcaatgtggccgagcacgaaaagctgatcctgctggcccagctgaagcccgagaaggatagcgacgaagccgtgacatatagcctgggaaagtttgggcagagggccctggatttctacagcattcatgtgaccaaggagtccacccaccccgtgaagcccctggcccagatcgccggaaacagatacgcctccggacctgtgggaaaggccctgagcgacgcatgtatgggcacaatcgcctccttcctgtctaagtaccaggacatcatcatcgaacaccagaaggtggtgaagggcaaccagaagagactggagagcctgcgggagctggccggcaaggaaaacctggaataccctagcgtgaccctgccacctcagcctcacaccaaggagggcgttgatgcctacaacgaagtgatcgcccgggtgcgaatgtgggtgaacctgaacctgtggcagaagctgaagctaagcagagatgatgccaagcctctgctgagactgaagggattcccttcctttcctctggtcgagagacaggccaacgaagtggactggtgggacatggtgtgtaacgtgaagaagctgatcaacgagaaaaaggaggatggcaaggtgttttggcagaatctggctggctacaagagacaggaagccctgagaccatacctgagcagcgaggaagatcggaagaagggaaagaaattcgctcggtaccagctgggcgacctgctgctgcacctggaaaagaagcacggcgaggactggggaaaggtgtacgacgaggcctgggagcggattgacaagaaagtggaaggcctgagcaagcacatcaagctggaagaggaacggagaagcgaggacgcccagagcaaggccgccctgaccgactggctgcgggctaaggccagcttcgtgatcgagggcctgaaggaggccgacaaggacgagttctgcagatgcgagctgaagctgcagaagtggtacggggacctgcggggaaagcccttcgccatcgaagccgagaacagcatcctggacatcagcggcttcagcaagcagtacaactgtgccttcatctggcagaaggacggcgtgaagaagctgaacctgtacctgatcatcaactacttcaagggcggcaagctgcggttcaagaagatcaaacctgaagccttcgaagccaacagattctacaccgtgatcaacaaaaagagcggcgagatcgtgcccatggaggtgaacttcaacttcgacgaccccaacctgatcatcctgcctctggcctttggcaagagacagggcagagaattcatctggaacgacctgctgtccctggaaaccggcagcctgaagctggccaacggaagagtgatcgagaagacactgtacaacagaagaacccggcaggatgagcctgccctgttcgtggccctgaccttcgagcggcgggaggtcctggactcctccaatatcaaaccaatgaacctgatcggcgtggcaagaggcgaaaacatccccgccgtgatcgccctgaccgaccccgagggctgcccactgagccggtttaaggatagcctgggaaacccaacccacatcctgagaatcggcgagagctataaggagaagcagcggaccatccaggccaagaaggaggtggagcagcggagagccggcggctacagccggaagtacgccagcaaagccaagaatctggcagacgatatggtgagaaacaccgctagagatctgctgtactacgccgtgacccaggatgccatgctgatcttcgccaacctgagccggggcttcggccggcagggcaagcggaccttcatggccgagagacagtacacacggatggaggactggctgaccgccaagctggcctacgagggcctgagcaagacctacctgtccaagacactggcccagtacacctccaagacatgcagcaactgtgggtttaccatcaccagcgccgactacgacagggtgctggagaagctgaagaagacagcaacaggctggatgaccacaattaacggcaaggagctgaaggtggagggccagattacctactacaacagatacaagagacagaacgtagtcaaggacctgtccgtcgagctggatagactgagcgaagaatctgtgaacaacgacatctcctcctggacaaagggcagaagcggagaagctctgagcctcctgaagaaaagattctcccatagacccgtgcaggagaagttcgtgtgcctgaactgcggcttcgagacacacgcagccgagcaagccgccctgaacatcgccagatcctggctgttcctgcggagccaggagtacaagaaataccagacaaacaagacaaccggcaacaccgataagagagccttcgtcgagacctggcagtccttttaccggaagaagcttaaggaggtgtggaaacctgccgtgcggtctggcggatctggcggaggctccacaagctacaaggagagcgtgatgttcagggacgtggccgtggacttcagccaggaggagtgggagtgcctggaccccgcccagagggacctgtacagggacgtgatgctggagaactacagcaacctgctgagcatgggcctgtacatccccaagccccaggtgatcagcctgctggagcagggcaaggagccctggatggtgggcagggagctgaccaggggcctgtgcagcgacctggagagcatgaccagccccaagaaaaagagaaaagtctaagctgccttctgcggggcttgccttctggccatgcccttcttctctcccttgcacctgtacctcttggtctttgaataaagcctgagtaggaaggctagcaaaaaaaaaaaaaaaaaaaaaaaaaaaaaaaaaaaaaaaaaaaaaaaaaaaaaaaaaaaaaaaaaaaaaaaaaaaaaaaa

SEQ ID NO: 6966 - RNA, 5797 nt, synthetic construct
  source 1..5797: mol_type = other RNA
aggaaataagagagaaaagaagagtaagaagaaatataagagccaccatggcccctaagaagaagcgtaaagtgagccggatggaacgcctcgtctacgaggtgcggcagaagtgcagaaacatcgaggacatctgcatctcctgcggatctctgaacgtgaccctggagcacccactgttcatcggcggcatgtgccagaactgtaaaaactgttttctggagtgtgcctatcaatacgacgatgacggctaccagagctactgcaccatctgttgcggcggaagagaggtgctgatgtgtggaaataacaactgctgccggtgcttctgcgtggaatgcgtggacctgctggtgggccccggcgccgcccaggccgctattaaggaagatccttggaactgctacatgtgcggccacaagggcacatacggcctgctgagacggagagaggactggcctagcagactgcagatgttcttcgccaataaccacgaccaggagttcgacccccctaaggtgtaccctcccgtccccgccgagaagagaaagcccatccgggtcctgagcctgttcgatggcatcgccaccggtctgctggtgctgaaggacctgggcatccaggtggataggtacattgcctccgaggtgtgcgaggactccatcaccgtgggaatggtgcgtcatcagggcaagatcatgtacgtgggcgacgtgcggagcgtgacacagaagcatatccaggagtggggccctttcgacctggtgatcggcggcagcccttgcaatgacctgagcatcgtgaacccagcccggaagggcctgtacgagggaaccggcagactgttcttcgagttttacagactgctgcacgacgcccggcctaaggaaggcgacgaccggcccttcttttggctgttcgagaatgtggtggccatgggagtcagcgacaagcgggatattagccggttcctggagagcaaccccgtgatgatcgatgccaaggaagtgagcgccgcccaccgggccagatacttctggggcaatctgcctggcatgaacagacccctggccagcaccgtgaacgacaagctggagctgcaggagtgcctggagcacggccggatcgccaagttcagcaaggtgagaaccatcaccacccgaagcaacagcatcaaacaaggcaaggaccagcactttcctgtgttcatgaacgagaaggaggacatcctgtggtgtaccgagatggagagagtgttcgggttcccagtccactacacagatgtcagcaacatgtctagactggccagacagagactgctgggaagaagctggtccgtccctgtgatcagacacctgttcgcccctctgaaggagtacttcgcctgcgtgagcagcggcaacagcaacgccaacagccggggccccagcttctctagcggcctggtgccactgtccctgagagggagccacatgggccccatggagatctacaaaaccgtgagcgcctggaagcggcagcctgtgcgcgtgctgagcctgtttcggaatatcgataaagtcctgaaaagcctgggattcctggagagcggctctggctccggcggtggcaccctgaagtacgtggaggatgtgacaaacgtggtcagacgggatgtggagaagtggggccccttcgatctggtgtacggcagcacccaacccctgggcagctcttgtgaccggtgccctggctggtacatgtttcagttccaccggatcctgcagtacgccctgccgagacaggagtcccagcggccattcttttggattttcatggacaacttgctgctgaccgaggatgaccaggaaactaccactcggttcctgcagaccgaagccgtgaccctgcaggacgtgagaggccgggactaccagaacgccatgcgggtgtggtccaacatccctggactgaaaagcaagcacgcacctctgacccctaaagaagaggagtacctgcaggcccaggtgcggagcagaagcaagctggacgcccctaaggtggatctgctggtgaagaattgcctcctgcccctgagagagtacttcaagtatttcagccagaatagtctgcccctgggcggcccaagcagcggcgcccctcctcccagcggcggcagcccagccggctccccaacctctaccgaggagggcacctctgagtccgccacccccgagagcggccctggcacctccaccgagcccagcgagggcagcgcacccggcagccctgccggcagccccacctccacagaggagggaaccagcaccgagcccagcgaaggcagcgccccaggcaccagcaccgagcctagtgagggcggctctggcggcggcagcgcccaggagattaaacggatcaacaagatcagaagaagacttgtgaaagacagcaacaccaagaaggccggcaagacaggccccatgaaaaccctgctggttagagtgatgacacccgatctgagagagcggctggaaaacctgagaaagaagcctgaaaatatcccccagcccatcagcaatacatctagagccaacctgaataagctgctgaccgattacaccgaaatgaagaaggcgatcctgcatgtgtactgggaagagttccagaaggaccctgtgggcctgatgagccgggtggcccagcctgccagcaagaagatcgatcagaacaagctgaaacctgagatggacgagaagggcaacctgaccaccgccggctttgcctgctctcagtgtggccagcccctgttcgtgtacaagctggagcaggtgtctgagaagggcaaggcttacaccaactacttcggacggtgcaatgtggccgagcacgaaaagctgatcctgctggcccagctgaagcccgagaaggatagcgacgaagccgtgacatatagcctgggaaagtttgggcagagggccctggatttctacagcattcatgtgaccaaggagtccacccaccccgtgaagcccctggcccagatcgccggaaacagatacgcctccggacctgtgggaaaggccctgagcgacgcatgtatgggcacaatcgcctccttcctgtctaagtaccaggacatcatcatcgaacaccagaaggtggtgaagggcaaccagaagagactggagagcctgcgggagctggccggcaaggaaaacctggaataccctagcgtgaccctgccacctcagcctcacaccaaggagggcgttgatgcctacaacgaagtgatcgcccgggtgcgaatgtgggtgaacctgaacctgtggcagaagctgaagctaagcagagatgatgccaagcctctgctgagactgaagggattcccttcctttcctctggtcgagagacaggccaacgaagtggactggtgggacatggtgtgtaacgtgaagaagctgatcaacgagaaaaaggaggatggcaaggtgttttggcagaatctggctggctacaagagacaggaagccctgagaccatacctgagcagcgaggaagatcggaagaagggaaagaaattcgctcggtaccagctgggcgacctgctgctgcacctggaaaagaagcacggcgaggactggggaaaggtgtacgacgaggcctgggagcggattgacaagaaagtggaaggcctgagcaagcacatcaagctggaagaggaacggagaagcgaggacgcccagagcaaggccgccctgaccgactggctgcgggctaaggccagcttcgtgatcgagggcctgaaggaggccgacaaggacgagttctgcagatgcgagctgaagctgcagaagtggtacggggacctgcggggaaagcccttcgccatcgaagccgagaacagcatcctggacatcagcggcttcagcaagcagtacaactgtgccttcatctggcagaaggacggcgtgaagaagctgaacctgtacctgatcatcaactacttcaagggcggcaagctgcggttcaagaagatcaaacctgaagccttcgaagccaacagattctacaccgtgatcaacaaaaagagcggcgagatcgtgcccatggaggtgaacttcaacttcgacgaccccaacctgatcatcctgcctctggcctttggcaagagacagggcagagaattcatctggaacgacctgctgtccctggaaaccggcagcctgaagctggccaacggaagagtgatcgagaagacactgtacaacagaagaacccggcaggatgagcctgccctgttcgtggccctgaccttcgagcggcgggaggtcctggactcctccaatatcaaaccaatgaacctgatcggcgtggcaagaggcgaaaacatccccgccgtgatcgccctgaccgaccccgagggctgcccactgagccggtttaaggatagcctgggaaacccaacccacatcctgagaatcggcgagagctataaggagaagcagcggaccatccaggccaagaaggaggtggagcagcggagagccggcggctacagccggaagtacgccagcaaagccaagaatctggcagacgatatggtgagaaacaccgctagagatctgctgtactacgccgtgacccaggatgccatgctgatcttcgccaacctgagccggggcttcggccggcagggcaagcggaccttcatggccgagagacagtacacacggatggaggactggctgaccgccaagctggcctacgagggcctgagcaagacctacctgtccaagacactggcccagtacacctccaagacatgcagcaactgtgggtttaccatcaccagcgccgactacgacagggtgctggagaagctgaagaagacagcaacaggctggatgaccacaattaacggcaaggagctgaaggtggagggccagattacctactacaacagatacaagagacagaacgtagtcaaggacctgtccgtcgagctggatagactgagcgaagaatctgtgaacaacgacatctcctcctggacaaagggcagaagcggagaagctctgagcctcctgaagaaaagattctcccatagacccgtgcaggagaagttcgtgtgcctgaactgcggcttcgagacacacgcagccgagcaagccgccctgaacatcgccagatcctggctgttcctgcggagccaggagtacaagaaataccagacaaacaagacaaccggcaacaccgataagagagccttcgtcgagacctggcagtccttttaccggaagaagcttaaggaggtgtggaaacctgccgtgcggtctggcggatctggcggaggctccacaagcgcccagatgcaggtgaccttcgaggacatcgccgtgttcttctgccacgaggagtggaagtacctggacgacggccagaaggagctgtacaaggaggtgatgaaggagaactacgagaccctgatcagcctgggcttcctgtgcgagaagcccagcctgatcagcaagatcgagagggaggaggacccctgcgtgagggaccagcaggacttcagggagaggaggaggaggctgaagagcttcaccagccccaagaaaaagagaaaagtctaagctgccttctgcggggcttgccttctggccatgcccttcttctctcccttgcacctgtacctcttggtctttgaataaagcctgagtaggaaggctagcaaaaaaaaaaaaaaaaaaaaaaaaaaaaaaaaaaaaaaaaaaaaaaaaaaaaaaaaaaaaaaaaaaaaaaaaaaaaaaaa

SEQ ID NO: 6967 - RNA, 5797 nt, synthetic construct
  source 1..5797: mol_type = other RNA
aggaaataagagagaaaagaagagtaagaagaaatataagagccaccatggcccctaagaagaagcgtaaagtgagccggatggaacgcctcgtctacgaggtgcggcagaagtgcagaaacatcgaggacatctgcatctcctgcggatctctgaacgtgaccctggagcacccactgttcatcggcggcatgtgccagaactgtaaaaactgttttctggagtgtgcctatcaatacgacgatgacggctaccagagctactgcaccatctgttgcggcggaagagaggtgctgatgtgtggaaataacaactgctgccggtgcttctgcgtggaatgcgtggacctgctggtgggccccggcgccgcccaggccgctattaaggaagatccttggaactgctacatgtgcggccacaagggcacatacggcctgctgagacggagagaggactggcctagcagactgcagatgttcttcgccaataaccacgaccaggagttcgacccccctaaggtgtaccctcccgtccccgccgagaagagaaagcccatccgggtcctgagcctgttcgatggcatcgccaccggtctgctggtgctgaaggacctgggcatccaggtggataggtacattgcctccgaggtgtgcgaggactccatcaccgtgggaatggtgcgtcatcagggcaagatcatgtacgtgggcgacgtgcggagcgtgacacagaagcatatccaggagtggggccctttcgacctggtgatcggcggcagcccttgcaatgacctgagcatcgtgaacccagcccggaagggcctgtacgagggaaccggcagactgttcttcgagttttacagactgctgcacgacgcccggcctaaggaaggcgacgaccggcccttcttttggctgttcgagaatgtggtggccatgggagtcagcgacaagcgggatattagccggttcctggagagcaaccccgtgatgatcgatgccaaggaagtgagcgccgcccaccgggccagatacttctggggcaatctgcctggcatgaacagacccctggccagcaccgtgaacgacaagctggagctgcaggagtgcctggagcacggccggatcgccaagttcagcaaggtgagaaccatcaccacccgaagcaacagcatcaaacaaggcaaggaccagcactttcctgtgttcatgaacgagaaggaggacatcctgtggtgtaccgagatggagagagtgttcgggttcccagtccactacacagatgtcagcaacatgtctagactggccagacagagactgctgggaagaagctggtccgtccctgtgatcagacacctgttcgcccctctgaaggagtacttcgcctgcgtgagcagcggcaacagcaacgccaacagccggggccccagcttctctagcggcctggtgccactgtccctgagagggagccacatgggccccatggagatctacaaaaccgtgagcgcctggaagcggcagcctgtgcgcgtgctgagcctgtttcggaatatcgataaagtcctgaaaagcctgggattcctggagagcggctctggctccggcggtggcaccctgaagtacgtggaggatgtgacaaacgtggtcagacgggatgtggagaagtggggccccttcgatctggtgtacggcagcacccaacccctgggcagctcttgtgaccggtgccctggctggtacatgtttcagttccaccggatcctgcagtacgccctgccgagacaggagtcccagcggccattcttttggattttcatggacaacttgctgctgaccgaggatgaccaggaaactaccactcggttcctgcagaccgaagccgtgaccctgcaggacgtgagaggccgggactaccagaacgccatgcgggtgtggtccaacatccctggactgaaaagcaagcacgcacctctgacccctaaagaagaggagtacctgcaggcccaggtgcggagcagaagcaagctggacgcccctaaggtggatctgctggtgaagaattgcctcctgcccctgagagagtacttcaagtatttcagccagaatagtctgcccctgggcggcccaagcagcggcgcccctcctcccagcggcggcagcccagccggctccccaacctctaccgaggagggcacctctgagtccgccacccccgagagcggccctggcacctccaccgagcccagcgagggcagcgcacccggcagccctgccggcagccccacctccacagaggagggaaccagcaccgagcccagcgaaggcagcgccccaggcaccagcaccgagcctagtgagggcggctctggcggcggcagcgcccaggagattaaacggatcaacaagatcagaagaagacttgtgaaagacagcaacaccaagaaggccggcaagacaggccccatgaaaaccctgctggttagagtgatgacacccgatctgagagagcggctggaaaacctgagaaagaagcctgaaaatatcccccagcccatcagcaatacatctagagccaacctgaataagctgctgaccgattacaccgaaatgaagaaggcgatcctgcatgtgtactgggaagagttccagaaggaccctgtgggcctgatgagccgggtggcccagcctgccagcaagaagatcgatcagaacaagctgaaacctgagatggacgagaagggcaacctgaccaccgccggctttgcctgctctcagtgtggccagcccctgttcgtgtacaagctggagcaggtgtctgagaagggcaaggcttacaccaactacttcggacggtgcaatgtggccgagcacgaaaagctgatcctgctggcccagctgaagcccgagaaggatagcgacgaagccgtgacatatagcctgggaaagtttgggcagagggccctggatttctacagcattcatgtgaccaaggagtccacccaccccgtgaagcccctggcccagatcgccggaaacagatacgcctccggacctgtgggaaaggccctgagcgacgcatgtatgggcacaatcgcctccttcctgtctaagtaccaggacatcatcatcgaacaccagaaggtggtgaagggcaaccagaagagactggagagcctgcgggagctggccggcaaggaaaacctggaataccctagcgtgaccctgccacctcagcctcacaccaaggagggcgttgatgcctacaacgaagtgatcgcccgggtgcgaatgtgggtgaacctgaacctgtggcagaagctgaagctaagcagagatgatgccaagcctctgctgagactgaagggattcccttcctttcctctggtcgagagacaggccaacgaagtggactggtgggacatggtgtgtaacgtgaagaagctgatcaacgagaaaaaggaggatggcaaggtgttttggcagaatctggctggctacaagagacaggaagccctgagaccatacctgagcagcgaggaagatcggaagaagggaaagaaattcgctcggtaccagctgggcgacctgctgctgcacctggaaaagaagcacggcgaggactggggaaaggtgtacgacgaggcctgggagcggattgacaagaaagtggaaggcctgagcaagcacatcaagctggaagaggaacggagaagcgaggacgcccagagcaaggccgccctgaccgactggctgcgggctaaggccagcttcgtgatcgagggcctgaaggaggccgacaaggacgagttctgcagatgcgagctgaagctgcagaagtggtacggggacctgcggggaaagcccttcgccatcgaagccgagaacagcatcctggacatcagcggcttcagcaagcagtacaactgtgccttcatctggcagaaggacggcgtgaagaagctgaacctgtacctgatcatcaactacttcaagggcggcaagctgcggttcaagaagatcaaacctgaagccttcgaagccaacagattctacaccgtgatcaacaaaaagagcggcgagatcgtgcccatggaggtgaacttcaacttcgacgaccccaacctgatcatcctgcctctggcctttggcaagagacagggcagagaattcatctggaacgacctgctgtccctggaaaccggcagcctgaagctggccaacggaagagtgatcgagaagacactgtacaacagaagaacccggcaggatgagcctgccctgttcgtggccctgaccttcgagcggcgggaggtcctggactcctccaatatcaaaccaatgaacctgatcggcgtggcaagaggcgaaaacatccccgccgtgatcgccctgaccgaccccgagggctgcccactgagccggtttaaggatagcctgggaaacccaacccacatcctgagaatcggcgagagctataaggagaagcagcggaccatccaggccaagaaggaggtggagcagcggagagccggcggctacagccggaagtacgccagcaaagccaagaatctggcagacgatatggtgagaaacaccgctagagatctgctgtactacgccgtgacccaggatgccatgctgatcttcgccaacctgagccggggcttcggccggcagggcaagcggaccttcatggccgagagacagtacacacggatggaggactggctgaccgccaagctggcctacgagggcctgagcaagacctacctgtccaagacactggcccagtacacctccaagacatgcagcaactgtgggtttaccatcaccagcgccgactacgacagggtgctggagaagctgaagaagacagcaacaggctggatgaccacaattaacggcaaggagctgaaggtggagggccagattacctactacaacagatacaagagacagaacgtagtcaaggacctgtccgtcgagctggatagactgagcgaagaatctgtgaacaacgacatctcctcctggacaaagggcagaagcggagaagctctgagcctcctgaagaaaagattctcccatagacccgtgcaggagaagttcgtgtgcctgaactgcggcttcgagacacacgcagccgagcaagccgccctgaacatcgccagatcctggctgttcctgcggagccaggagtacaagaaataccagacaaacaagacaaccggcaacaccgataagagagccttcgtcgagacctggcagtccttttaccggaagaagcttaaggaggtgtggaaacctgccgtgcggtctggcggatctggcggaggctccacaagcaaggagaacgccgtgacctacgacgacatccacatcgacttcaccagggaggagtggaccctgctggaccccagccagaagaacctgtacaaggacgtgatgctggagacctacaggcacctgaccaccatcggctacagctgggaggaccacaacatcgagaagtactgcgagagcagcaggaggcacaagagcaccgtgcagaggcacaagaggaccaacaccaacgagaacccctacgagaccagccccaagaaaaagagaaaagtctaagctgccttctgcggggcttgccttctggccatgcccttcttctctcccttgcacctgtacctcttggtctttgaataaagcctgagtaggaaggctagcaaaaaaaaaaaaaaaaaaaaaaaaaaaaaaaaaaaaaaaaaaaaaaaaaaaaaaaaaaaaaaaaaaaaaaaaaaaaaaaa

SEQ ID NO: 6968 - RNA, 5797 nt, synthetic construct
  source 1..5797: mol_type = other RNA
aggaaataagagagaaaagaagagtaagaagaaatataagagccaccatggcccctaagaagaagcgtaaagtgagccggatggaacgcctcgtctacgaggtgcggcagaagtgcagaaacatcgaggacatctgcatctcctgcggatctctgaacgtgaccctggagcacccactgttcatcggcggcatgtgccagaactgtaaaaactgttttctggagtgtgcctatcaatacgacgatgacggctaccagagctactgcaccatctgttgcggcggaagagaggtgctgatgtgtggaaataacaactgctgccggtgcttctgcgtggaatgcgtggacctgctggtgggccccggcgccgcccaggccgctattaaggaagatccttggaactgctacatgtgcggccacaagggcacatacggcctgctgagacggagagaggactggcctagcagactgcagatgttcttcgccaataaccacgaccaggagttcgacccccctaaggtgtaccctcccgtccccgccgagaagagaaagcccatccgggtcctgagcctgttcgatggcatcgccaccggtctgctggtgctgaaggacctgggcatccaggtggataggtacattgcctccgaggtgtgcgaggactccatcaccgtgggaatggtgcgtcatcagggcaagatcatgtacgtgggcgacgtgcggagcgtgacacagaagcatatccaggagtggggccctttcgacctggtgatcggcggcagcccttgcaatgacctgagcatcgtgaacccagcccggaagggcctgtacgagggaaccggcagactgttcttcgagttttacagactgctgcacgacgcccggcctaaggaaggcgacgaccggcccttcttttggctgttcgagaatgtggtggccatgggagtcagcgacaagcgggatattagccggttcctggagagcaaccccgtgatgatcgatgccaaggaagtgagcgccgcccaccgggccagatacttctggggcaatctgcctggcatgaacagacccctggccagcaccgtgaacgacaagctggagctgcaggagtgcctggagcacggccggatcgccaagttcagcaaggtgagaaccatcaccacccgaagcaacagcatcaaacaaggcaaggaccagcactttcctgtgttcatgaacgagaaggaggacatcctgtggtgtaccgagatggagagagtgttcgggttcccagtccactacacagatgtcagcaacatgtctagactggccagacagagactgctgggaagaagctggtccgtccctgtgatcagacacctgttcgcccctctgaaggagtacttcgcctgcgtgagcagcggcaacagcaacgccaacagccggggccccagcttctctagcggcctggtgccactgtccctgagagggagccacatgggccccatggagatctacaaaaccgtgagcgcctggaagcggcagcctgtgcgcgtgctgagcctgtttcggaatatcgataaagtcctgaaaagcctgggattcctggagagcggctctggctccggcggtggcaccctgaagtacgtggaggatgtgacaaacgtggtcagacgggatgtggagaagtggggccccttcgatctggtgtacggcagcacccaacccctgggcagctcttgtgaccggtgccctggctggtacatgtttcagttccaccggatcctgcagtacgccctgccgagacaggagtcccagcggccattcttttggattttcatggacaacttgctgctgaccgaggatgaccaggaaactaccactcggttcctgcagaccgaagccgtgaccctgcaggacgtgagaggccgggactaccagaacgccatgcgggtgtggtccaacatccctggactgaaaagcaagcacgcacctctgacccctaaagaagaggagtacctgcaggcccaggtgcggagcagaagcaagctggacgcccctaaggtggatctgctggtgaagaattgcctcctgcccctgagagagtacttcaagtatttcagccagaatagtctgcccctgggcggcccaagcagcggcgcccctcctcccagcggcggcagcccagccggctccccaacctctaccgaggagggcacctctgagtccgccacccccgagagcggccctggcacctccaccgagcccagcgagggcagcgcacccggcagccctgccggcagccccacctccacagaggagggaaccagcaccgagcccagcgaaggcagcgccccaggcaccagcaccgagcctagtgagggcggctctggcggcggcagcgcccaggagattaaacggatcaacaagatcagaagaagacttgtgaaagacagcaacaccaagaaggccggcaagacaggccccatgaaaaccctgctggttagagtgatgacacccgatctgagagagcggctggaaaacctgagaaagaagcctgaaaatatcccccagcccatcagcaatacatctagagccaacctgaataagctgctgaccgattacaccgaaatgaagaaggcgatcctgcatgtgtactgggaagagttccagaaggaccctgtgggcctgatgagccgggtggcccagcctgccagcaagaagatcgatcagaacaagctgaaacctgagatggacgagaagggcaacctgaccaccgccggctttgcctgctctcagtgtggccagcccctgttcgtgtacaagctggagcaggtgtctgagaagggcaaggcttacaccaactacttcggacggtgcaatgtggccgagcacgaaaagctgatcctgctggcccagctgaagcccgagaaggatagcgacgaagccgtgacatatagcctgggaaagtttgggcagagggccctggatttctacagcattcatgtgaccaaggagtccacccaccccgtgaagcccctggcccagatcgccggaaacagatacgcctccggacctgtgggaaaggccctgagcgacgcatgtatgggcacaatcgcctccttcctgtctaagtaccaggacatcatcatcgaacaccagaaggtggtgaagggcaaccagaagagactggagagcctgcgggagctggccggcaaggaaaacctggaataccctagcgtgaccctgccacctcagcctcacaccaaggagggcgttgatgcctacaacgaagtgatcgcccgggtgcgaatgtgggtgaacctgaacctgtggcagaagctgaagctaagcagagatgatgccaagcctctgctgagactgaagggattcccttcctttcctctggtcgagagacaggccaacgaagtggactggtgggacatggtgtgtaacgtgaagaagctgatcaacgagaaaaaggaggatggcaaggtgttttggcagaatctggctggctacaagagacaggaagccctgagaccatacctgagcagcgaggaagatcggaagaagggaaagaaattcgctcggtaccagctgggcgacctgctgctgcacctggaaaagaagcacggcgaggactggggaaaggtgtacgacgaggcctgggagcggattgacaagaaagtggaaggcctgagcaagcacatcaagctggaagaggaacggagaagcgaggacgcccagagcaaggccgccctgaccgactggctgcgggctaaggccagcttcgtgatcgagggcctgaaggaggccgacaaggacgagttctgcagatgcgagctgaagctgcagaagtggtacggggacctgcggggaaagcccttcgccatcgaagccgagaacagcatcctggacatcagcggcttcagcaagcagtacaactgtgccttcatctggcagaaggacggcgtgaagaagctgaacctgtacctgatcatcaactacttcaagggcggcaagctgcggttcaagaagatcaaacctgaagccttcgaagccaacagattctacaccgtgatcaacaaaaagagcggcgagatcgtgcccatggaggtgaacttcaacttcgacgaccccaacctgatcatcctgcctctggcctttggcaagagacagggcagagaattcatctggaacgacctgctgtccctggaaaccggcagcctgaagctggccaacggaagagtgatcgagaagacactgtacaacagaagaacccggcaggatgagcctgccctgttcgtggccctgaccttcgagcggcgggaggtcctggactcctccaatatcaaaccaatgaacctgatcggcgtggcaagaggcgaaaacatccccgccgtgatcgccctgaccgaccccgagggctgcccactgagccggtttaaggatagcctgggaaacccaacccacatcctgagaatcggcgagagctataaggagaagcagcggaccatccaggccaagaaggaggtggagcagcggagagccggcggctacagccggaagtacgccagcaaagccaagaatctggcagacgatatggtgagaaacaccgctagagatctgctgtactacgccgtgacccaggatgccatgctgatcttcgccaacctgagccggggcttcggccggcagggcaagcggaccttcatggccgagagacagtacacacggatggaggactggctgaccgccaagctggcctacgagggcctgagcaagacctacctgtccaagacactggcccagtacacctccaagacatgcagcaactgtgggtttaccatcaccagcgccgactacgacagggtgctggagaagctgaagaagacagcaacaggctggatgaccacaattaacggcaaggagctgaaggtggagggccagattacctactacaacagatacaagagacagaacgtagtcaaggacctgtccgtcgagctggatagactgagcgaagaatctgtgaacaacgacatctcctcctggacaaagggcagaagcggagaagctctgagcctcctgaagaaaagattctcccatagacccgtgcaggagaagttcgtgtgcctgaactgcggcttcgagacacacgcagccgagcaagccgccctgaacatcgccagatcctggctgttcctgcggagccaggagtacaagaaataccagacaaacaagacaaccggcaacaccgataagagagccttcgtcgagacctggcagtccttttaccggaagaagcttaaggaggtgtggaaacctgccgtgcggtctggcggatctggcggaggctccacaagcccccaggtgagcctgaccttcgaggacgtggccgtgctgttcaccagggacgagtggaggaagctggcccccagccagaggaacctgtacagggacgtgatgctggagaactacaggaacctggtgagcctgggcctgcccttcaccaagcccaaggtgatcagcctgctgcagcagggcgaggacccctggaaggtggagaaggacagcagcggcggctgcagccccggctgcaagagcaacaccagccccaagaaaaagagaaaagtctaagctgccttctgcggggcttgccttctggccatgcccttcttctctcccttgcacctgtacctcttggtctttgaataaagcctgagtaggaaggctagcaaaaaaaaaaaaaaaaaaaaaaaaaaaaaaaaaaaaaaaaaaaaaaaaaaaaaaaaaaaaaaaaaaaaaaaaaaaaaaaa

SEQ ID NO: 6969 - RNA, 5797 nt, synthetic construct
  source 1..5797: mol_type = other RNA
aggaaataagagagaaaagaagagtaagaagaaatataagagccaccatggcccctaagaagaagcgtaaagtgagccggatggaacgcctcgtctacgaggtgcggcagaagtgcagaaacatcgaggacatctgcatctcctgcggatctctgaacgtgaccctggagcacccactgttcatcggcggcatgtgccagaactgtaaaaactgttttctggagtgtgcctatcaatacgacgatgacggctaccagagctactgcaccatctgttgcggcggaagagaggtgctgatgtgtggaaataacaactgctgccggtgcttctgcgtggaatgcgtggacctgctggtgggccccggcgccgcccaggccgctattaaggaagatccttggaactgctacatgtgcggccacaagggcacatacggcctgctgagacggagagaggactggcctagcagactgcagatgttcttcgccaataaccacgaccaggagttcgacccccctaaggtgtaccctcccgtccccgccgagaagagaaagcccatccgggtcctgagcctgttcgatggcatcgccaccggtctgctggtgctgaaggacctgggcatccaggtggataggtacattgcctccgaggtgtgcgaggactccatcaccgtgggaatggtgcgtcatcagggcaagatcatgtacgtgggcgacgtgcggagcgtgacacagaagcatatccaggagtggggccctttcgacctggtgatcggcggcagcccttgcaatgacctgagcatcgtgaacccagcccggaagggcctgtacgagggaaccggcagactgttcttcgagttttacagactgctgcacgacgcccggcctaaggaaggcgacgaccggcccttcttttggctgttcgagaatgtggtggccatgggagtcagcgacaagcgggatattagccggttcctggagagcaaccccgtgatgatcgatgccaaggaagtgagcgccgcccaccgggccagatacttctggggcaatctgcctggcatgaacagacccctggccagcaccgtgaacgacaagctggagctgcaggagtgcctggagcacggccggatcgccaagttcagcaaggtgagaaccatcaccacccgaagcaacagcatcaaacaaggcaaggaccagcactttcctgtgttcatgaacgagaaggaggacatcctgtggtgtaccgagatggagagagtgttcgggttcccagtccactacacagatgtcagcaacatgtctagactggccagacagagactgctgggaagaagctggtccgtccctgtgatcagacacctgttcgcccctctgaaggagtacttcgcctgcgtgagcagcggcaacagcaacgccaacagccggggccccagcttctctagcggcctggtgccactgtccctgagagggagccacatgggccccatggagatctacaaaaccgtgagcgcctggaagcggcagcctgtgcgcgtgctgagcctgtttcggaatatcgataaagtcctgaaaagcctgggattcctggagagcggctctggctccggcggtggcaccctgaagtacgtggaggatgtgacaaacgtggtcagacgggatgtggagaagtggggccccttcgatctggtgtacggcagcacccaacccctgggcagctcttgtgaccggtgccctggctggtacatgtttcagttccaccggatcctgcagtacgccctgccgagacaggagtcccagcggccattcttttggattttcatggacaacttgctgctgaccgaggatgaccaggaaactaccactcggttcctgcagaccgaagccgtgaccctgcaggacgtgagaggccgggactaccagaacgccatgcgggtgtggtccaacatccctggactgaaaagcaagcacgcacctctgacccctaaagaagaggagtacctgcaggcccaggtgcggagcagaagcaagctggacgcccctaaggtggatctgctggtgaagaattgcctcctgcccctgagagagtacttcaagtatttcagccagaatagtctgcccctgggcggcccaagcagcggcgcccctcctcccagcggcggcagcccagccggctccccaacctctaccgaggagggcacctctgagtccgccacccccgagagcggccctggcacctccaccgagcccagcgagggcagcgcacccggcagccctgccggcagccccacctccacagaggagggaaccagcaccgagcccagcgaaggcagcgccccaggcaccagcaccgagcctagtgagggcggctctggcggcggcagcgcccaggagattaaacggatcaacaagatcagaagaagacttgtgaaagacagcaacaccaagaaggccggcaagacaggccccatgaaaaccctgctggttagagtgatgacacccgatctgagagagcggctggaaaacctgagaaagaagcctgaaaatatcccccagcccatcagcaatacatctagagccaacctgaataagctgctgaccgattacaccgaaatgaagaaggcgatcctgcatgtgtactgggaagagttccagaaggaccctgtgggcctgatgagccgggtggcccagcctgccagcaagaagatcgatcagaacaagctgaaacctgagatggacgagaagggcaacctgaccaccgccggctttgcctgctctcagtgtggccagcccctgttcgtgtacaagctggagcaggtgtctgagaagggcaaggcttacaccaactacttcggacggtgcaatgtggccgagcacgaaaagctgatcctgctggcccagctgaagcccgagaaggatagcgacgaagccgtgacatatagcctgggaaagtttgggcagagggccctggatttctacagcattcatgtgaccaaggagtccacccaccccgtgaagcccctggcccagatcgccggaaacagatacgcctccggacctgtgggaaaggccctgagcgacgcatgtatgggcacaatcgcctccttcctgtctaagtaccaggacatcatcatcgaacaccagaaggtggtgaagggcaaccagaagagactggagagcctgcgggagctggccggcaaggaaaacctggaataccctagcgtgaccctgccacctcagcctcacaccaaggagggcgttgatgcctacaacgaagtgatcgcccgggtgcgaatgtgggtgaacctgaacctgtggcagaagctgaagctaagcagagatgatgccaagcctctgctgagactgaagggattcccttcctttcctctggtcgagagacaggccaacgaagtggactggtgggacatggtgtgtaacgtgaagaagctgatcaacgagaaaaaggaggatggcaaggtgttttggcagaatctggctggctacaagagacaggaagccctgagaccatacctgagcagcgaggaagatcggaagaagggaaagaaattcgctcggtaccagctgggcgacctgctgctgcacctggaaaagaagcacggcgaggactggggaaaggtgtacgacgaggcctgggagcggattgacaagaaagtggaaggcctgagcaagcacatcaagctggaagaggaacggagaagcgaggacgcccagagcaaggccgccctgaccgactggctgcgggctaaggccagcttcgtgatcgagggcctgaaggaggccgacaaggacgagttctgcagatgcgagctgaagctgcagaagtggtacggggacctgcggggaaagcccttcgccatcgaagccgagaacagcatcctggacatcagcggcttcagcaagcagtacaactgtgccttcatctggcagaaggacggcgtgaagaagctgaacctgtacctgatcatcaactacttcaagggcggcaagctgcggttcaagaagatcaaacctgaagccttcgaagccaacagattctacaccgtgatcaacaaaaagagcggcgagatcgtgcccatggaggtgaacttcaacttcgacgaccccaacctgatcatcctgcctctggcctttggcaagagacagggcagagaattcatctggaacgacctgctgtccctggaaaccggcagcctgaagctggccaacggaagagtgatcgagaagacactgtacaacagaagaacccggcaggatgagcctgccctgttcgtggccctgaccttcgagcggcgggaggtcctggactcctccaatatcaaaccaatgaacctgatcggcgtggcaagaggcgaaaacatccccgccgtgatcgccctgaccgaccccgagggctgcccactgagccggtttaaggatagcctgggaaacccaacccacatcctgagaatcggcgagagctataaggagaagcagcggaccatccaggccaagaaggaggtggagcagcggagagccggcggctacagccggaagtacgccagcaaagccaagaatctggcagacgatatggtgagaaacaccgctagagatctgctgtactacgccgtgacccaggatgccatgctgatcttcgccaacctgagccggggcttcggccggcagggcaagcggaccttcatggccgagagacagtacacacggatggaggactggctgaccgccaagctggcctacgagggcctgagcaagacctacctgtccaagacactggcccagtacacctccaagacatgcagcaactgtgggtttaccatcaccagcgccgactacgacagggtgctggagaagctgaagaagacagcaacaggctggatgaccacaattaacggcaaggagctgaaggtggagggccagattacctactacaacagatacaagagacagaacgtagtcaaggacctgtccgtcgagctggatagactgagcgaagaatctgtgaacaacgacatctcctcctggacaaagggcagaagcggagaagctctgagcctcctgaagaaaagattctcccatagacccgtgcaggagaagttcgtgtgcctgaactgcggcttcgagacacacgcagccgagcaagccgccctgaacatcgccagatcctggctgttcctgcggagccaggagtacaagaaataccagacaaacaagacaaccggcaacaccgataagagagccttcgtcgagacctggcagtccttttaccggaagaagcttaaggaggtgtggaaacctgccgtgcggtctggcggatctggcggaggctccacaagcgcccacagcatggtgatgttcagggacgtgaccgtggacttcagccaggaggagtgggagtgcctgagcagctacgagagggacctgtacagggacgtgatgctggagaactacagccacctggtgagcctggccggctgcagcatcagcaagcccgacgtgatcaccctgctggagcagggcaaggagccctggatgatcgtgagggccgagaagaggaggtggagcagggacctggagagcaccagccccaagaaaaagagaaaagtctaagctgccttctgcggggcttgccttctggccatgcccttcttctctcccttgcacctgtacctcttggtctttgaataaagcctgagtaggaaggctagcaaaaaaaaaaaaaaaaaaaaaaaaaaaaaaaaaaaaaaaaaaaaaaaaaaaaaaaaaaaaaaaaaaaaaaaaaaaaaaaa

SEQ ID NO: 6970 - RNA, 5797 nt, synthetic construct
  source 1..5797: mol_type = other RNA
aggaaataagagagaaaagaagagtaagaagaaatataagagccaccatggcccctaagaagaagcgtaaagtgagccggatggaacgcctcgtctacgaggtgcggcagaagtgcagaaacatcgaggacatctgcatctcctgcggatctctgaacgtgaccctggagcacccactgttcatcggcggcatgtgccagaactgtaaaaactgttttctggagtgtgcctatcaatacgacgatgacggctaccagagctactgcaccatctgttgcggcggaagagaggtgctgatgtgtggaaataacaactgctgccggtgcttctgcgtggaatgcgtggacctgctggtgggccccggcgccgcccaggccgctattaaggaagatccttggaactgctacatgtgcggccacaagggcacatacggcctgctgagacggagagaggactggcctagcagactgcagatgttcttcgccaataaccacgaccaggagttcgacccccctaaggtgtaccctcccgtccccgccgagaagagaaagcccatccgggtcctgagcctgttcgatggcatcgccaccggtctgctggtgctgaaggacctgggcatccaggtggataggtacattgcctccgaggtgtgcgaggactccatcaccgtgggaatggtgcgtcatcagggcaagatcatgtacgtgggcgacgtgcggagcgtgacacagaagcatatccaggagtggggccctttcgacctggtgatcggcggcagcccttgcaatgacctgagcatcgtgaacccagcccggaagggcctgtacgagggaaccggcagactgttcttcgagttttacagactgctgcacgacgcccggcctaaggaaggcgacgaccggcccttcttttggctgttcgagaatgtggtggccatgggagtcagcgacaagcgggatattagccggttcctggagagcaaccccgtgatgatcgatgccaaggaagtgagcgccgcccaccgggccagatacttctggggcaatctgcctggcatgaacagacccctggccagcaccgtgaacgacaagctggagctgcaggagtgcctggagcacggccggatcgccaagttcagcaaggtgagaaccatcaccacccgaagcaacagcatcaaacaaggcaaggaccagcactttcctgtgttcatgaacgagaaggaggacatcctgtggtgtaccgagatggagagagtgttcgggttcccagtccactacacagatgtcagcaacatgtctagactggccagacagagactgctgggaagaagctggtccgtccctgtgatcagacacctgttcgcccctctgaaggagtacttcgcctgcgtgagcagcggcaacagcaacgccaacagccggggccccagcttctctagcggcctggtgccactgtccctgagagggagccacatgggccccatggagatctacaaaaccgtgagcgcctggaagcggcagcctgtgcgcgtgctgagcctgtttcggaatatcgataaagtcctgaaaagcctgggattcctggagagcggctctggctccggcggtggcaccctgaagtacgtggaggatgtgacaaacgtggtcagacgggatgtggagaagtggggccccttcgatctggtgtacggcagcacccaacccctgggcagctcttgtgaccggtgccctggctggtacatgtttcagttccaccggatcctgcagtacgccctgccgagacaggagtcccagcggccattcttttggattttcatggacaacttgctgctgaccgaggatgaccaggaaactaccactcggttcctgcagaccgaagccgtgaccctgcaggacgtgagaggccgggactaccagaacgccatgcgggtgtggtccaacatccctggactgaaaagcaagcacgcacctctgacccctaaagaagaggagtacctgcaggcccaggtgcggagcagaagcaagctggacgcccctaaggtggatctgctggtgaagaattgcctcctgcccctgagagagtacttcaagtatttcagccagaatagtctgcccctgggcggcccaagcagcggcgcccctcctcccagcggcggcagcccagccggctccccaacctctaccgaggagggcacctctgagtccgccacccccgagagcggccctggcacctccaccgagcccagcgagggcagcgcacccggcagccctgccggcagccccacctccacagaggagggaaccagcaccgagcccagcgaaggcagcgccccaggcaccagcaccgagcctagtgagggcggctctggcggcggcagcgcccaggagattaaacggatcaacaagatcagaagaagacttgtgaaagacagcaacaccaagaaggccggcaagacaggccccatgaaaaccctgctggttagagtgatgacacccgatctgagagagcggctggaaaacctgagaaagaagcctgaaaatatcccccagcccatcagcaatacatctagagccaacctgaataagctgctgaccgattacaccgaaatgaagaaggcgatcctgcatgtgtactgggaagagttccagaaggaccctgtgggcctgatgagccgggtggcccagcctgccagcaagaagatcgatcagaacaagctgaaacctgagatggacgagaagggcaacctgaccaccgccggctttgcctgctctcagtgtggccagcccctgttcgtgtacaagctggagcaggtgtctgagaagggcaaggcttacaccaactacttcggacggtgcaatgtggccgagcacgaaaagctgatcctgctggcccagctgaagcccgagaaggatagcgacgaagccgtgacatatagcctgggaaagtttgggcagagggccctggatttctacagcattcatgtgaccaaggagtccacccaccccgtgaagcccctggcccagatcgccggaaacagatacgcctccggacctgtgggaaaggccctgagcgacgcatgtatgggcacaatcgcctccttcctgtctaagtaccaggacatcatcatcgaacaccagaaggtggtgaagggcaaccagaagagactggagagcctgcgggagctggccggcaaggaaaacctggaataccctagcgtgaccctgccacctcagcctcacaccaaggagggcgttgatgcctacaacgaagtgatcgcccgggtgcgaatgtgggtgaacctgaacctgtggcagaagctgaagctaagcagagatgatgccaagcctctgctgagactgaagggattcccttcctttcctctggtcgagagacaggccaacgaagtggactggtgggacatggtgtgtaacgtgaagaagctgatcaacgagaaaaaggaggatggcaaggtgttttggcagaatctggctggctacaagagacaggaagccctgagaccatacctgagcagcgaggaagatcggaagaagggaaagaaattcgctcggtaccagctgggcgacctgctgctgcacctggaaaagaagcacggcgaggactggggaaaggtgtacgacgaggcctgggagcggattgacaagaaagtggaaggcctgagcaagcacatcaagctggaagaggaacggagaagcgaggacgcccagagcaaggccgccctgaccgactggctgcgggctaaggccagcttcgtgatcgagggcctgaaggaggccgacaaggacgagttctgcagatgcgagctgaagctgcagaagtggtacggggacctgcggggaaagcccttcgccatcgaagccgagaacagcatcctggacatcagcggcttcagcaagcagtacaactgtgccttcatctggcagaaggacggcgtgaagaagctgaacctgtacctgatcatcaactacttcaagggcggcaagctgcggttcaagaagatcaaacctgaagccttcgaagccaacagattctacaccgtgatcaacaaaaagagcggcgagatcgtgcccatggaggtgaacttcaacttcgacgaccccaacctgatcatcctgcctctggcctttggcaagagacagggcagagaattcatctggaacgacctgctgtccctggaaaccggcagcctgaagctggccaacggaagagtgatcgagaagacactgtacaacagaagaacccggcaggatgagcctgccctgttcgtggccctgaccttcgagcggcgggaggtcctggactcctccaatatcaaaccaatgaacctgatcggcgtggcaagaggcgaaaacatccccgccgtgatcgccctgaccgaccccgagggctgcccactgagccggtttaaggatagcctgggaaacccaacccacatcctgagaatcggcgagagctataaggagaagcagcggaccatccaggccaagaaggaggtggagcagcggagagccggcggctacagccggaagtacgccagcaaagccaagaatctggcagacgatatggtgagaaacaccgctagagatctgctgtactacgccgtgacccaggatgccatgctgatcttcgccaacctgagccggggcttcggccggcagggcaagcggaccttcatggccgagagacagtacacacggatggaggactggctgaccgccaagctggcctacgagggcctgagcaagacctacctgtccaagacactggcccagtacacctccaagacatgcagcaactgtgggtttaccatcaccagcgccgactacgacagggtgctggagaagctgaagaagacagcaacaggctggatgaccacaattaacggcaaggagctgaaggtggagggccagattacctactacaacagatacaagagacagaacgtagtcaaggacctgtccgtcgagctggatagactgagcgaagaatctgtgaacaacgacatctcctcctggacaaagggcagaagcggagaagctctgagcctcctgaagaaaagattctcccatagacccgtgcaggagaagttcgtgtgcctgaactgcggcttcgagacacacgcagccgagcaagccgccctgaacatcgccagatcctggctgttcctgcggagccaggagtacaagaaataccagacaaacaagacaaccggcaacaccgataagagagccttcgtcgagacctggcagtccttttaccggaagaagcttaaggaggtgtggaaacctgccgtgcggtctggcggatctggcggaggctccacaagccaggtgcccgtgaccttcgaggacatcgccgtgagcttcagccaggaggagtggaagtacctggacgagggccagaagaacctgtactgggaggtgatgaaggagaactacgagaccctgatcagcctggccgacagcgaggtggagcaggaggacaagagggccaagaacagggaggagtgccccatgctgtggggcctgatccccaggcagagcaggaagaacagcgagaaggtgagctggaccagccccaagaaaaagagaaaagtctaagctgccttctgcggggcttgccttctggccatgcccttcttctctcccttgcacctgtacctcttggtctttgaataaagcctgagtaggaaggctagcaaaaaaaaaaaaaaaaaaaaaaaaaaaaaaaaaaaaaaaaaaaaaaaaaaaaaaaaaaaaaaaaaaaaaaaaaaaaaaaa

SEQ ID NO: 6971 - RNA, 5797 nt, synthetic construct
  source 1..5797: mol_type = other RNA
aggaaataagagagaaaagaagagtaagaagaaatataagagccaccatggcccctaagaagaagcgtaaagtgagccggatggaacgcctcgtctacgaggtgcggcagaagtgcagaaacatcgaggacatctgcatctcctgcggatctctgaacgtgaccctggagcacccactgttcatcggcggcatgtgccagaactgtaaaaactgttttctggagtgtgcctatcaatacgacgatgacggctaccagagctactgcaccatctgttgcggcggaagagaggtgctgatgtgtggaaataacaactgctgccggtgcttctgcgtggaatgcgtggacctgctggtgggccccggcgccgcccaggccgctattaaggaagatccttggaactgctacatgtgcggccacaagggcacatacggcctgctgagacggagagaggactggcctagcagactgcagatgttcttcgccaataaccacgaccaggagttcgacccccctaaggtgtaccctcccgtccccgccgagaagagaaagcccatccgggtcctgagcctgttcgatggcatcgccaccggtctgctggtgctgaaggacctgggcatccaggtggataggtacattgcctccgaggtgtgcgaggactccatcaccgtgggaatggtgcgtcatcagggcaagatcatgtacgtgggcgacgtgcggagcgtgacacagaagcatatccaggagtggggccctttcgacctggtgatcggcggcagcccttgcaatgacctgagcatcgtgaacccagcccggaagggcctgtacgagggaaccggcagactgttcttcgagttttacagactgctgcacgacgcccggcctaaggaaggcgacgaccggcccttcttttggctgttcgagaatgtggtggccatgggagtcagcgacaagcgggatattagccggttcctggagagcaaccccgtgatgatcgatgccaaggaagtgagcgccgcccaccgggccagatacttctggggcaatctgcctggcatgaacagacccctggccagcaccgtgaacgacaagctggagctgcaggagtgcctggagcacggccggatcgccaagttcagcaaggtgagaaccatcaccacccgaagcaacagcatcaaacaaggcaaggaccagcactttcctgtgttcatgaacgagaaggaggacatcctgtggtgtaccgagatggagagagtgttcgggttcccagtccactacacagatgtcagcaacatgtctagactggccagacagagactgctgggaagaagctggtccgtccctgtgatcagacacctgttcgcccctctgaaggagtacttcgcctgcgtgagcagcggcaacagcaacgccaacagccggggccccagcttctctagcggcctggtgccactgtccctgagagggagccacatgggccccatggagatctacaaaaccgtgagcgcctggaagcggcagcctgtgcgcgtgctgagcctgtttcggaatatcgataaagtcctgaaaagcctgggattcctggagagcggctctggctccggcggtggcaccctgaagtacgtggaggatgtgacaaacgtggtcagacgggatgtggagaagtggggccccttcgatctggtgtacggcagcacccaacccctgggcagctcttgtgaccggtgccctggctggtacatgtttcagttccaccggatcctgcagtacgccctgccgagacaggagtcccagcggccattcttttggattttcatggacaacttgctgctgaccgaggatgaccaggaaactaccactcggttcctgcagaccgaagccgtgaccctgcaggacgtgagaggccgggactaccagaacgccatgcgggtgtggtccaacatccctggactgaaaagcaagcacgcacctctgacccctaaagaagaggagtacctgcaggcccaggtgcggagcagaagcaagctggacgcccctaaggtggatctgctggtgaagaattgcctcctgcccctgagagagtacttcaagtatttcagccagaatagtctgcccctgggcggcccaagcagcggcgcccctcctcccagcggcggcagcccagccggctccccaacctctaccgaggagggcacctctgagtccgccacccccgagagcggccctggcacctccaccgagcccagcgagggcagcgcacccggcagccctgccggcagccccacctccacagaggagggaaccagcaccgagcccagcgaaggcagcgccccaggcaccagcaccgagcctagtgagggcggctctggcggcggcagcgcccaggagattaaacggatcaacaagatcagaagaagacttgtgaaagacagcaacaccaagaaggccggcaagacaggccccatgaaaaccctgctggttagagtgatgacacccgatctgagagagcggctggaaaacctgagaaagaagcctgaaaatatcccccagcccatcagcaatacatctagagccaacctgaataagctgctgaccgattacaccgaaatgaagaaggcgatcctgcatgtgtactgggaagagttccagaaggaccctgtgggcctgatgagccgggtggcccagcctgccagcaagaagatcgatcagaacaagctgaaacctgagatggacgagaagggcaacctgaccaccgccggctttgcctgctctcagtgtggccagcccctgttcgtgtacaagctggagcaggtgtctgagaagggcaaggcttacaccaactacttcggacggtgcaatgtggccgagcacgaaaagctgatcctgctggcccagctgaagcccgagaaggatagcgacgaagccgtgacatatagcctgggaaagtttgggcagagggccctggatttctacagcattcatgtgaccaaggagtccacccaccccgtgaagcccctggcccagatcgccggaaacagatacgcctccggacctgtgggaaaggccctgagcgacgcatgtatgggcacaatcgcctccttcctgtctaagtaccaggacatcatcatcgaacaccagaaggtggtgaagggcaaccagaagagactggagagcctgcgggagctggccggcaaggaaaacctggaataccctagcgtgaccctgccacctcagcctcacaccaaggagggcgttgatgcctacaacgaagtgatcgcccgggtgcgaatgtgggtgaacctgaacctgtggcagaagctgaagctaagcagagatgatgccaagcctctgctgagactgaagggattcccttcctttcctctggtcgagagacaggccaacgaagtggactggtgggacatggtgtgtaacgtgaagaagctgatcaacgagaaaaaggaggatggcaaggtgttttggcagaatctggctggctacaagagacaggaagccctgagaccatacctgagcagcgaggaagatcggaagaagggaaagaaattcgctcggtaccagctgggcgacctgctgctgcacctggaaaagaagcacggcgaggactggggaaaggtgtacgacgaggcctgggagcggattgacaagaaagtggaaggcctgagcaagcacatcaagctggaagaggaacggagaagcgaggacgcccagagcaaggccgccctgaccgactggctgcgggctaaggccagcttcgtgatcgagggcctgaaggaggccgacaaggacgagttctgcagatgcgagctgaagctgcagaagtggtacggggacctgcggggaaagcccttcgccatcgaagccgagaacagcatcctggacatcagcggcttcagcaagcagtacaactgtgccttcatctggcagaaggacggcgtgaagaagctgaacctgtacctgatcatcaactacttcaagggcggcaagctgcggttcaagaagatcaaacctgaagccttcgaagccaacagattctacaccgtgatcaacaaaaagagcggcgagatcgtgcccatggaggtgaacttcaacttcgacgaccccaacctgatcatcctgcctctggcctttggcaagagacagggcagagaattcatctggaacgacctgctgtccctggaaaccggcagcctgaagctggccaacggaagagtgatcgagaagacactgtacaacagaagaacccggcaggatgagcctgccctgttcgtggccctgaccttcgagcggcgggaggtcctggactcctccaatatcaaaccaatgaacctgatcggcgtggcaagaggcgaaaacatccccgccgtgatcgccctgaccgaccccgagggctgcccactgagccggtttaaggatagcctgggaaacccaacccacatcctgagaatcggcgagagctataaggagaagcagcggaccatccaggccaagaaggaggtggagcagcggagagccggcggctacagccggaagtacgccagcaaagccaagaatctggcagacgatatggtgagaaacaccgctagagatctgctgtactacgccgtgacccaggatgccatgctgatcttcgccaacctgagccggggcttcggccggcagggcaagcggaccttcatggccgagagacagtacacacggatggaggactggctgaccgccaagctggcctacgagggcctgagcaagacctacctgtccaagacactggcccagtacacctccaagacatgcagcaactgtgggtttaccatcaccagcgccgactacgacagggtgctggagaagctgaagaagacagcaacaggctggatgaccacaattaacggcaaggagctgaaggtggagggccagattacctactacaacagatacaagagacagaacgtagtcaaggacctgtccgtcgagctggatagactgagcgaagaatctgtgaacaacgacatctcctcctggacaaagggcagaagcggagaagctctgagcctcctgaagaaaagattctcccatagacccgtgcaggagaagttcgtgtgcctgaactgcggcttcgagacacacgcagccgagcaagccgccctgaacatcgccagatcctggctgttcctgcggagccaggagtacaagaaataccagacaaacaagacaaccggcaacaccgataagagagccttcgtcgagacctggcagtccttttaccggaagaagcttaaggaggtgtggaaacctgccgtgcggtctggcggatctggcggaggctccacaagcatggaggagctgctgagcttccccgacgtggccatcgacttcagcgccgaggagtgcgagtgcctggacctggcccagtggaacctgtacaaggaggtgatgctggagaactacagcaacctggtgttcctgggcctgagcttcagcaagccctacctggtgaccttcctggagcagagcagcgagccctggagcgtgaagaggaagagcgccgccgccagccaccccggcagcaagccccacaccagccccaagaaaaagagaaaagtctaagctgccttctgcggggcttgccttctggccatgcccttcttctctcccttgcacctgtacctcttggtctttgaataaagcctgagtaggaaggctagcaaaaaaaaaaaaaaaaaaaaaaaaaaaaaaaaaaaaaaaaaaaaaaaaaaaaaaaaaaaaaaaaaaaaaaaaaaaaaaaa

SEQ ID NO: 6972 - RNA, 5797 nt, synthetic construct
  source 1..5797: mol_type = other RNA
aggaaataagagagaaaagaagagtaagaagaaatataagagccaccatggcccctaagaagaagcgtaaagtgagccggatggaacgcctcgtctacgaggtgcggcagaagtgcagaaacatcgaggacatctgcatctcctgcggatctctgaacgtgaccctggagcacccactgttcatcggcggcatgtgccagaactgtaaaaactgttttctggagtgtgcctatcaatacgacgatgacggctaccagagctactgcaccatctgttgcggcggaagagaggtgctgatgtgtggaaataacaactgctgccggtgcttctgcgtggaatgcgtggacctgctggtgggccccggcgccgcccaggccgctattaaggaagatccttggaactgctacatgtgcggccacaagggcacatacggcctgctgagacggagagaggactggcctagcagactgcagatgttcttcgccaataaccacgaccaggagttcgacccccctaaggtgtaccctcccgtccccgccgagaagagaaagcccatccgggtcctgagcctgttcgatggcatcgccaccggtctgctggtgctgaaggacctgggcatccaggtggataggtacattgcctccgaggtgtgcgaggactccatcaccgtgggaatggtgcgtcatcagggcaagatcatgtacgtgggcgacgtgcggagcgtgacacagaagcatatccaggagtggggccctttcgacctggtgatcggcggcagcccttgcaatgacctgagcatcgtgaacccagcccggaagggcctgtacgagggaaccggcagactgttcttcgagttttacagactgctgcacgacgcccggcctaaggaaggcgacgaccggcccttcttttggctgttcgagaatgtggtggccatgggagtcagcgacaagcgggatattagccggttcctggagagcaaccccgtgatgatcgatgccaaggaagtgagcgccgcccaccgggccagatacttctggggcaatctgcctggcatgaacagacccctggccagcaccgtgaacgacaagctggagctgcaggagtgcctggagcacggccggatcgccaagttcagcaaggtgagaaccatcaccacccgaagcaacagcatcaaacaaggcaaggaccagcactttcctgtgttcatgaacgagaaggaggacatcctgtggtgtaccgagatggagagagtgttcgggttcccagtccactacacagatgtcagcaacatgtctagactggccagacagagactgctgggaagaagctggtccgtccctgtgatcagacacctgttcgcccctctgaaggagtacttcgcctgcgtgagcagcggcaacagcaacgccaacagccggggccccagcttctctagcggcctggtgccactgtccctgagagggagccacatgggccccatggagatctacaaaaccgtgagcgcctggaagcggcagcctgtgcgcgtgctgagcctgtttcggaatatcgataaagtcctgaaaagcctgggattcctggagagcggctctggctccggcggtggcaccctgaagtacgtggaggatgtgacaaacgtggtcagacgggatgtggagaagtggggccccttcgatctggtgtacggcagcacccaacccctgggcagctcttgtgaccggtgccctggctggtacatgtttcagttccaccggatcctgcagtacgccctgccgagacaggagtcccagcggccattcttttggattttcatggacaacttgctgctgaccgaggatgaccaggaaactaccactcggttcctgcagaccgaagccgtgaccctgcaggacgtgagaggccgggactaccagaacgccatgcgggtgtggtccaacatccctggactgaaaagcaagcacgcacctctgacccctaaagaagaggagtacctgcaggcccaggtgcggagcagaagcaagctggacgcccctaaggtggatctgctggtgaagaattgcctcctgcccctgagagagtacttcaagtatttcagccagaatagtctgcccctgggcggcccaagcagcggcgcccctcctcccagcggcggcagcccagccggctccccaacctctaccgaggagggcacctctgagtccgccacccccgagagcggccctggcacctccaccgagcccagcgagggcagcgcacccggcagccctgccggcagccccacctccacagaggagggaaccagcaccgagcccagcgaaggcagcgccccaggcaccagcaccgagcctagtgagggcggctctggcggcggcagcgcccaggagattaaacggatcaacaagatcagaagaagacttgtgaaagacagcaacaccaagaaggccggcaagacaggccccatgaaaaccctgctggttagagtgatgacacccgatctgagagagcggctggaaaacctgagaaagaagcctgaaaatatcccccagcccatcagcaatacatctagagccaacctgaataagctgctgaccgattacaccgaaatgaagaaggcgatcctgcatgtgtactgggaagagttccagaaggaccctgtgggcctgatgagccgggtggcccagcctgccagcaagaagatcgatcagaacaagctgaaacctgagatggacgagaagggcaacctgaccaccgccggctttgcctgctctcagtgtggccagcccctgttcgtgtacaagctggagcaggtgtctgagaagggcaaggcttacaccaactacttcggacggtgcaatgtggccgagcacgaaaagctgatcctgctggcccagctgaagcccgagaaggatagcgacgaagccgtgacatatagcctgggaaagtttgggcagagggccctggatttctacagcattcatgtgaccaaggagtccacccaccccgtgaagcccctggcccagatcgccggaaacagatacgcctccggacctgtgggaaaggccctgagcgacgcatgtatgggcacaatcgcctccttcctgtctaagtaccaggacatcatcatcgaacaccagaaggtggtgaagggcaaccagaagagactggagagcctgcgggagctggccggcaaggaaaacctggaataccctagcgtgaccctgccacctcagcctcacaccaaggagggcgttgatgcctacaacgaagtgatcgcccgggtgcgaatgtgggtgaacctgaacctgtggcagaagctgaagctaagcagagatgatgccaagcctctgctgagactgaagggattcccttcctttcctctggtcgagagacaggccaacgaagtggactggtgggacatggtgtgtaacgtgaagaagctgatcaacgagaaaaaggaggatggcaaggtgttttggcagaatctggctggctacaagagacaggaagccctgagaccatacctgagcagcgaggaagatcggaagaagggaaagaaattcgctcggtaccagctgggcgacctgctgctgcacctggaaaagaagcacggcgaggactggggaaaggtgtacgacgaggcctgggagcggattgacaagaaagtggaaggcctgagcaagcacatcaagctggaagaggaacggagaagcgaggacgcccagagcaaggccgccctgaccgactggctgcgggctaaggccagcttcgtgatcgagggcctgaaggaggccgacaaggacgagttctgcagatgcgagctgaagctgcagaagtggtacggggacctgcggggaaagcccttcgccatcgaagccgagaacagcatcctggacatcagcggcttcagcaagcagtacaactgtgccttcatctggcagaaggacggcgtgaagaagctgaacctgtacctgatcatcaactacttcaagggcggcaagctgcggttcaagaagatcaaacctgaagccttcgaagccaacagattctacaccgtgatcaacaaaaagagcggcgagatcgtgcccatggaggtgaacttcaacttcgacgaccccaacctgatcatcctgcctctggcctttggcaagagacagggcagagaattcatctggaacgacctgctgtccctggaaaccggcagcctgaagctggccaacggaagagtgatcgagaagacactgtacaacagaagaacccggcaggatgagcctgccctgttcgtggccctgaccttcgagcggcgggaggtcctggactcctccaatatcaaaccaatgaacctgatcggcgtggcaagaggcgaaaacatccccgccgtgatcgccctgaccgaccccgagggctgcccactgagccggtttaaggatagcctgggaaacccaacccacatcctgagaatcggcgagagctataaggagaagcagcggaccatccaggccaagaaggaggtggagcagcggagagccggcggctacagccggaagtacgccagcaaagccaagaatctggcagacgatatggtgagaaacaccgctagagatctgctgtactacgccgtgacccaggatgccatgctgatcttcgccaacctgagccggggcttcggccggcagggcaagcggaccttcatggccgagagacagtacacacggatggaggactggctgaccgccaagctggcctacgagggcctgagcaagacctacctgtccaagacactggcccagtacacctccaagacatgcagcaactgtgggtttaccatcaccagcgccgactacgacagggtgctggagaagctgaagaagacagcaacaggctggatgaccacaattaacggcaaggagctgaaggtggagggccagattacctactacaacagatacaagagacagaacgtagtcaaggacctgtccgtcgagctggatagactgagcgaagaatctgtgaacaacgacatctcctcctggacaaagggcagaagcggagaagctctgagcctcctgaagaaaagattctcccatagacccgtgcaggagaagttcgtgtgcctgaactgcggcttcgagacacacgcagccgagcaagccgccctgaacatcgccagatcctggctgttcctgcggagccaggagtacaagaaataccagacaaacaagacaaccggcaacaccgataagagagccttcgtcgagacctggcagtccttttaccggaagaagcttaaggaggtgtggaaacctgccgtgcggtctggcggatctggcggaggctccacaagcctgcccgacagcctgaccttcaccgacgtggccatcgacttcagccaggacgagtgggagtggctgagcctggcccagaggagcctgtacaggaaggtgatgctggagaactacatgaacctggtgagcgtgggcctgtgcatcagcaagcccgacgtgatcagcctgctggagcaggagaaggagccctggatggtgaccgagcagatcaccaggggcctgtgcgccgacctggagtacatgaccagccccaagaaaaagagaaaagtctaagctgccttctgcggggcttgccttctggccatgcccttcttctctcccttgcacctgtacctcttggtctttgaataaagcctgagtaggaaggctagcaaaaaaaaaaaaaaaaaaaaaaaaaaaaaaaaaaaaaaaaaaaaaaaaaaaaaaaaaaaaaaaaaaaaaaaaaaaaaaaa

SEQ ID NO: 6973 - RNA, 5797 nt, synthetic construct
  source 1..5797: mol_type = other RNA
aggaaataagagagaaaagaagagtaagaagaaatataagagccaccatggcccctaagaagaagcgtaaagtgagccggatggaacgcctcgtctacgaggtgcggcagaagtgcagaaacatcgaggacatctgcatctcctgcggatctctgaacgtgaccctggagcacccactgttcatcggcggcatgtgccagaactgtaaaaactgttttctggagtgtgcctatcaatacgacgatgacggctaccagagctactgcaccatctgttgcggcggaagagaggtgctgatgtgtggaaataacaactgctgccggtgcttctgcgtggaatgcgtggacctgctggtgggccccggcgccgcccaggccgctattaaggaagatccttggaactgctacatgtgcggccacaagggcacatacggcctgctgagacggagagaggactggcctagcagactgcagatgttcttcgccaataaccacgaccaggagttcgacccccctaaggtgtaccctcccgtccccgccgagaagagaaagcccatccgggtcctgagcctgttcgatggcatcgccaccggtctgctggtgctgaaggacctgggcatccaggtggataggtacattgcctccgaggtgtgcgaggactccatcaccgtgggaatggtgcgtcatcagggcaagatcatgtacgtgggcgacgtgcggagcgtgacacagaagcatatccaggagtggggccctttcgacctggtgatcggcggcagcccttgcaatgacctgagcatcgtgaacccagcccggaagggcctgtacgagggaaccggcagactgttcttcgagttttacagactgctgcacgacgcccggcctaaggaaggcgacgaccggcccttcttttggctgttcgagaatgtggtggccatgggagtcagcgacaagcgggatattagccggttcctggagagcaaccccgtgatgatcgatgccaaggaagtgagcgccgcccaccgggccagatacttctggggcaatctgcctggcatgaacagacccctggccagcaccgtgaacgacaagctggagctgcaggagtgcctggagcacggccggatcgccaagttcagcaaggtgagaaccatcaccacccgaagcaacagcatcaaacaaggcaaggaccagcactttcctgtgttcatgaacgagaaggaggacatcctgtggtgtaccgagatggagagagtgttcgggttcccagtccactacacagatgtcagcaacatgtctagactggccagacagagactgctgggaagaagctggtccgtccctgtgatcagacacctgttcgcccctctgaaggagtacttcgcctgcgtgagcagcggcaacagcaacgccaacagccggggccccagcttctctagcggcctggtgccactgtccctgagagggagccacatgggccccatggagatctacaaaaccgtgagcgcctggaagcggcagcctgtgcgcgtgctgagcctgtttcggaatatcgataaagtcctgaaaagcctgggattcctggagagcggctctggctccggcggtggcaccctgaagtacgtggaggatgtgacaaacgtggtcagacgggatgtggagaagtggggccccttcgatctggtgtacggcagcacccaacccctgggcagctcttgtgaccggtgccctggctggtacatgtttcagttccaccggatcctgcagtacgccctgccgagacaggagtcccagcggccattcttttggattttcatggacaacttgctgctgaccgaggatgaccaggaaactaccactcggttcctgcagaccgaagccgtgaccctgcaggacgtgagaggccgggactaccagaacgccatgcgggtgtggtccaacatccctggactgaaaagcaagcacgcacctctgacccctaaagaagaggagtacctgcaggcccaggtgcggagcagaagcaagctggacgcccctaaggtggatctgctggtgaagaattgcctcctgcccctgagagagtacttcaagtatttcagccagaatagtctgcccctgggcggcccaagcagcggcgcccctcctcccagcggcggcagcccagccggctccccaacctctaccgaggagggcacctctgagtccgccacccccgagagcggccctggcacctccaccgagcccagcgagggcagcgcacccggcagccctgccggcagccccacctccacagaggagggaaccagcaccgagcccagcgaaggcagcgccccaggcaccagcaccgagcctagtgagggcggctctggcggcggcagcgcccaggagattaaacggatcaacaagatcagaagaagacttgtgaaagacagcaacaccaagaaggccggcaagacaggccccatgaaaaccctgctggttagagtgatgacacccgatctgagagagcggctggaaaacctgagaaagaagcctgaaaatatcccccagcccatcagcaatacatctagagccaacctgaataagctgctgaccgattacaccgaaatgaagaaggcgatcctgcatgtgtactgggaagagttccagaaggaccctgtgggcctgatgagccgggtggcccagcctgccagcaagaagatcgatcagaacaagctgaaacctgagatggacgagaagggcaacctgaccaccgccggctttgcctgctctcagtgtggccagcccctgttcgtgtacaagctggagcaggtgtctgagaagggcaaggcttacaccaactacttcggacggtgcaatgtggccgagcacgaaaagctgatcctgctggcccagctgaagcccgagaaggatagcgacgaagccgtgacatatagcctgggaaagtttgggcagagggccctggatttctacagcattcatgtgaccaaggagtccacccaccccgtgaagcccctggcccagatcgccggaaacagatacgcctccggacctgtgggaaaggccctgagcgacgcatgtatgggcacaatcgcctccttcctgtctaagtaccaggacatcatcatcgaacaccagaaggtggtgaagggcaaccagaagagactggagagcctgcgggagctggccggcaaggaaaacctggaataccctagcgtgaccctgccacctcagcctcacaccaaggagggcgttgatgcctacaacgaagtgatcgcccgggtgcgaatgtgggtgaacctgaacctgtggcagaagctgaagctaagcagagatgatgccaagcctctgctgagactgaagggattcccttcctttcctctggtcgagagacaggccaacgaagtggactggtgggacatggtgtgtaacgtgaagaagctgatcaacgagaaaaaggaggatggcaaggtgttttggcagaatctggctggctacaagagacaggaagccctgagaccatacctgagcagcgaggaagatcggaagaagggaaagaaattcgctcggtaccagctgggcgacctgctgctgcacctggaaaagaagcacggcgaggactggggaaaggtgtacgacgaggcctgggagcggattgacaagaaagtggaaggcctgagcaagcacatcaagctggaagaggaacggagaagcgaggacgcccagagcaaggccgccctgaccgactggctgcgggctaaggccagcttcgtgatcgagggcctgaaggaggccgacaaggacgagttctgcagatgcgagctgaagctgcagaagtggtacggggacctgcggggaaagcccttcgccatcgaagccgagaacagcatcctggacatcagcggcttcagcaagcagtacaactgtgccttcatctggcagaaggacggcgtgaagaagctgaacctgtacctgatcatcaactacttcaagggcggcaagctgcggttcaagaagatcaaacctgaagccttcgaagccaacagattctacaccgtgatcaacaaaaagagcggcgagatcgtgcccatggaggtgaacttcaacttcgacgaccccaacctgatcatcctgcctctggcctttggcaagagacagggcagagaattcatctggaacgacctgctgtccctggaaaccggcagcctgaagctggccaacggaagagtgatcgagaagacactgtacaacagaagaacccggcaggatgagcctgccctgttcgtggccctgaccttcgagcggcgggaggtcctggactcctccaatatcaaaccaatgaacctgatcggcgtggcaagaggcgaaaacatccccgccgtgatcgccctgaccgaccccgagggctgcccactgagccggtttaaggatagcctgggaaacccaacccacatcctgagaatcggcgagagctataaggagaagcagcggaccatccaggccaagaaggaggtggagcagcggagagccggcggctacagccggaagtacgccagcaaagccaagaatctggcagacgatatggtgagaaacaccgctagagatctgctgtactacgccgtgacccaggatgccatgctgatcttcgccaacctgagccggggcttcggccggcagggcaagcggaccttcatggccgagagacagtacacacggatggaggactggctgaccgccaagctggcctacgagggcctgagcaagacctacctgtccaagacactggcccagtacacctccaagacatgcagcaactgtgggtttaccatcaccagcgccgactacgacagggtgctggagaagctgaagaagacagcaacaggctggatgaccacaattaacggcaaggagctgaaggtggagggccagattacctactacaacagatacaagagacagaacgtagtcaaggacctgtccgtcgagctggatagactgagcgaagaatctgtgaacaacgacatctcctcctggacaaagggcagaagcggagaagctctgagcctcctgaagaaaagattctcccatagacccgtgcaggagaagttcgtgtgcctgaactgcggcttcgagacacacgcagccgagcaagccgccctgaacatcgccagatcctggctgttcctgcggagccaggagtacaagaaataccagacaaacaagacaaccggcaacaccgataagagagccttcgtcgagacctggcagtccttttaccggaagaagcttaaggaggtgtggaaacctgccgtgcggtctggcggatctggcggaggctccacaagcgaggagacccagggcgagctgaccagcagctgcggcagcaagaccatggccaacgtgagcctggccttcagggacgtgagcatcgacctgagccaggaggagtgggagtgcctggaccccgtgcagagggacctgtacaaggacgtgatgctggagaactacagcaacctggtgagcctgggctacaccatccccaagcccgacgtgatcaccctgctggagcaggagaaggagccctggatcaccagccccaagaaaaagagaaaagtctaagctgccttctgcggggcttgccttctggccatgcccttcttctctcccttgcacctgtacctcttggtctttgaataaagcctgagtaggaaggctagcaaaaaaaaaaaaaaaaaaaaaaaaaaaaaaaaaaaaaaaaaaaaaaaaaaaaaaaaaaaaaaaaaaaaaaaaaaaaaaaa

SEQ ID NO: 6974 - RNA, 5797 nt, synthetic construct
  source 1..5797: mol_type = other RNA
aggaaataagagagaaaagaagagtaagaagaaatataagagccaccatggcccctaagaagaagcgtaaagtgagccggatggaacgcctcgtctacgaggtgcggcagaagtgcagaaacatcgaggacatctgcatctcctgcggatctctgaacgtgaccctggagcacccactgttcatcggcggcatgtgccagaactgtaaaaactgttttctggagtgtgcctatcaatacgacgatgacggctaccagagctactgcaccatctgttgcggcggaagagaggtgctgatgtgtggaaataacaactgctgccggtgcttctgcgtggaatgcgtggacctgctggtgggccccggcgccgcccaggccgctattaaggaagatccttggaactgctacatgtgcggccacaagggcacatacggcctgctgagacggagagaggactggcctagcagactgcagatgttcttcgccaataaccacgaccaggagttcgacccccctaaggtgtaccctcccgtccccgccgagaagagaaagcccatccgggtcctgagcctgttcgatggcatcgccaccggtctgctggtgctgaaggacctgggcatccaggtggataggtacattgcctccgaggtgtgcgaggactccatcaccgtgggaatggtgcgtcatcagggcaagatcatgtacgtgggcgacgtgcggagcgtgacacagaagcatatccaggagtggggccctttcgacctggtgatcggcggcagcccttgcaatgacctgagcatcgtgaacccagcccggaagggcctgtacgagggaaccggcagactgttcttcgagttttacagactgctgcacgacgcccggcctaaggaaggcgacgaccggcccttcttttggctgttcgagaatgtggtggccatgggagtcagcgacaagcgggatattagccggttcctggagagcaaccccgtgatgatcgatgccaaggaagtgagcgccgcccaccgggccagatacttctggggcaatctgcctggcatgaacagacccctggccagcaccgtgaacgacaagctggagctgcaggagtgcctggagcacggccggatcgccaagttcagcaaggtgagaaccatcaccacccgaagcaacagcatcaaacaaggcaaggaccagcactttcctgtgttcatgaacgagaaggaggacatcctgtggtgtaccgagatggagagagtgttcgggttcccagtccactacacagatgtcagcaacatgtctagactggccagacagagactgctgggaagaagctggtccgtccctgtgatcagacacctgttcgcccctctgaaggagtacttcgcctgcgtgagcagcggcaacagcaacgccaacagccggggccccagcttctctagcggcctggtgccactgtccctgagagggagccacatgggccccatggagatctacaaaaccgtgagcgcctggaagcggcagcctgtgcgcgtgctgagcctgtttcggaatatcgataaagtcctgaaaagcctgggattcctggagagcggctctggctccggcggtggcaccctgaagtacgtggaggatgtgacaaacgtggtcagacgggatgtggagaagtggggccccttcgatctggtgtacggcagcacccaacccctgggcagctcttgtgaccggtgccctggctggtacatgtttcagttccaccggatcctgcagtacgccctgccgagacaggagtcccagcggccattcttttggattttcatggacaacttgctgctgaccgaggatgaccaggaaactaccactcggttcctgcagaccgaagccgtgaccctgcaggacgtgagaggccgggactaccagaacgccatgcgggtgtggtccaacatccctggactgaaaagcaagcacgcacctctgacccctaaagaagaggagtacctgcaggcccaggtgcggagcagaagcaagctggacgcccctaaggtggatctgctggtgaagaattgcctcctgcccctgagagagtacttcaagtatttcagccagaatagtctgcccctgggcggcccaagcagcggcgcccctcctcccagcggcggcagcccagccggctccccaacctctaccgaggagggcacctctgagtccgccacccccgagagcggccctggcacctccaccgagcccagcgagggcagcgcacccggcagccctgccggcagccccacctccacagaggagggaaccagcaccgagcccagcgaaggcagcgccccaggcaccagcaccgagcctagtgagggcggctctggcggcggcagcgcccaggagattaaacggatcaacaagatcagaagaagacttgtgaaagacagcaacaccaagaaggccggcaagacaggccccatgaaaaccctgctggttagagtgatgacacccgatctgagagagcggctggaaaacctgagaaagaagcctgaaaatatcccccagcccatcagcaatacatctagagccaacctgaataagctgctgaccgattacaccgaaatgaagaaggcgatcctgcatgtgtactgggaagagttccagaaggaccctgtgggcctgatgagccgggtggcccagcctgccagcaagaagatcgatcagaacaagctgaaacctgagatggacgagaagggcaacctgaccaccgccggctttgcctgctctcagtgtggccagcccctgttcgtgtacaagctggagcaggtgtctgagaagggcaaggcttacaccaactacttcggacggtgcaatgtggccgagcacgaaaagctgatcctgctggcccagctgaagcccgagaaggatagcgacgaagccgtgacatatagcctgggaaagtttgggcagagggccctggatttctacagcattcatgtgaccaaggagtccacccaccccgtgaagcccctggcccagatcgccggaaacagatacgcctccggacctgtgggaaaggccctgagcgacgcatgtatgggcacaatcgcctccttcctgtctaagtaccaggacatcatcatcgaacaccagaaggtggtgaagggcaaccagaagagactggagagcctgcgggagctggccggcaaggaaaacctggaataccctagcgtgaccctgccacctcagcctcacaccaaggagggcgttgatgcctacaacgaagtgatcgcccgggtgcgaatgtgggtgaacctgaacctgtggcagaagctgaagctaagcagagatgatgccaagcctctgctgagactgaagggattcccttcctttcctctggtcgagagacaggccaacgaagtggactggtgggacatggtgtgtaacgtgaagaagctgatcaacgagaaaaaggaggatggcaaggtgttttggcagaatctggctggctacaagagacaggaagccctgagaccatacctgagcagcgaggaagatcggaagaagggaaagaaattcgctcggtaccagctgggcgacctgctgctgcacctggaaaagaagcacggcgaggactggggaaaggtgtacgacgaggcctgggagcggattgacaagaaagtggaaggcctgagcaagcacatcaagctggaagaggaacggagaagcgaggacgcccagagcaaggccgccctgaccgactggctgcgggctaaggccagcttcgtgatcgagggcctgaaggaggccgacaaggacgagttctgcagatgcgagctgaagctgcagaagtggtacggggacctgcggggaaagcccttcgccatcgaagccgagaacagcatcctggacatcagcggcttcagcaagcagtacaactgtgccttcatctggcagaaggacggcgtgaagaagctgaacctgtacctgatcatcaactacttcaagggcggcaagctgcggttcaagaagatcaaacctgaagccttcgaagccaacagattctacaccgtgatcaacaaaaagagcggcgagatcgtgcccatggaggtgaacttcaacttcgacgaccccaacctgatcatcctgcctctggcctttggcaagagacagggcagagaattcatctggaacgacctgctgtccctggaaaccggcagcctgaagctggccaacggaagagtgatcgagaagacactgtacaacagaagaacccggcaggatgagcctgccctgttcgtggccctgaccttcgagcggcgggaggtcctggactcctccaatatcaaaccaatgaacctgatcggcgtggcaagaggcgaaaacatccccgccgtgatcgccctgaccgaccccgagggctgcccactgagccggtttaaggatagcctgggaaacccaacccacatcctgagaatcggcgagagctataaggagaagcagcggaccatccaggccaagaaggaggtggagcagcggagagccggcggctacagccggaagtacgccagcaaagccaagaatctggcagacgatatggtgagaaacaccgctagagatctgctgtactacgccgtgacccaggatgccatgctgatcttcgccaacctgagccggggcttcggccggcagggcaagcggaccttcatggccgagagacagtacacacggatggaggactggctgaccgccaagctggcctacgagggcctgagcaagacctacctgtccaagacactggcccagtacacctccaagacatgcagcaactgtgggtttaccatcaccagcgccgactacgacagggtgctggagaagctgaagaagacagcaacaggctggatgaccacaattaacggcaaggagctgaaggtggagggccagattacctactacaacagatacaagagacagaacgtagtcaaggacctgtccgtcgagctggatagactgagcgaagaatctgtgaacaacgacatctcctcctggacaaagggcagaagcggagaagctctgagcctcctgaagaaaagattctcccatagacccgtgcaggagaagttcgtgtgcctgaactgcggcttcgagacacacgcagccgagcaagccgccctgaacatcgccagatcctggctgttcctgcggagccaggagtacaagaaataccagacaaacaagacaaccggcaacaccgataagagagccttcgtcgagacctggcagtccttttaccggaagaagcttaaggaggtgtggaaacctgccgtgcggtctggcggatctggcggaggctccacaagctgctggggcctgctgagcttcaaggacatcagcatggagttcacctgggaggagtggcagctgctggacagcgcccagaagtacctgtacagggacgtgatcctggagaactacagccacctggtgagcctgggctaccacggcaccaagcccgacctgatcttcaagctggagcagggcgaggagccctggatgatcaacgccagggtgagcaggcagagctaccccgagggctggaaggagaccagccccaagaaaaagagaaaagtctaagctgccttctgcggggcttgccttctggccatgcccttcttctctcccttgcacctgtacctcttggtctttgaataaagcctgagtaggaaggctagcaaaaaaaaaaaaaaaaaaaaaaaaaaaaaaaaaaaaaaaaaaaaaaaaaaaaaaaaaaaaaaaaaaaaaaaaaaaaaaaa

SEQ ID NO: 6975 - RNA, 5797 nt, synthetic construct
  source 1..5797: mol_type = other RNA
aggaaataagagagaaaagaagagtaagaagaaatataagagccaccatggcccctaagaagaagcgtaaagtgagccggatggaacgcctcgtctacgaggtgcggcagaagtgcagaaacatcgaggacatctgcatctcctgcggatctctgaacgtgaccctggagcacccactgttcatcggcggcatgtgccagaactgtaaaaactgttttctggagtgtgcctatcaatacgacgatgacggctaccagagctactgcaccatctgttgcggcggaagagaggtgctgatgtgtggaaataacaactgctgccggtgcttctgcgtggaatgcgtggacctgctggtgggccccggcgccgcccaggccgctattaaggaagatccttggaactgctacatgtgcggccacaagggcacatacggcctgctgagacggagagaggactggcctagcagactgcagatgttcttcgccaataaccacgaccaggagttcgacccccctaaggtgtaccctcccgtccccgccgagaagagaaagcccatccgggtcctgagcctgttcgatggcatcgccaccggtctgctggtgctgaaggacctgggcatccaggtggataggtacattgcctccgaggtgtgcgaggactccatcaccgtgggaatggtgcgtcatcagggcaagatcatgtacgtgggcgacgtgcggagcgtgacacagaagcatatccaggagtggggccctttcgacctggtgatcggcggcagcccttgcaatgacctgagcatcgtgaacccagcccggaagggcctgtacgagggaaccggcagactgttcttcgagttttacagactgctgcacgacgcccggcctaaggaaggcgacgaccggcccttcttttggctgttcgagaatgtggtggccatgggagtcagcgacaagcgggatattagccggttcctggagagcaaccccgtgatgatcgatgccaaggaagtgagcgccgcccaccgggccagatacttctggggcaatctgcctggcatgaacagacccctggccagcaccgtgaacgacaagctggagctgcaggagtgcctggagcacggccggatcgccaagttcagcaaggtgagaaccatcaccacccgaagcaacagcatcaaacaaggcaaggaccagcactttcctgtgttcatgaacgagaaggaggacatcctgtggtgtaccgagatggagagagtgttcgggttcccagtccactacacagatgtcagcaacatgtctagactggccagacagagactgctgggaagaagctggtccgtccctgtgatcagacacctgttcgcccctctgaaggagtacttcgcctgcgtgagcagcggcaacagcaacgccaacagccggggccccagcttctctagcggcctggtgccactgtccctgagagggagccacatgggccccatggagatctacaaaaccgtgagcgcctggaagcggcagcctgtgcgcgtgctgagcctgtttcggaatatcgataaagtcctgaaaagcctgggattcctggagagcggctctggctccggcggtggcaccctgaagtacgtggaggatgtgacaaacgtggtcagacgggatgtggagaagtggggccccttcgatctggtgtacggcagcacccaacccctgggcagctcttgtgaccggtgccctggctggtacatgtttcagttccaccggatcctgcagtacgccctgccgagacaggagtcccagcggccattcttttggattttcatggacaacttgctgctgaccgaggatgaccaggaaactaccactcggttcctgcagaccgaagccgtgaccctgcaggacgtgagaggccgggactaccagaacgccatgcgggtgtggtccaacatccctggactgaaaagcaagcacgcacctctgacccctaaagaagaggagtacctgcaggcccaggtgcggagcagaagcaagctggacgcccctaaggtggatctgctggtgaagaattgcctcctgcccctgagagagtacttcaagtatttcagccagaatagtctgcccctgggcggcccaagcagcggcgcccctcctcccagcggcggcagcccagccggctccccaacctctaccgaggagggcacctctgagtccgccacccccgagagcggccctggcacctccaccgagcccagcgagggcagcgcacccggcagccctgccggcagccccacctccacagaggagggaaccagcaccgagcccagcgaaggcagcgccccaggcaccagcaccgagcctagtgagggcggctctggcggcggcagcgcccaggagattaaacggatcaacaagatcagaagaagacttgtgaaagacagcaacaccaagaaggccggcaagacaggccccatgaaaaccctgctggttagagtgatgacacccgatctgagagagcggctggaaaacctgagaaagaagcctgaaaatatcccccagcccatcagcaatacatctagagccaacctgaataagctgctgaccgattacaccgaaatgaagaaggcgatcctgcatgtgtactgggaagagttccagaaggaccctgtgggcctgatgagccgggtggcccagcctgccagcaagaagatcgatcagaacaagctgaaacctgagatggacgagaagggcaacctgaccaccgccggctttgcctgctctcagtgtggccagcccctgttcgtgtacaagctggagcaggtgtctgagaagggcaaggcttacaccaactacttcggacggtgcaatgtggccgagcacgaaaagctgatcctgctggcccagctgaagcccgagaaggatagcgacgaagccgtgacatatagcctgggaaagtttgggcagagggccctggatttctacagcattcatgtgaccaaggagtccacccaccccgtgaagcccctggcccagatcgccggaaacagatacgcctccggacctgtgggaaaggccctgagcgacgcatgtatgggcacaatcgcctccttcctgtctaagtaccaggacatcatcatcgaacaccagaaggtggtgaagggcaaccagaagagactggagagcctgcgggagctggccggcaaggaaaacctggaataccctagcgtgaccctgccacctcagcctcacaccaaggagggcgttgatgcctacaacgaagtgatcgcccgggtgcgaatgtgggtgaacctgaacctgtggcagaagctgaagctaagcagagatgatgccaagcctctgctgagactgaagggattcccttcctttcctctggtcgagagacaggccaacgaagtggactggtgggacatggtgtgtaacgtgaagaagctgatcaacgagaaaaaggaggatggcaaggtgttttggcagaatctggctggctacaagagacaggaagccctgagaccatacctgagcagcgaggaagatcggaagaagggaaagaaattcgctcggtaccagctgggcgacctgctgctgcacctggaaaagaagcacggcgaggactggggaaaggtgtacgacgaggcctgggagcggattgacaagaaagtggaaggcctgagcaagcacatcaagctggaagaggaacggagaagcgaggacgcccagagcaaggccgccctgaccgactggctgcgggctaaggccagcttcgtgatcgagggcctgaaggaggccgacaaggacgagttctgcagatgcgagctgaagctgcagaagtggtacggggacctgcggggaaagcccttcgccatcgaagccgagaacagcatcctggacatcagcggcttcagcaagcagtacaactgtgccttcatctggcagaaggacggcgtgaagaagctgaacctgtacctgatcatcaactacttcaagggcggcaagctgcggttcaagaagatcaaacctgaagccttcgaagccaacagattctacaccgtgatcaacaaaaagagcggcgagatcgtgcccatggaggtgaacttcaacttcgacgaccccaacctgatcatcctgcctctggcctttggcaagagacagggcagagaattcatctggaacgacctgctgtccctggaaaccggcagcctgaagctggccaacggaagagtgatcgagaagacactgtacaacagaagaacccggcaggatgagcctgccctgttcgtggccctgaccttcgagcggcgggaggtcctggactcctccaatatcaaaccaatgaacctgatcggcgtggcaagaggcgaaaacatccccgccgtgatcgccctgaccgaccccgagggctgcccactgagccggtttaaggatagcctgggaaacccaacccacatcctgagaatcggcgagagctataaggagaagcagcggaccatccaggccaagaaggaggtggagcagcggagagccggcggctacagccggaagtacgccagcaaagccaagaatctggcagacgatatggtgagaaacaccgctagagatctgctgtactacgccgtgacccaggatgccatgctgatcttcgccaacctgagccggggcttcggccggcagggcaagcggaccttcatggccgagagacagtacacacggatggaggactggctgaccgccaagctggcctacgagggcctgagcaagacctacctgtccaagacactggcccagtacacctccaagacatgcagcaactgtgggtttaccatcaccagcgccgactacgacagggtgctggagaagctgaagaagacagcaacaggctggatgaccacaattaacggcaaggagctgaaggtggagggccagattacctactacaacagatacaagagacagaacgtagtcaaggacctgtccgtcgagctggatagactgagcgaagaatctgtgaacaacgacatctcctcctggacaaagggcagaagcggagaagctctgagcctcctgaagaaaagattctcccatagacccgtgcaggagaagttcgtgtgcctgaactgcggcttcgagacacacgcagccgagcaagccgccctgaacatcgccagatcctggctgttcctgcggagccaggagtacaagaaataccagacaaacaagacaaccggcaacaccgataagagagccttcgtcgagacctggcagtccttttaccggaagaagcttaaggaggtgtggaaacctgccgtgcggtctggcggatctggcggaggctccacaagcagccacgagagcgtgaccttcaaggacgtggccgtggacttcacctgggaggagtggggctacctggacaccagccagaaggagctgtactgggaggtgatgctggagaactacaggaacctggtgagcctgggcctggccgacagcaacgtggacatgatcagccagctggagagcggcgaggcccacggcatccccgtggacagcgtgctgaggagctgctggcccgacggcgacaccaggaccagccccaagaaaaagagaaaagtctaagctgccttctgcggggcttgccttctggccatgcccttcttctctcccttgcacctgtacctcttggtctttgaataaagcctgagtaggaaggctagcaaaaaaaaaaaaaaaaaaaaaaaaaaaaaaaaaaaaaaaaaaaaaaaaaaaaaaaaaaaaaaaaaaaaaaaaaaaaaaaa

SEQ ID NO: 6976 - RNA, 5797 nt, synthetic construct
  source 1..5797: mol_type = other RNA
aggaaataagagagaaaagaagagtaagaagaaatataagagccaccatggcccctaagaagaagcgtaaagtgagccggatggaacgcctcgtctacgaggtgcggcagaagtgcagaaacatcgaggacatctgcatctcctgcggatctctgaacgtgaccctggagcacccactgttcatcggcggcatgtgccagaactgtaaaaactgttttctggagtgtgcctatcaatacgacgatgacggctaccagagctactgcaccatctgttgcggcggaagagaggtgctgatgtgtggaaataacaactgctgccggtgcttctgcgtggaatgcgtggacctgctggtgggccccggcgccgcccaggccgctattaaggaagatccttggaactgctacatgtgcggccacaagggcacatacggcctgctgagacggagagaggactggcctagcagactgcagatgttcttcgccaataaccacgaccaggagttcgacccccctaaggtgtaccctcccgtccccgccgagaagagaaagcccatccgggtcctgagcctgttcgatggcatcgccaccggtctgctggtgctgaaggacctgggcatccaggtggataggtacattgcctccgaggtgtgcgaggactccatcaccgtgggaatggtgcgtcatcagggcaagatcatgtacgtgggcgacgtgcggagcgtgacacagaagcatatccaggagtggggccctttcgacctggtgatcggcggcagcccttgcaatgacctgagcatcgtgaacccagcccggaagggcctgtacgagggaaccggcagactgttcttcgagttttacagactgctgcacgacgcccggcctaaggaaggcgacgaccggcccttcttttggctgttcgagaatgtggtggccatgggagtcagcgacaagcgggatattagccggttcctggagagcaaccccgtgatgatcgatgccaaggaagtgagcgccgcccaccgggccagatacttctggggcaatctgcctggcatgaacagacccctggccagcaccgtgaacgacaagctggagctgcaggagtgcctggagcacggccggatcgccaagttcagcaaggtgagaaccatcaccacccgaagcaacagcatcaaacaaggcaaggaccagcactttcctgtgttcatgaacgagaaggaggacatcctgtggtgtaccgagatggagagagtgttcgggttcccagtccactacacagatgtcagcaacatgtctagactggccagacagagactgctgggaagaagctggtccgtccctgtgatcagacacctgttcgcccctctgaaggagtacttcgcctgcgtgagcagcggcaacagcaacgccaacagccggggccccagcttctctagcggcctggtgccactgtccctgagagggagccacatgggccccatggagatctacaaaaccgtgagcgcctggaagcggcagcctgtgcgcgtgctgagcctgtttcggaatatcgataaagtcctgaaaagcctgggattcctggagagcggctctggctccggcggtggcaccctgaagtacgtggaggatgtgacaaacgtggtcagacgggatgtggagaagtggggccccttcgatctggtgtacggcagcacccaacccctgggcagctcttgtgaccggtgccctggctggtacatgtttcagttccaccggatcctgcagtacgccctgccgagacaggagtcccagcggccattcttttggattttcatggacaacttgctgctgaccgaggatgaccaggaaactaccactcggttcctgcagaccgaagccgtgaccctgcaggacgtgagaggccgggactaccagaacgccatgcgggtgtggtccaacatccctggactgaaaagcaagcacgcacctctgacccctaaagaagaggagtacctgcaggcccaggtgcggagcagaagcaagctggacgcccctaaggtggatctgctggtgaagaattgcctcctgcccctgagagagtacttcaagtatttcagccagaatagtctgcccctgggcggcccaagcagcggcgcccctcctcccagcggcggcagcccagccggctccccaacctctaccgaggagggcacctctgagtccgccacccccgagagcggccctggcacctccaccgagcccagcgagggcagcgcacccggcagccctgccggcagccccacctccacagaggagggaaccagcaccgagcccagcgaaggcagcgccccaggcaccagcaccgagcctagtgagggcggctctggcggcggcagcgcccaggagattaaacggatcaacaagatcagaagaagacttgtgaaagacagcaacaccaagaaggccggcaagacaggccccatgaaaaccctgctggttagagtgatgacacccgatctgagagagcggctggaaaacctgagaaagaagcctgaaaatatcccccagcccatcagcaatacatctagagccaacctgaataagctgctgaccgattacaccgaaatgaagaaggcgatcctgcatgtgtactgggaagagttccagaaggaccctgtgggcctgatgagccgggtggcccagcctgccagcaagaagatcgatcagaacaagctgaaacctgagatggacgagaagggcaacctgaccaccgccggctttgcctgctctcagtgtggccagcccctgttcgtgtacaagctggagcaggtgtctgagaagggcaaggcttacaccaactacttcggacggtgcaatgtggccgagcacgaaaagctgatcctgctggcccagctgaagcccgagaaggatagcgacgaagccgtgacatatagcctgggaaagtttgggcagagggccctggatttctacagcattcatgtgaccaaggagtccacccaccccgtgaagcccctggcccagatcgccggaaacagatacgcctccggacctgtgggaaaggccctgagcgacgcatgtatgggcacaatcgcctccttcctgtctaagtaccaggacatcatcatcgaacaccagaaggtggtgaagggcaaccagaagagactggagagcctgcgggagctggccggcaaggaaaacctggaataccctagcgtgaccctgccacctcagcctcacaccaaggagggcgttgatgcctacaacgaagtgatcgcccgggtgcgaatgtgggtgaacctgaacctgtggcagaagctgaagctaagcagagatgatgccaagcctctgctgagactgaagggattcccttcctttcctctggtcgagagacaggccaacgaagtggactggtgggacatggtgtgtaacgtgaagaagctgatcaacgagaaaaaggaggatggcaaggtgttttggcagaatctggctggctacaagagacaggaagccctgagaccatacctgagcagcgaggaagatcggaagaagggaaagaaattcgctcggtaccagctgggcgacctgctgctgcacctggaaaagaagcacggcgaggactggggaaaggtgtacgacgaggcctgggagcggattgacaagaaagtggaaggcctgagcaagcacatcaagctggaagaggaacggagaagcgaggacgcccagagcaaggccgccctgaccgactggctgcgggctaaggccagcttcgtgatcgagggcctgaaggaggccgacaaggacgagttctgcagatgcgagctgaagctgcagaagtggtacggggacctgcggggaaagcccttcgccatcgaagccgagaacagcatcctggacatcagcggcttcagcaagcagtacaactgtgccttcatctggcagaaggacggcgtgaagaagctgaacctgtacctgatcatcaactacttcaagggcggcaagctgcggttcaagaagatcaaacctgaagccttcgaagccaacagattctacaccgtgatcaacaaaaagagcggcgagatcgtgcccatggaggtgaacttcaacttcgacgaccccaacctgatcatcctgcctctggcctttggcaagagacagggcagagaattcatctggaacgacctgctgtccctggaaaccggcagcctgaagctggccaacggaagagtgatcgagaagacactgtacaacagaagaacccggcaggatgagcctgccctgttcgtggccctgaccttcgagcggcgggaggtcctggactcctccaatatcaaaccaatgaacctgatcggcgtggcaagaggcgaaaacatccccgccgtgatcgccctgaccgaccccgagggctgcccactgagccggtttaaggatagcctgggaaacccaacccacatcctgagaatcggcgagagctataaggagaagcagcggaccatccaggccaagaaggaggtggagcagcggagagccggcggctacagccggaagtacgccagcaaagccaagaatctggcagacgatatggtgagaaacaccgctagagatctgctgtactacgccgtgacccaggatgccatgctgatcttcgccaacctgagccggggcttcggccggcagggcaagcggaccttcatggccgagagacagtacacacggatggaggactggctgaccgccaagctggcctacgagggcctgagcaagacctacctgtccaagacactggcccagtacacctccaagacatgcagcaactgtgggtttaccatcaccagcgccgactacgacagggtgctggagaagctgaagaagacagcaacaggctggatgaccacaattaacggcaaggagctgaaggtggagggccagattacctactacaacagatacaagagacagaacgtagtcaaggacctgtccgtcgagctggatagactgagcgaagaatctgtgaacaacgacatctcctcctggacaaagggcagaagcggagaagctctgagcctcctgaagaaaagattctcccatagacccgtgcaggagaagttcgtgtgcctgaactgcggcttcgagacacacgcagccgagcaagccgccctgaacatcgccagatcctggctgttcctgcggagccaggagtacaagaaataccagacaaacaagacaaccggcaacaccgataagagagccttcgtcgagacctggcagtccttttaccggaagaagcttaaggaggtgtggaaacctgccgtgcggtctggcggatctggcggaggctccacaagcaggctggagagcgtgaccttcgaggacgtggccgtgtacttcacccagaaccagtgggccagcctgaaccccgcccagagggccctgtacggcgaggtgatgctggagaactacgccaacgtggccagcctggtggccttccccttccccaagcccgccctgatcagccacctggagaggggcgaggccccctggggccccgacccctgggacaccaagatccccaggggcatcggccagggcaccagccccaagaaaaagagaaaagtctaagctgccttctgcggggcttgccttctggccatgcccttcttctctcccttgcacctgtacctcttggtctttgaataaagcctgagtaggaaggctagcaaaaaaaaaaaaaaaaaaaaaaaaaaaaaaaaaaaaaaaaaaaaaaaaaaaaaaaaaaaaaaaaaaaaaaaaaaaaaaaa

SEQ ID NO: 6977 - RNA, 5797 nt, synthetic construct
  source 1..5797: mol_type = other RNA
aggaaataagagagaaaagaagagtaagaagaaatataagagccaccatggcccctaagaagaagcgtaaagtgagccggatggaacgcctcgtctacgaggtgcggcagaagtgcagaaacatcgaggacatctgcatctcctgcggatctctgaacgtgaccctggagcacccactgttcatcggcggcatgtgccagaactgtaaaaactgttttctggagtgtgcctatcaatacgacgatgacggctaccagagctactgcaccatctgttgcggcggaagagaggtgctgatgtgtggaaataacaactgctgccggtgcttctgcgtggaatgcgtggacctgctggtgggccccggcgccgcccaggccgctattaaggaagatccttggaactgctacatgtgcggccacaagggcacatacggcctgctgagacggagagaggactggcctagcagactgcagatgttcttcgccaataaccacgaccaggagttcgacccccctaaggtgtaccctcccgtccccgccgagaagagaaagcccatccgggtcctgagcctgttcgatggcatcgccaccggtctgctggtgctgaaggacctgggcatccaggtggataggtacattgcctccgaggtgtgcgaggactccatcaccgtgggaatggtgcgtcatcagggcaagatcatgtacgtgggcgacgtgcggagcgtgacacagaagcatatccaggagtggggccctttcgacctggtgatcggcggcagcccttgcaatgacctgagcatcgtgaacccagcccggaagggcctgtacgagggaaccggcagactgttcttcgagttttacagactgctgcacgacgcccggcctaaggaaggcgacgaccggcccttcttttggctgttcgagaatgtggtggccatgggagtcagcgacaagcgggatattagccggttcctggagagcaaccccgtgatgatcgatgccaaggaagtgagcgccgcccaccgggccagatacttctggggcaatctgcctggcatgaacagacccctggccagcaccgtgaacgacaagctggagctgcaggagtgcctggagcacggccggatcgccaagttcagcaaggtgagaaccatcaccacccgaagcaacagcatcaaacaaggcaaggaccagcactttcctgtgttcatgaacgagaaggaggacatcctgtggtgtaccgagatggagagagtgttcgggttcccagtccactacacagatgtcagcaacatgtctagactggccagacagagactgctgggaagaagctggtccgtccctgtgatcagacacctgttcgcccctctgaaggagtacttcgcctgcgtgagcagcggcaacagcaacgccaacagccggggccccagcttctctagcggcctggtgccactgtccctgagagggagccacatgggccccatggagatctacaaaaccgtgagcgcctggaagcggcagcctgtgcgcgtgctgagcctgtttcggaatatcgataaagtcctgaaaagcctgggattcctggagagcggctctggctccggcggtggcaccctgaagtacgtggaggatgtgacaaacgtggtcagacgggatgtggagaagtggggccccttcgatctggtgtacggcagcacccaacccctgggcagctcttgtgaccggtgccctggctggtacatgtttcagttccaccggatcctgcagtacgccctgccgagacaggagtcccagcggccattcttttggattttcatggacaacttgctgctgaccgaggatgaccaggaaactaccactcggttcctgcagaccgaagccgtgaccctgcaggacgtgagaggccgggactaccagaacgccatgcgggtgtggtccaacatccctggactgaaaagcaagcacgcacctctgacccctaaagaagaggagtacctgcaggcccaggtgcggagcagaagcaagctggacgcccctaaggtggatctgctggtgaagaattgcctcctgcccctgagagagtacttcaagtatttcagccagaatagtctgcccctgggcggcccaagcagcggcgcccctcctcccagcggcggcagcccagccggctccccaacctctaccgaggagggcacctctgagtccgccacccccgagagcggccctggcacctccaccgagcccagcgagggcagcgcacccggcagccctgccggcagccccacctccacagaggagggaaccagcaccgagcccagcgaaggcagcgccccaggcaccagcaccgagcctagtgagggcggctctggcggcggcagcgcccaggagattaaacggatcaacaagatcagaagaagacttgtgaaagacagcaacaccaagaaggccggcaagacaggccccatgaaaaccctgctggttagagtgatgacacccgatctgagagagcggctggaaaacctgagaaagaagcctgaaaatatcccccagcccatcagcaatacatctagagccaacctgaataagctgctgaccgattacaccgaaatgaagaaggcgatcctgcatgtgtactgggaagagttccagaaggaccctgtgggcctgatgagccgggtggcccagcctgccagcaagaagatcgatcagaacaagctgaaacctgagatggacgagaagggcaacctgaccaccgccggctttgcctgctctcagtgtggccagcccctgttcgtgtacaagctggagcaggtgtctgagaagggcaaggcttacaccaactacttcggacggtgcaatgtggccgagcacgaaaagctgatcctgctggcccagctgaagcccgagaaggatagcgacgaagccgtgacatatagcctgggaaagtttgggcagagggccctggatttctacagcattcatgtgaccaaggagtccacccaccccgtgaagcccctggcccagatcgccggaaacagatacgcctccggacctgtgggaaaggccctgagcgacgcatgtatgggcacaatcgcctccttcctgtctaagtaccaggacatcatcatcgaacaccagaaggtggtgaagggcaaccagaagagactggagagcctgcgggagctggccggcaaggaaaacctggaataccctagcgtgaccctgccacctcagcctcacaccaaggagggcgttgatgcctacaacgaagtgatcgcccgggtgcgaatgtgggtgaacctgaacctgtggcagaagctgaagctaagcagagatgatgccaagcctctgctgagactgaagggattcccttcctttcctctggtcgagagacaggccaacgaagtggactggtgggacatggtgtgtaacgtgaagaagctgatcaacgagaaaaaggaggatggcaaggtgttttggcagaatctggctggctacaagagacaggaagccctgagaccatacctgagcagcgaggaagatcggaagaagggaaagaaattcgctcggtaccagctgggcgacctgctgctgcacctggaaaagaagcacggcgaggactggggaaaggtgtacgacgaggcctgggagcggattgacaagaaagtggaaggcctgagcaagcacatcaagctggaagaggaacggagaagcgaggacgcccagagcaaggccgccctgaccgactggctgcgggctaaggccagcttcgtgatcgagggcctgaaggaggccgacaaggacgagttctgcagatgcgagctgaagctgcagaagtggtacggggacctgcggggaaagcccttcgccatcgaagccgagaacagcatcctggacatcagcggcttcagcaagcagtacaactgtgccttcatctggcagaaggacggcgtgaagaagctgaacctgtacctgatcatcaactacttcaagggcggcaagctgcggttcaagaagatcaaacctgaagccttcgaagccaacagattctacaccgtgatcaacaaaaagagcggcgagatcgtgcccatggaggtgaacttcaacttcgacgaccccaacctgatcatcctgcctctggcctttggcaagagacagggcagagaattcatctggaacgacctgctgtccctggaaaccggcagcctgaagctggccaacggaagagtgatcgagaagacactgtacaacagaagaacccggcaggatgagcctgccctgttcgtggccctgaccttcgagcggcgggaggtcctggactcctccaatatcaaaccaatgaacctgatcggcgtggcaagaggcgaaaacatccccgccgtgatcgccctgaccgaccccgagggctgcccactgagccggtttaaggatagcctgggaaacccaacccacatcctgagaatcggcgagagctataaggagaagcagcggaccatccaggccaagaaggaggtggagcagcggagagccggcggctacagccggaagtacgccagcaaagccaagaatctggcagacgatatggtgagaaacaccgctagagatctgctgtactacgccgtgacccaggatgccatgctgatcttcgccaacctgagccggggcttcggccggcagggcaagcggaccttcatggccgagagacagtacacacggatggaggactggctgaccgccaagctggcctacgagggcctgagcaagacctacctgtccaagacactggcccagtacacctccaagacatgcagcaactgtgggtttaccatcaccagcgccgactacgacagggtgctggagaagctgaagaagacagcaacaggctggatgaccacaattaacggcaaggagctgaaggtggagggccagattacctactacaacagatacaagagacagaacgtagtcaaggacctgtccgtcgagctggatagactgagcgaagaatctgtgaacaacgacatctcctcctggacaaagggcagaagcggagaagctctgagcctcctgaagaaaagattctcccatagacccgtgcaggagaagttcgtgtgcctgaactgcggcttcgagacacacgcagccgagcaagccgccctgaacatcgccagatcctggctgttcctgcggagccaggagtacaagaaataccagacaaacaagacaaccggcaacaccgataagagagccttcgtcgagacctggcagtccttttaccggaagaagcttaaggaggtgtggaaacctgccgtgcggtctggcggatctggcggaggctccacaagcttccaggccagcgtgagcttcaaggacgtgaccgtggagctgacccaggaggagtggcagcagatgggccccctgcagaggaccctgtacagggacgtgatgctggagaactacaacaacctggtgagcgtgggcagctgcatctacaagcccgagctgatcttcaagctggagcagggcgaggagccctggctgctggaggaggagttcagcaaccagagctaccaggtgctggagcactacaccagccccaagaaaaagagaaaagtctaagctgccttctgcggggcttgccttctggccatgcccttcttctctcccttgcacctgtacctcttggtctttgaataaagcctgagtaggaaggctagcaaaaaaaaaaaaaaaaaaaaaaaaaaaaaaaaaaaaaaaaaaaaaaaaaaaaaaaaaaaaaaaaaaaaaaaaaaaaaaaa

SEQ ID NO: 6978 - RNA, 5797 nt, synthetic construct
  source 1..5797: mol_type = other RNA
aggaaataagagagaaaagaagagtaagaagaaatataagagccaccatggcccctaagaagaagcgtaaagtgagccggatggaacgcctcgtctacgaggtgcggcagaagtgcagaaacatcgaggacatctgcatctcctgcggatctctgaacgtgaccctggagcacccactgttcatcggcggcatgtgccagaactgtaaaaactgttttctggagtgtgcctatcaatacgacgatgacggctaccagagctactgcaccatctgttgcggcggaagagaggtgctgatgtgtggaaataacaactgctgccggtgcttctgcgtggaatgcgtggacctgctggtgggccccggcgccgcccaggccgctattaaggaagatccttggaactgctacatgtgcggccacaagggcacatacggcctgctgagacggagagaggactggcctagcagactgcagatgttcttcgccaataaccacgaccaggagttcgacccccctaaggtgtaccctcccgtccccgccgagaagagaaagcccatccgggtcctgagcctgttcgatggcatcgccaccggtctgctggtgctgaaggacctgggcatccaggtggataggtacattgcctccgaggtgtgcgaggactccatcaccgtgggaatggtgcgtcatcagggcaagatcatgtacgtgggcgacgtgcggagcgtgacacagaagcatatccaggagtggggccctttcgacctggtgatcggcggcagcccttgcaatgacctgagcatcgtgaacccagcccggaagggcctgtacgagggaaccggcagactgttcttcgagttttacagactgctgcacgacgcccggcctaaggaaggcgacgaccggcccttcttttggctgttcgagaatgtggtggccatgggagtcagcgacaagcgggatattagccggttcctggagagcaaccccgtgatgatcgatgccaaggaagtgagcgccgcccaccgggccagatacttctggggcaatctgcctggcatgaacagacccctggccagcaccgtgaacgacaagctggagctgcaggagtgcctggagcacggccggatcgccaagttcagcaaggtgagaaccatcaccacccgaagcaacagcatcaaacaaggcaaggaccagcactttcctgtgttcatgaacgagaaggaggacatcctgtggtgtaccgagatggagagagtgttcgggttcccagtccactacacagatgtcagcaacatgtctagactggccagacagagactgctgggaagaagctggtccgtccctgtgatcagacacctgttcgcccctctgaaggagtacttcgcctgcgtgagcagcggcaacagcaacgccaacagccggggccccagcttctctagcggcctggtgccactgtccctgagagggagccacatgggccccatggagatctacaaaaccgtgagcgcctggaagcggcagcctgtgcgcgtgctgagcctgtttcggaatatcgataaagtcctgaaaagcctgggattcctggagagcggctctggctccggcggtggcaccctgaagtacgtggaggatgtgacaaacgtggtcagacgggatgtggagaagtggggccccttcgatctggtgtacggcagcacccaacccctgggcagctcttgtgaccggtgccctggctggtacatgtttcagttccaccggatcctgcagtacgccctgccgagacaggagtcccagcggccattcttttggattttcatggacaacttgctgctgaccgaggatgaccaggaaactaccactcggttcctgcagaccgaagccgtgaccctgcaggacgtgagaggccgggactaccagaacgccatgcgggtgtggtccaacatccctggactgaaaagcaagcacgcacctctgacccctaaagaagaggagtacctgcaggcccaggtgcggagcagaagcaagctggacgcccctaaggtggatctgctggtgaagaattgcctcctgcccctgagagagtacttcaagtatttcagccagaatagtctgcccctgggcggcccaagcagcggcgcccctcctcccagcggcggcagcccagccggctccccaacctctaccgaggagggcacctctgagtccgccacccccgagagcggccctggcacctccaccgagcccagcgagggcagcgcacccggcagccctgccggcagccccacctccacagaggagggaaccagcaccgagcccagcgaaggcagcgccccaggcaccagcaccgagcctagtgagggcggctctggcggcggcagcgcccaggagattaaacggatcaacaagatcagaagaagacttgtgaaagacagcaacaccaagaaggccggcaagacaggccccatgaaaaccctgctggttagagtgatgacacccgatctgagagagcggctggaaaacctgagaaagaagcctgaaaatatcccccagcccatcagcaatacatctagagccaacctgaataagctgctgaccgattacaccgaaatgaagaaggcgatcctgcatgtgtactgggaagagttccagaaggaccctgtgggcctgatgagccgggtggcccagcctgccagcaagaagatcgatcagaacaagctgaaacctgagatggacgagaagggcaacctgaccaccgccggctttgcctgctctcagtgtggccagcccctgttcgtgtacaagctggagcaggtgtctgagaagggcaaggcttacaccaactacttcggacggtgcaatgtggccgagcacgaaaagctgatcctgctggcccagctgaagcccgagaaggatagcgacgaagccgtgacatatagcctgggaaagtttgggcagagggccctggatttctacagcattcatgtgaccaaggagtccacccaccccgtgaagcccctggcccagatcgccggaaacagatacgcctccggacctgtgggaaaggccctgagcgacgcatgtatgggcacaatcgcctccttcctgtctaagtaccaggacatcatcatcgaacaccagaaggtggtgaagggcaaccagaagagactggagagcctgcgggagctggccggcaaggaaaacctggaataccctagcgtgaccctgccacctcagcctcacaccaaggagggcgttgatgcctacaacgaagtgatcgcccgggtgcgaatgtgggtgaacctgaacctgtggcagaagctgaagctaagcagagatgatgccaagcctctgctgagactgaagggattcccttcctttcctctggtcgagagacaggccaacgaagtggactggtgggacatggtgtgtaacgtgaagaagctgatcaacgagaaaaaggaggatggcaaggtgttttggcagaatctggctggctacaagagacaggaagccctgagaccatacctgagcagcgaggaagatcggaagaagggaaagaaattcgctcggtaccagctgggcgacctgctgctgcacctggaaaagaagcacggcgaggactggggaaaggtgtacgacgaggcctgggagcggattgacaagaaagtggaaggcctgagcaagcacatcaagctggaagaggaacggagaagcgaggacgcccagagcaaggccgccctgaccgactggctgcgggctaaggccagcttcgtgatcgagggcctgaaggaggccgacaaggacgagttctgcagatgcgagctgaagctgcagaagtggtacggggacctgcggggaaagcccttcgccatcgaagccgagaacagcatcctggacatcagcggcttcagcaagcagtacaactgtgccttcatctggcagaaggacggcgtgaagaagctgaacctgtacctgatcatcaactacttcaagggcggcaagctgcggttcaagaagatcaaacctgaagccttcgaagccaacagattctacaccgtgatcaacaaaaagagcggcgagatcgtgcccatggaggtgaacttcaacttcgacgaccccaacctgatcatcctgcctctggcctttggcaagagacagggcagagaattcatctggaacgacctgctgtccctggaaaccggcagcctgaagctggccaacggaagagtgatcgagaagacactgtacaacagaagaacccggcaggatgagcctgccctgttcgtggccctgaccttcgagcggcgggaggtcctggactcctccaatatcaaaccaatgaacctgatcggcgtggcaagaggcgaaaacatccccgccgtgatcgccctgaccgaccccgagggctgcccactgagccggtttaaggatagcctgggaaacccaacccacatcctgagaatcggcgagagctataaggagaagcagcggaccatccaggccaagaaggaggtggagcagcggagagccggcggctacagccggaagtacgccagcaaagccaagaatctggcagacgatatggtgagaaacaccgctagagatctgctgtactacgccgtgacccaggatgccatgctgatcttcgccaacctgagccggggcttcggccggcagggcaagcggaccttcatggccgagagacagtacacacggatggaggactggctgaccgccaagctggcctacgagggcctgagcaagacctacctgtccaagacactggcccagtacacctccaagacatgcagcaactgtgggtttaccatcaccagcgccgactacgacagggtgctggagaagctgaagaagacagcaacaggctggatgaccacaattaacggcaaggagctgaaggtggagggccagattacctactacaacagatacaagagacagaacgtagtcaaggacctgtccgtcgagctggatagactgagcgaagaatctgtgaacaacgacatctcctcctggacaaagggcagaagcggagaagctctgagcctcctgaagaaaagattctcccatagacccgtgcaggagaagttcgtgtgcctgaactgcggcttcgagacacacgcagccgagcaagccgccctgaacatcgccagatcctggctgttcctgcggagccaggagtacaagaaataccagacaaacaagacaaccggcaacaccgataagagagccttcgtcgagacctggcagtccttttaccggaagaagcttaaggaggtgtggaaacctgccgtgcggtctggcggatctggcggaggctccacaagcatgaacgccgtgacctacagggacgtgcacgtgaacttcacccaggaggagtgggccctgctggaccccagccagaagaagctgtacaaggacgtgatgctggagacctacaggaacctgaacgccatcggcttcaactgggaggcccagaacatcgaggagcactgccagagcagcaggaggcacaggaggtgcgagaggagccagagcgccgagaagcccagcgagtacacccagagggacaccagccccaagaaaaagagaaaagtctaagctgccttctgcggggcttgccttctggccatgcccttcttctctcccttgcacctgtacctcttggtctttgaataaagcctgagtaggaaggctagcaaaaaaaaaaaaaaaaaaaaaaaaaaaaaaaaaaaaaaaaaaaaaaaaaaaaaaaaaaaaaaaaaaaaaaaaaaaaaaaa

SEQ ID NO: 6979 - RNA, 5797 nt, synthetic construct
  source 1..5797: mol_type = other RNA
aggaaataagagagaaaagaagagtaagaagaaatataagagccaccatggcccctaagaagaagcgtaaagtgagccggatggaacgcctcgtctacgaggtgcggcagaagtgcagaaacatcgaggacatctgcatctcctgcggatctctgaacgtgaccctggagcacccactgttcatcggcggcatgtgccagaactgtaaaaactgttttctggagtgtgcctatcaatacgacgatgacggctaccagagctactgcaccatctgttgcggcggaagagaggtgctgatgtgtggaaataacaactgctgccggtgcttctgcgtggaatgcgtggacctgctggtgggccccggcgccgcccaggccgctattaaggaagatccttggaactgctacatgtgcggccacaagggcacatacggcctgctgagacggagagaggactggcctagcagactgcagatgttcttcgccaataaccacgaccaggagttcgacccccctaaggtgtaccctcccgtccccgccgagaagagaaagcccatccgggtcctgagcctgttcgatggcatcgccaccggtctgctggtgctgaaggacctgggcatccaggtggataggtacattgcctccgaggtgtgcgaggactccatcaccgtgggaatggtgcgtcatcagggcaagatcatgtacgtgggcgacgtgcggagcgtgacacagaagcatatccaggagtggggccctttcgacctggtgatcggcggcagcccttgcaatgacctgagcatcgtgaacccagcccggaagggcctgtacgagggaaccggcagactgttcttcgagttttacagactgctgcacgacgcccggcctaaggaaggcgacgaccggcccttcttttggctgttcgagaatgtggtggccatgggagtcagcgacaagcgggatattagccggttcctggagagcaaccccgtgatgatcgatgccaaggaagtgagcgccgcccaccgggccagatacttctggggcaatctgcctggcatgaacagacccctggccagcaccgtgaacgacaagctggagctgcaggagtgcctggagcacggccggatcgccaagttcagcaaggtgagaaccatcaccacccgaagcaacagcatcaaacaaggcaaggaccagcactttcctgtgttcatgaacgagaaggaggacatcctgtggtgtaccgagatggagagagtgttcgggttcccagtccactacacagatgtcagcaacatgtctagactggccagacagagactgctgggaagaagctggtccgtccctgtgatcagacacctgttcgcccctctgaaggagtacttcgcctgcgtgagcagcggcaacagcaacgccaacagccggggccccagcttctctagcggcctggtgccactgtccctgagagggagccacatgggccccatggagatctacaaaaccgtgagcgcctggaagcggcagcctgtgcgcgtgctgagcctgtttcggaatatcgataaagtcctgaaaagcctgggattcctggagagcggctctggctccggcggtggcaccctgaagtacgtggaggatgtgacaaacgtggtcagacgggatgtggagaagtggggccccttcgatctggtgtacggcagcacccaacccctgggcagctcttgtgaccggtgccctggctggtacatgtttcagttccaccggatcctgcagtacgccctgccgagacaggagtcccagcggccattcttttggattttcatggacaacttgctgctgaccgaggatgaccaggaaactaccactcggttcctgcagaccgaagccgtgaccctgcaggacgtgagaggccgggactaccagaacgccatgcgggtgtggtccaacatccctggactgaaaagcaagcacgcacctctgacccctaaagaagaggagtacctgcaggcccaggtgcggagcagaagcaagctggacgcccctaaggtggatctgctggtgaagaattgcctcctgcccctgagagagtacttcaagtatttcagccagaatagtctgcccctgggcggcccaagcagcggcgcccctcctcccagcggcggcagcccagccggctccccaacctctaccgaggagggcacctctgagtccgccacccccgagagcggccctggcacctccaccgagcccagcgagggcagcgcacccggcagccctgccggcagccccacctccacagaggagggaaccagcaccgagcccagcgaaggcagcgccccaggcaccagcaccgagcctagtgagggcggctctggcggcggcagcgcccaggagattaaacggatcaacaagatcagaagaagacttgtgaaagacagcaacaccaagaaggccggcaagacaggccccatgaaaaccctgctggttagagtgatgacacccgatctgagagagcggctggaaaacctgagaaagaagcctgaaaatatcccccagcccatcagcaatacatctagagccaacctgaataagctgctgaccgattacaccgaaatgaagaaggcgatcctgcatgtgtactgggaagagttccagaaggaccctgtgggcctgatgagccgggtggcccagcctgccagcaagaagatcgatcagaacaagctgaaacctgagatggacgagaagggcaacctgaccaccgccggctttgcctgctctcagtgtggccagcccctgttcgtgtacaagctggagcaggtgtctgagaagggcaaggcttacaccaactacttcggacggtgcaatgtggccgagcacgaaaagctgatcctgctggcccagctgaagcccgagaaggatagcgacgaagccgtgacatatagcctgggaaagtttgggcagagggccctggatttctacagcattcatgtgaccaaggagtccacccaccccgtgaagcccctggcccagatcgccggaaacagatacgcctccggacctgtgggaaaggccctgagcgacgcatgtatgggcacaatcgcctccttcctgtctaagtaccaggacatcatcatcgaacaccagaaggtggtgaagggcaaccagaagagactggagagcctgcgggagctggccggcaaggaaaacctggaataccctagcgtgaccctgccacctcagcctcacaccaaggagggcgttgatgcctacaacgaagtgatcgcccgggtgcgaatgtgggtgaacctgaacctgtggcagaagctgaagctaagcagagatgatgccaagcctctgctgagactgaagggattcccttcctttcctctggtcgagagacaggccaacgaagtggactggtgggacatggtgtgtaacgtgaagaagctgatcaacgagaaaaaggaggatggcaaggtgttttggcagaatctggctggctacaagagacaggaagccctgagaccatacctgagcagcgaggaagatcggaagaagggaaagaaattcgctcggtaccagctgggcgacctgctgctgcacctggaaaagaagcacggcgaggactggggaaaggtgtacgacgaggcctgggagcggattgacaagaaagtggaaggcctgagcaagcacatcaagctggaagaggaacggagaagcgaggacgcccagagcaaggccgccctgaccgactggctgcgggctaaggccagcttcgtgatcgagggcctgaaggaggccgacaaggacgagttctgcagatgcgagctgaagctgcagaagtggtacggggacctgcggggaaagcccttcgccatcgaagccgagaacagcatcctggacatcagcggcttcagcaagcagtacaactgtgccttcatctggcagaaggacggcgtgaagaagctgaacctgtacctgatcatcaactacttcaagggcggcaagctgcggttcaagaagatcaaacctgaagccttcgaagccaacagattctacaccgtgatcaacaaaaagagcggcgagatcgtgcccatggaggtgaacttcaacttcgacgaccccaacctgatcatcctgcctctggcctttggcaagagacagggcagagaattcatctggaacgacctgctgtccctggaaaccggcagcctgaagctggccaacggaagagtgatcgagaagacactgtacaacagaagaacccggcaggatgagcctgccctgttcgtggccctgaccttcgagcggcgggaggtcctggactcctccaatatcaaaccaatgaacctgatcggcgtggcaagaggcgaaaacatccccgccgtgatcgccctgaccgaccccgagggctgcccactgagccggtttaaggatagcctgggaaacccaacccacatcctgagaatcggcgagagctataaggagaagcagcggaccatccaggccaagaaggaggtggagcagcggagagccggcggctacagccggaagtacgccagcaaagccaagaatctggcagacgatatggtgagaaacaccgctagagatctgctgtactacgccgtgacccaggatgccatgctgatcttcgccaacctgagccggggcttcggccggcagggcaagcggaccttcatggccgagagacagtacacacggatggaggactggctgaccgccaagctggcctacgagggcctgagcaagacctacctgtccaagacactggcccagtacacctccaagacatgcagcaactgtgggtttaccatcaccagcgccgactacgacagggtgctggagaagctgaagaagacagcaacaggctggatgaccacaattaacggcaaggagctgaaggtggagggccagattacctactacaacagatacaagagacagaacgtagtcaaggacctgtccgtcgagctggatagactgagcgaagaatctgtgaacaacgacatctcctcctggacaaagggcagaagcggagaagctctgagcctcctgaagaaaagattctcccatagacccgtgcaggagaagttcgtgtgcctgaactgcggcttcgagacacacgcagccgagcaagccgccctgaacatcgccagatcctggctgttcctgcggagccaggagtacaagaaataccagacaaacaagacaaccggcaacaccgataagagagccttcgtcgagacctggcagtccttttaccggaagaagcttaaggaggtgtggaaacctgccgtgcggtctggcggatctggcggaggctccacaagcctggtgagcttcgaggacgtggccatggacttcagcagggaggagtggcagcagctggaccccgcccagaggtgcctgtaccaggacgtgatgctggagatctacagccacctgctgagcgtggagggcgccctgggcctgaagaccagccagcagaagatcttcgagaaggccagcttccacaacggcaaggagagcgaggtgaccaggggcggcatgtggtgcagcatcagcgaggacctgaccagccccaagaaaaagagaaaagtctaagctgccttctgcggggcttgccttctggccatgcccttcttctctcccttgcacctgtacctcttggtctttgaataaagcctgagtaggaaggctagcaaaaaaaaaaaaaaaaaaaaaaaaaaaaaaaaaaaaaaaaaaaaaaaaaaaaaaaaaaaaaaaaaaaaaaaaaaaaaaaa

SEQ ID NO: 6980 - RNA, 5797 nt, synthetic construct
  source 1..5797: mol_type = other RNA
aggaaataagagagaaaagaagagtaagaagaaatataagagccaccatggcccctaagaagaagcgtaaagtgagccggatggaacgcctcgtctacgaggtgcggcagaagtgcagaaacatcgaggacatctgcatctcctgcggatctctgaacgtgaccctggagcacccactgttcatcggcggcatgtgccagaactgtaaaaactgttttctggagtgtgcctatcaatacgacgatgacggctaccagagctactgcaccatctgttgcggcggaagagaggtgctgatgtgtggaaataacaactgctgccggtgcttctgcgtggaatgcgtggacctgctggtgggccccggcgccgcccaggccgctattaaggaagatccttggaactgctacatgtgcggccacaagggcacatacggcctgctgagacggagagaggactggcctagcagactgcagatgttcttcgccaataaccacgaccaggagttcgacccccctaaggtgtaccctcccgtccccgccgagaagagaaagcccatccgggtcctgagcctgttcgatggcatcgccaccggtctgctggtgctgaaggacctgggcatccaggtggataggtacattgcctccgaggtgtgcgaggactccatcaccgtgggaatggtgcgtcatcagggcaagatcatgtacgtgggcgacgtgcggagcgtgacacagaagcatatccaggagtggggccctttcgacctggtgatcggcggcagcccttgcaatgacctgagcatcgtgaacccagcccggaagggcctgtacgagggaaccggcagactgttcttcgagttttacagactgctgcacgacgcccggcctaaggaaggcgacgaccggcccttcttttggctgttcgagaatgtggtggccatgggagtcagcgacaagcgggatattagccggttcctggagagcaaccccgtgatgatcgatgccaaggaagtgagcgccgcccaccgggccagatacttctggggcaatctgcctggcatgaacagacccctggccagcaccgtgaacgacaagctggagctgcaggagtgcctggagcacggccggatcgccaagttcagcaaggtgagaaccatcaccacccgaagcaacagcatcaaacaaggcaaggaccagcactttcctgtgttcatgaacgagaaggaggacatcctgtggtgtaccgagatggagagagtgttcgggttcccagtccactacacagatgtcagcaacatgtctagactggccagacagagactgctgggaagaagctggtccgtccctgtgatcagacacctgttcgcccctctgaaggagtacttcgcctgcgtgagcagcggcaacagcaacgccaacagccggggccccagcttctctagcggcctggtgccactgtccctgagagggagccacatgggccccatggagatctacaaaaccgtgagcgcctggaagcggcagcctgtgcgcgtgctgagcctgtttcggaatatcgataaagtcctgaaaagcctgggattcctggagagcggctctggctccggcggtggcaccctgaagtacgtggaggatgtgacaaacgtggtcagacgggatgtggagaagtggggccccttcgatctggtgtacggcagcacccaacccctgggcagctcttgtgaccggtgccctggctggtacatgtttcagttccaccggatcctgcagtacgccctgccgagacaggagtcccagcggccattcttttggattttcatggacaacttgctgctgaccgaggatgaccaggaaactaccactcggttcctgcagaccgaagccgtgaccctgcaggacgtgagaggccgggactaccagaacgccatgcgggtgtggtccaacatccctggactgaaaagcaagcacgcacctctgacccctaaagaagaggagtacctgcaggcccaggtgcggagcagaagcaagctggacgcccctaaggtggatctgctggtgaagaattgcctcctgcccctgagagagtacttcaagtatttcagccagaatagtctgcccctgggcggcccaagcagcggcgcccctcctcccagcggcggcagcccagccggctccccaacctctaccgaggagggcacctctgagtccgccacccccgagagcggccctggcacctccaccgagcccagcgagggcagcgcacccggcagccctgccggcagccccacctccacagaggagggaaccagcaccgagcccagcgaaggcagcgccccaggcaccagcaccgagcctagtgagggcggctctggcggcggcagcgcccaggagattaaacggatcaacaagatcagaagaagacttgtgaaagacagcaacaccaagaaggccggcaagacaggccccatgaaaaccctgctggttagagtgatgacacccgatctgagagagcggctggaaaacctgagaaagaagcctgaaaatatcccccagcccatcagcaatacatctagagccaacctgaataagctgctgaccgattacaccgaaatgaagaaggcgatcctgcatgtgtactgggaagagttccagaaggaccctgtgggcctgatgagccgggtggcccagcctgccagcaagaagatcgatcagaacaagctgaaacctgagatggacgagaagggcaacctgaccaccgccggctttgcctgctctcagtgtggccagcccctgttcgtgtacaagctggagcaggtgtctgagaagggcaaggcttacaccaactacttcggacggtgcaatgtggccgagcacgaaaagctgatcctgctggcccagctgaagcccgagaaggatagcgacgaagccgtgacatatagcctgggaaagtttgggcagagggccctggatttctacagcattcatgtgaccaaggagtccacccaccccgtgaagcccctggcccagatcgccggaaacagatacgcctccggacctgtgggaaaggccctgagcgacgcatgtatgggcacaatcgcctccttcctgtctaagtaccaggacatcatcatcgaacaccagaaggtggtgaagggcaaccagaagagactggagagcctgcgggagctggccggcaaggaaaacctggaataccctagcgtgaccctgccacctcagcctcacaccaaggagggcgttgatgcctacaacgaagtgatcgcccgggtgcgaatgtgggtgaacctgaacctgtggcagaagctgaagctaagcagagatgatgccaagcctctgctgagactgaagggattcccttcctttcctctggtcgagagacaggccaacgaagtggactggtgggacatggtgtgtaacgtgaagaagctgatcaacgagaaaaaggaggatggcaaggtgttttggcagaatctggctggctacaagagacaggaagccctgagaccatacctgagcagcgaggaagatcggaagaagggaaagaaattcgctcggtaccagctgggcgacctgctgctgcacctggaaaagaagcacggcgaggactggggaaaggtgtacgacgaggcctgggagcggattgacaagaaagtggaaggcctgagcaagcacatcaagctggaagaggaacggagaagcgaggacgcccagagcaaggccgccctgaccgactggctgcgggctaaggccagcttcgtgatcgagggcctgaaggaggccgacaaggacgagttctgcagatgcgagctgaagctgcagaagtggtacggggacctgcggggaaagcccttcgccatcgaagccgagaacagcatcctggacatcagcggcttcagcaagcagtacaactgtgccttcatctggcagaaggacggcgtgaagaagctgaacctgtacctgatcatcaactacttcaagggcggcaagctgcggttcaagaagatcaaacctgaagccttcgaagccaacagattctacaccgtgatcaacaaaaagagcggcgagatcgtgcccatggaggtgaacttcaacttcgacgaccccaacctgatcatcctgcctctggcctttggcaagagacagggcagagaattcatctggaacgacctgctgtccctggaaaccggcagcctgaagctggccaacggaagagtgatcgagaagacactgtacaacagaagaacccggcaggatgagcctgccctgttcgtggccctgaccttcgagcggcgggaggtcctggactcctccaatatcaaaccaatgaacctgatcggcgtggcaagaggcgaaaacatccccgccgtgatcgccctgaccgaccccgagggctgcccactgagccggtttaaggatagcctgggaaacccaacccacatcctgagaatcggcgagagctataaggagaagcagcggaccatccaggccaagaaggaggtggagcagcggagagccggcggctacagccggaagtacgccagcaaagccaagaatctggcagacgatatggtgagaaacaccgctagagatctgctgtactacgccgtgacccaggatgccatgctgatcttcgccaacctgagccggggcttcggccggcagggcaagcggaccttcatggccgagagacagtacacacggatggaggactggctgaccgccaagctggcctacgagggcctgagcaagacctacctgtccaagacactggcccagtacacctccaagacatgcagcaactgtgggtttaccatcaccagcgccgactacgacagggtgctggagaagctgaagaagacagcaacaggctggatgaccacaattaacggcaaggagctgaaggtggagggccagattacctactacaacagatacaagagacagaacgtagtcaaggacctgtccgtcgagctggatagactgagcgaagaatctgtgaacaacgacatctcctcctggacaaagggcagaagcggagaagctctgagcctcctgaagaaaagattctcccatagacccgtgcaggagaagttcgtgtgcctgaactgcggcttcgagacacacgcagccgagcaagccgccctgaacatcgccagatcctggctgttcctgcggagccaggagtacaagaaataccagacaaacaagacaaccggcaacaccgataagagagccttcgtcgagacctggcagtccttttaccggaagaagcttaaggaggtgtggaaacctgccgtgcggtctggcggatctggcggaggctccacaagcagccagcacctggtgaccttcgaggacgtggccgtgaacttcacccaggaggagtggaccctgctggaccagacccagagggacctgtacagggacgtgatgctggagaactaccagaacctgatggccctgggcagcgagagctgcaagccccacgtgaacagccccctggagggcgccgaggagctgaggaccagggccaggaggatcctgcagagcgagttcatggccgagagcgacctgaccagccccaagaaaaagagaaaagtctaagctgccttctgcggggcttgccttctggccatgcccttcttctctcccttgcacctgtacctcttggtctttgaataaagcctgagtaggaaggctagcaaaaaaaaaaaaaaaaaaaaaaaaaaaaaaaaaaaaaaaaaaaaaaaaaaaaaaaaaaaaaaaaaaaaaaaaaaaaaaaa

SEQ ID NO: 6981 - RNA, 5797 nt, synthetic construct
  source 1..5797: mol_type = other RNA
aggaaataagagagaaaagaagagtaagaagaaatataagagccaccatggcccctaagaagaagcgtaaagtgagccggatggaacgcctcgtctacgaggtgcggcagaagtgcagaaacatcgaggacatctgcatctcctgcggatctctgaacgtgaccctggagcacccactgttcatcggcggcatgtgccagaactgtaaaaactgttttctggagtgtgcctatcaatacgacgatgacggctaccagagctactgcaccatctgttgcggcggaagagaggtgctgatgtgtggaaataacaactgctgccggtgcttctgcgtggaatgcgtggacctgctggtgggccccggcgccgcccaggccgctattaaggaagatccttggaactgctacatgtgcggccacaagggcacatacggcctgctgagacggagagaggactggcctagcagactgcagatgttcttcgccaataaccacgaccaggagttcgacccccctaaggtgtaccctcccgtccccgccgagaagagaaagcccatccgggtcctgagcctgttcgatggcatcgccaccggtctgctggtgctgaaggacctgggcatccaggtggataggtacattgcctccgaggtgtgcgaggactccatcaccgtgggaatggtgcgtcatcagggcaagatcatgtacgtgggcgacgtgcggagcgtgacacagaagcatatccaggagtggggccctttcgacctggtgatcggcggcagcccttgcaatgacctgagcatcgtgaacccagcccggaagggcctgtacgagggaaccggcagactgttcttcgagttttacagactgctgcacgacgcccggcctaaggaaggcgacgaccggcccttcttttggctgttcgagaatgtggtggccatgggagtcagcgacaagcgggatattagccggttcctggagagcaaccccgtgatgatcgatgccaaggaagtgagcgccgcccaccgggccagatacttctggggcaatctgcctggcatgaacagacccctggccagcaccgtgaacgacaagctggagctgcaggagtgcctggagcacggccggatcgccaagttcagcaaggtgagaaccatcaccacccgaagcaacagcatcaaacaaggcaaggaccagcactttcctgtgttcatgaacgagaaggaggacatcctgtggtgtaccgagatggagagagtgttcgggttcccagtccactacacagatgtcagcaacatgtctagactggccagacagagactgctgggaagaagctggtccgtccctgtgatcagacacctgttcgcccctctgaaggagtacttcgcctgcgtgagcagcggcaacagcaacgccaacagccggggccccagcttctctagcggcctggtgccactgtccctgagagggagccacatgggccccatggagatctacaaaaccgtgagcgcctggaagcggcagcctgtgcgcgtgctgagcctgtttcggaatatcgataaagtcctgaaaagcctgggattcctggagagcggctctggctccggcggtggcaccctgaagtacgtggaggatgtgacaaacgtggtcagacgggatgtggagaagtggggccccttcgatctggtgtacggcagcacccaacccctgggcagctcttgtgaccggtgccctggctggtacatgtttcagttccaccggatcctgcagtacgccctgccgagacaggagtcccagcggccattcttttggattttcatggacaacttgctgctgaccgaggatgaccaggaaactaccactcggttcctgcagaccgaagccgtgaccctgcaggacgtgagaggccgggactaccagaacgccatgcgggtgtggtccaacatccctggactgaaaagcaagcacgcacctctgacccctaaagaagaggagtacctgcaggcccaggtgcggagcagaagcaagctggacgcccctaaggtggatctgctggtgaagaattgcctcctgcccctgagagagtacttcaagtatttcagccagaatagtctgcccctgggcggcccaagcagcggcgcccctcctcccagcggcggcagcccagccggctccccaacctctaccgaggagggcacctctgagtccgccacccccgagagcggccctggcacctccaccgagcccagcgagggcagcgcacccggcagccctgccggcagccccacctccacagaggagggaaccagcaccgagcccagcgaaggcagcgccccaggcaccagcaccgagcctagtgagggcggctctggcggcggcagcgcccaggagattaaacggatcaacaagatcagaagaagacttgtgaaagacagcaacaccaagaaggccggcaagacaggccccatgaaaaccctgctggttagagtgatgacacccgatctgagagagcggctggaaaacctgagaaagaagcctgaaaatatcccccagcccatcagcaatacatctagagccaacctgaataagctgctgaccgattacaccgaaatgaagaaggcgatcctgcatgtgtactgggaagagttccagaaggaccctgtgggcctgatgagccgggtggcccagcctgccagcaagaagatcgatcagaacaagctgaaacctgagatggacgagaagggcaacctgaccaccgccggctttgcctgctctcagtgtggccagcccctgttcgtgtacaagctggagcaggtgtctgagaagggcaaggcttacaccaactacttcggacggtgcaatgtggccgagcacgaaaagctgatcctgctggcccagctgaagcccgagaaggatagcgacgaagccgtgacatatagcctgggaaagtttgggcagagggccctggatttctacagcattcatgtgaccaaggagtccacccaccccgtgaagcccctggcccagatcgccggaaacagatacgcctccggacctgtgggaaaggccctgagcgacgcatgtatgggcacaatcgcctccttcctgtctaagtaccaggacatcatcatcgaacaccagaaggtggtgaagggcaaccagaagagactggagagcctgcgggagctggccggcaaggaaaacctggaataccctagcgtgaccctgccacctcagcctcacaccaaggagggcgttgatgcctacaacgaagtgatcgcccgggtgcgaatgtgggtgaacctgaacctgtggcagaagctgaagctaagcagagatgatgccaagcctctgctgagactgaagggattcccttcctttcctctggtcgagagacaggccaacgaagtggactggtgggacatggtgtgtaacgtgaagaagctgatcaacgagaaaaaggaggatggcaaggtgttttggcagaatctggctggctacaagagacaggaagccctgagaccatacctgagcagcgaggaagatcggaagaagggaaagaaattcgctcggtaccagctgggcgacctgctgctgcacctggaaaagaagcacggcgaggactggggaaaggtgtacgacgaggcctgggagcggattgacaagaaagtggaaggcctgagcaagcacatcaagctggaagaggaacggagaagcgaggacgcccagagcaaggccgccctgaccgactggctgcgggctaaggccagcttcgtgatcgagggcctgaaggaggccgacaaggacgagttctgcagatgcgagctgaagctgcagaagtggtacggggacctgcggggaaagcccttcgccatcgaagccgagaacagcatcctggacatcagcggcttcagcaagcagtacaactgtgccttcatctggcagaaggacggcgtgaagaagctgaacctgtacctgatcatcaactacttcaagggcggcaagctgcggttcaagaagatcaaacctgaagccttcgaagccaacagattctacaccgtgatcaacaaaaagagcggcgagatcgtgcccatggaggtgaacttcaacttcgacgaccccaacctgatcatcctgcctctggcctttggcaagagacagggcagagaattcatctggaacgacctgctgtccctggaaaccggcagcctgaagctggccaacggaagagtgatcgagaagacactgtacaacagaagaacccggcaggatgagcctgccctgttcgtggccctgaccttcgagcggcgggaggtcctggactcctccaatatcaaaccaatgaacctgatcggcgtggcaagaggcgaaaacatccccgccgtgatcgccctgaccgaccccgagggctgcccactgagccggtttaaggatagcctgggaaacccaacccacatcctgagaatcggcgagagctataaggagaagcagcggaccatccaggccaagaaggaggtggagcagcggagagccggcggctacagccggaagtacgccagcaaagccaagaatctggcagacgatatggtgagaaacaccgctagagatctgctgtactacgccgtgacccaggatgccatgctgatcttcgccaacctgagccggggcttcggccggcagggcaagcggaccttcatggccgagagacagtacacacggatggaggactggctgaccgccaagctggcctacgagggcctgagcaagacctacctgtccaagacactggcccagtacacctccaagacatgcagcaactgtgggtttaccatcaccagcgccgactacgacagggtgctggagaagctgaagaagacagcaacaggctggatgaccacaattaacggcaaggagctgaaggtggagggccagattacctactacaacagatacaagagacagaacgtagtcaaggacctgtccgtcgagctggatagactgagcgaagaatctgtgaacaacgacatctcctcctggacaaagggcagaagcggagaagctctgagcctcctgaagaaaagattctcccatagacccgtgcaggagaagttcgtgtgcctgaactgcggcttcgagacacacgcagccgagcaagccgccctgaacatcgccagatcctggctgttcctgcggagccaggagtacaagaaataccagacaaacaagacaaccggcaacaccgataagagagccttcgtcgagacctggcagtccttttaccggaagaagcttaaggaggtgtggaaacctgccgtgcggtctggcggatctggcggaggctccacaagcatgggcctgctgaccttcagggacgtggccatcgagttcagcctggaggagtggcagtgcctggacaccgcccagaagaacctgtacaggaacgtgatgctggagaactacaggaacctggccttcctgggcatcgccgtgagcaagcccgacctgatcatctgcctggagaaggagaaggagccctggaacatgaagaggcacgagatggtggacgagccccccggcctggccgtgagcaacaccagccccaagaaaaagagaaaagtctaagctgccttctgcggggcttgccttctggccatgcccttcttctctcccttgcacctgtacctcttggtctttgaataaagcctgagtaggaaggctagcaaaaaaaaaaaaaaaaaaaaaaaaaaaaaaaaaaaaaaaaaaaaaaaaaaaaaaaaaaaaaaaaaaaaaaaaaaaaaaaa

SEQ ID NO: 6982 - RNA, 5797 nt, synthetic construct
  source 1..5797: mol_type = other RNA
aggaaataagagagaaaagaagagtaagaagaaatataagagccaccatggcccctaagaagaagcgtaaagtgagccggatggaacgcctcgtctacgaggtgcggcagaagtgcagaaacatcgaggacatctgcatctcctgcggatctctgaacgtgaccctggagcacccactgttcatcggcggcatgtgccagaactgtaaaaactgttttctggagtgtgcctatcaatacgacgatgacggctaccagagctactgcaccatctgttgcggcggaagagaggtgctgatgtgtggaaataacaactgctgccggtgcttctgcgtggaatgcgtggacctgctggtgggccccggcgccgcccaggccgctattaaggaagatccttggaactgctacatgtgcggccacaagggcacatacggcctgctgagacggagagaggactggcctagcagactgcagatgttcttcgccaataaccacgaccaggagttcgacccccctaaggtgtaccctcccgtccccgccgagaagagaaagcccatccgggtcctgagcctgttcgatggcatcgccaccggtctgctggtgctgaaggacctgggcatccaggtggataggtacattgcctccgaggtgtgcgaggactccatcaccgtgggaatggtgcgtcatcagggcaagatcatgtacgtgggcgacgtgcggagcgtgacacagaagcatatccaggagtggggccctttcgacctggtgatcggcggcagcccttgcaatgacctgagcatcgtgaacccagcccggaagggcctgtacgagggaaccggcagactgttcttcgagttttacagactgctgcacgacgcccggcctaaggaaggcgacgaccggcccttcttttggctgttcgagaatgtggtggccatgggagtcagcgacaagcgggatattagccggttcctggagagcaaccccgtgatgatcgatgccaaggaagtgagcgccgcccaccgggccagatacttctggggcaatctgcctggcatgaacagacccctggccagcaccgtgaacgacaagctggagctgcaggagtgcctggagcacggccggatcgccaagttcagcaaggtgagaaccatcaccacccgaagcaacagcatcaaacaaggcaaggaccagcactttcctgtgttcatgaacgagaaggaggacatcctgtggtgtaccgagatggagagagtgttcgggttcccagtccactacacagatgtcagcaacatgtctagactggccagacagagactgctgggaagaagctggtccgtccctgtgatcagacacctgttcgcccctctgaaggagtacttcgcctgcgtgagcagcggcaacagcaacgccaacagccggggccccagcttctctagcggcctggtgccactgtccctgagagggagccacatgggccccatggagatctacaaaaccgtgagcgcctggaagcggcagcctgtgcgcgtgctgagcctgtttcggaatatcgataaagtcctgaaaagcctgggattcctggagagcggctctggctccggcggtggcaccctgaagtacgtggaggatgtgacaaacgtggtcagacgggatgtggagaagtggggccccttcgatctggtgtacggcagcacccaacccctgggcagctcttgtgaccggtgccctggctggtacatgtttcagttccaccggatcctgcagtacgccctgccgagacaggagtcccagcggccattcttttggattttcatggacaacttgctgctgaccgaggatgaccaggaaactaccactcggttcctgcagaccgaagccgtgaccctgcaggacgtgagaggccgggactaccagaacgccatgcgggtgtggtccaacatccctggactgaaaagcaagcacgcacctctgacccctaaagaagaggagtacctgcaggcccaggtgcggagcagaagcaagctggacgcccctaaggtggatctgctggtgaagaattgcctcctgcccctgagagagtacttcaagtatttcagccagaatagtctgcccctgggcggcccaagcagcggcgcccctcctcccagcggcggcagcccagccggctccccaacctctaccgaggagggcacctctgagtccgccacccccgagagcggccctggcacctccaccgagcccagcgagggcagcgcacccggcagccctgccggcagccccacctccacagaggagggaaccagcaccgagcccagcgaaggcagcgccccaggcaccagcaccgagcctagtgagggcggctctggcggcggcagcgcccaggagattaaacggatcaacaagatcagaagaagacttgtgaaagacagcaacaccaagaaggccggcaagacaggccccatgaaaaccctgctggttagagtgatgacacccgatctgagagagcggctggaaaacctgagaaagaagcctgaaaatatcccccagcccatcagcaatacatctagagccaacctgaataagctgctgaccgattacaccgaaatgaagaaggcgatcctgcatgtgtactgggaagagttccagaaggaccctgtgggcctgatgagccgggtggcccagcctgccagcaagaagatcgatcagaacaagctgaaacctgagatggacgagaagggcaacctgaccaccgccggctttgcctgctctcagtgtggccagcccctgttcgtgtacaagctggagcaggtgtctgagaagggcaaggcttacaccaactacttcggacggtgcaatgtggccgagcacgaaaagctgatcctgctggcccagctgaagcccgagaaggatagcgacgaagccgtgacatatagcctgggaaagtttgggcagagggccctggatttctacagcattcatgtgaccaaggagtccacccaccccgtgaagcccctggcccagatcgccggaaacagatacgcctccggacctgtgggaaaggccctgagcgacgcatgtatgggcacaatcgcctccttcctgtctaagtaccaggacatcatcatcgaacaccagaaggtggtgaagggcaaccagaagagactggagagcctgcgggagctggccggcaaggaaaacctggaataccctagcgtgaccctgccacctcagcctcacaccaaggagggcgttgatgcctacaacgaagtgatcgcccgggtgcgaatgtgggtgaacctgaacctgtggcagaagctgaagctaagcagagatgatgccaagcctctgctgagactgaagggattcccttcctttcctctggtcgagagacaggccaacgaagtggactggtgggacatggtgtgtaacgtgaagaagctgatcaacgagaaaaaggaggatggcaaggtgttttggcagaatctggctggctacaagagacaggaagccctgagaccatacctgagcagcgaggaagatcggaagaagggaaagaaattcgctcggtaccagctgggcgacctgctgctgcacctggaaaagaagcacggcgaggactggggaaaggtgtacgacgaggcctgggagcggattgacaagaaagtggaaggcctgagcaagcacatcaagctggaagaggaacggagaagcgaggacgcccagagcaaggccgccctgaccgactggctgcgggctaaggccagcttcgtgatcgagggcctgaaggaggccgacaaggacgagttctgcagatgcgagctgaagctgcagaagtggtacggggacctgcggggaaagcccttcgccatcgaagccgagaacagcatcctggacatcagcggcttcagcaagcagtacaactgtgccttcatctggcagaaggacggcgtgaagaagctgaacctgtacctgatcatcaactacttcaagggcggcaagctgcggttcaagaagatcaaacctgaagccttcgaagccaacagattctacaccgtgatcaacaaaaagagcggcgagatcgtgcccatggaggtgaacttcaacttcgacgaccccaacctgatcatcctgcctctggcctttggcaagagacagggcagagaattcatctggaacgacctgctgtccctggaaaccggcagcctgaagctggccaacggaagagtgatcgagaagacactgtacaacagaagaacccggcaggatgagcctgccctgttcgtggccctgaccttcgagcggcgggaggtcctggactcctccaatatcaaaccaatgaacctgatcggcgtggcaagaggcgaaaacatccccgccgtgatcgccctgaccgaccccgagggctgcccactgagccggtttaaggatagcctgggaaacccaacccacatcctgagaatcggcgagagctataaggagaagcagcggaccatccaggccaagaaggaggtggagcagcggagagccggcggctacagccggaagtacgccagcaaagccaagaatctggcagacgatatggtgagaaacaccgctagagatctgctgtactacgccgtgacccaggatgccatgctgatcttcgccaacctgagccggggcttcggccggcagggcaagcggaccttcatggccgagagacagtacacacggatggaggactggctgaccgccaagctggcctacgagggcctgagcaagacctacctgtccaagacactggcccagtacacctccaagacatgcagcaactgtgggtttaccatcaccagcgccgactacgacagggtgctggagaagctgaagaagacagcaacaggctggatgaccacaattaacggcaaggagctgaaggtggagggccagattacctactacaacagatacaagagacagaacgtagtcaaggacctgtccgtcgagctggatagactgagcgaagaatctgtgaacaacgacatctcctcctggacaaagggcagaagcggagaagctctgagcctcctgaagaaaagattctcccatagacccgtgcaggagaagttcgtgtgcctgaactgcggcttcgagacacacgcagccgagcaagccgccctgaacatcgccagatcctggctgttcctgcggagccaggagtacaagaaataccagacaaacaagacaaccggcaacaccgataagagagccttcgtcgagacctggcagtccttttaccggaagaagcttaaggaggtgtggaaacctgccgtgcggtctggcggatctggcggaggctccacaagcatggccgccctgttcctgagcgccccccaccaggccaaggtgaccttcgaggacgtggccgtgtacctgagcagggaggagtggggcaggctgggccccgcccagaggggcctgtacagggacgtgatgctggagacctacggcaacctggtgagcctgggcgtgggccccgccggccccaagcccggcgtgatcagccagctggagaggggcgacgagccctgggtgctggacgtgcagggcaccagccccaagaaaaagagaaaagtctaagctgccttctgcggggcttgccttctggccatgcccttcttctctcccttgcacctgtacctcttggtctttgaataaagcctgagtaggaaggctagcaaaaaaaaaaaaaaaaaaaaaaaaaaaaaaaaaaaaaaaaaaaaaaaaaaaaaaaaaaaaaaaaaaaaaaaaaaaaaaaa

SEQ ID NO: 6983 - RNA, 5797 nt, synthetic construct
  source 1..5797: mol_type = other RNA
aggaaataagagagaaaagaagagtaagaagaaatataagagccaccatggcccctaagaagaagcgtaaagtgagccggatggaacgcctcgtctacgaggtgcggcagaagtgcagaaacatcgaggacatctgcatctcctgcggatctctgaacgtgaccctggagcacccactgttcatcggcggcatgtgccagaactgtaaaaactgttttctggagtgtgcctatcaatacgacgatgacggctaccagagctactgcaccatctgttgcggcggaagagaggtgctgatgtgtggaaataacaactgctgccggtgcttctgcgtggaatgcgtggacctgctggtgggccccggcgccgcccaggccgctattaaggaagatccttggaactgctacatgtgcggccacaagggcacatacggcctgctgagacggagagaggactggcctagcagactgcagatgttcttcgccaataaccacgaccaggagttcgacccccctaaggtgtaccctcccgtccccgccgagaagagaaagcccatccgggtcctgagcctgttcgatggcatcgccaccggtctgctggtgctgaaggacctgggcatccaggtggataggtacattgcctccgaggtgtgcgaggactccatcaccgtgggaatggtgcgtcatcagggcaagatcatgtacgtgggcgacgtgcggagcgtgacacagaagcatatccaggagtggggccctttcgacctggtgatcggcggcagcccttgcaatgacctgagcatcgtgaacccagcccggaagggcctgtacgagggaaccggcagactgttcttcgagttttacagactgctgcacgacgcccggcctaaggaaggcgacgaccggcccttcttttggctgttcgagaatgtggtggccatgggagtcagcgacaagcgggatattagccggttcctggagagcaaccccgtgatgatcgatgccaaggaagtgagcgccgcccaccgggccagatacttctggggcaatctgcctggcatgaacagacccctggccagcaccgtgaacgacaagctggagctgcaggagtgcctggagcacggccggatcgccaagttcagcaaggtgagaaccatcaccacccgaagcaacagcatcaaacaaggcaaggaccagcactttcctgtgttcatgaacgagaaggaggacatcctgtggtgtaccgagatggagagagtgttcgggttcccagtccactacacagatgtcagcaacatgtctagactggccagacagagactgctgggaagaagctggtccgtccctgtgatcagacacctgttcgcccctctgaaggagtacttcgcctgcgtgagcagcggcaacagcaacgccaacagccggggccccagcttctctagcggcctggtgccactgtccctgagagggagccacatgggccccatggagatctacaaaaccgtgagcgcctggaagcggcagcctgtgcgcgtgctgagcctgtttcggaatatcgataaagtcctgaaaagcctgggattcctggagagcggctctggctccggcggtggcaccctgaagtacgtggaggatgtgacaaacgtggtcagacgggatgtggagaagtggggccccttcgatctggtgtacggcagcacccaacccctgggcagctcttgtgaccggtgccctggctggtacatgtttcagttccaccggatcctgcagtacgccctgccgagacaggagtcccagcggccattcttttggattttcatggacaacttgctgctgaccgaggatgaccaggaaactaccactcggttcctgcagaccgaagccgtgaccctgcaggacgtgagaggccgggactaccagaacgccatgcgggtgtggtccaacatccctggactgaaaagcaagcacgcacctctgacccctaaagaagaggagtacctgcaggcccaggtgcggagcagaagcaagctggacgcccctaaggtggatctgctggtgaagaattgcctcctgcccctgagagagtacttcaagtatttcagccagaatagtctgcccctgggcggcccaagcagcggcgcccctcctcccagcggcggcagcccagccggctccccaacctctaccgaggagggcacctctgagtccgccacccccgagagcggccctggcacctccaccgagcccagcgagggcagcgcacccggcagccctgccggcagccccacctccacagaggagggaaccagcaccgagcccagcgaaggcagcgccccaggcaccagcaccgagcctagtgagggcggctctggcggcggcagcgcccaggagattaaacggatcaacaagatcagaagaagacttgtgaaagacagcaacaccaagaaggccggcaagacaggccccatgaaaaccctgctggttagagtgatgacacccgatctgagagagcggctggaaaacctgagaaagaagcctgaaaatatcccccagcccatcagcaatacatctagagccaacctgaataagctgctgaccgattacaccgaaatgaagaaggcgatcctgcatgtgtactgggaagagttccagaaggaccctgtgggcctgatgagccgggtggcccagcctgccagcaagaagatcgatcagaacaagctgaaacctgagatggacgagaagggcaacctgaccaccgccggctttgcctgctctcagtgtggccagcccctgttcgtgtacaagctggagcaggtgtctgagaagggcaaggcttacaccaactacttcggacggtgcaatgtggccgagcacgaaaagctgatcctgctggcccagctgaagcccgagaaggatagcgacgaagccgtgacatatagcctgggaaagtttgggcagagggccctggatttctacagcattcatgtgaccaaggagtccacccaccccgtgaagcccctggcccagatcgccggaaacagatacgcctccggacctgtgggaaaggccctgagcgacgcatgtatgggcacaatcgcctccttcctgtctaagtaccaggacatcatcatcgaacaccagaaggtggtgaagggcaaccagaagagactggagagcctgcgggagctggccggcaaggaaaacctggaataccctagcgtgaccctgccacctcagcctcacaccaaggagggcgttgatgcctacaacgaagtgatcgcccgggtgcgaatgtgggtgaacctgaacctgtggcagaagctgaagctaagcagagatgatgccaagcctctgctgagactgaagggattcccttcctttcctctggtcgagagacaggccaacgaagtggactggtgggacatggtgtgtaacgtgaagaagctgatcaacgagaaaaaggaggatggcaaggtgttttggcagaatctggctggctacaagagacaggaagccctgagaccatacctgagcagcgaggaagatcggaagaagggaaagaaattcgctcggtaccagctgggcgacctgctgctgcacctggaaaagaagcacggcgaggactggggaaaggtgtacgacgaggcctgggagcggattgacaagaaagtggaaggcctgagcaagcacatcaagctggaagaggaacggagaagcgaggacgcccagagcaaggccgccctgaccgactggctgcgggctaaggccagcttcgtgatcgagggcctgaaggaggccgacaaggacgagttctgcagatgcgagctgaagctgcagaagtggtacggggacctgcggggaaagcccttcgccatcgaagccgagaacagcatcctggacatcagcggcttcagcaagcagtacaactgtgccttcatctggcagaaggacggcgtgaagaagctgaacctgtacctgatcatcaactacttcaagggcggcaagctgcggttcaagaagatcaaacctgaagccttcgaagccaacagattctacaccgtgatcaacaaaaagagcggcgagatcgtgcccatggaggtgaacttcaacttcgacgaccccaacctgatcatcctgcctctggcctttggcaagagacagggcagagaattcatctggaacgacctgctgtccctggaaaccggcagcctgaagctggccaacggaagagtgatcgagaagacactgtacaacagaagaacccggcaggatgagcctgccctgttcgtggccctgaccttcgagcggcgggaggtcctggactcctccaatatcaaaccaatgaacctgatcggcgtggcaagaggcgaaaacatccccgccgtgatcgccctgaccgaccccgagggctgcccactgagccggtttaaggatagcctgggaaacccaacccacatcctgagaatcggcgagagctataaggagaagcagcggaccatccaggccaagaaggaggtggagcagcggagagccggcggctacagccggaagtacgccagcaaagccaagaatctggcagacgatatggtgagaaacaccgctagagatctgctgtactacgccgtgacccaggatgccatgctgatcttcgccaacctgagccggggcttcggccggcagggcaagcggaccttcatggccgagagacagtacacacggatggaggactggctgaccgccaagctggcctacgagggcctgagcaagacctacctgtccaagacactggcccagtacacctccaagacatgcagcaactgtgggtttaccatcaccagcgccgactacgacagggtgctggagaagctgaagaagacagcaacaggctggatgaccacaattaacggcaaggagctgaaggtggagggccagattacctactacaacagatacaagagacagaacgtagtcaaggacctgtccgtcgagctggatagactgagcgaagaatctgtgaacaacgacatctcctcctggacaaagggcagaagcggagaagctctgagcctcctgaagaaaagattctcccatagacccgtgcaggagaagttcgtgtgcctgaactgcggcttcgagacacacgcagccgagcaagccgccctgaacatcgccagatcctggctgttcctgcggagccaggagtacaagaaataccagacaaacaagacaaccggcaacaccgataagagagccttcgtcgagacctggcagtccttttaccggaagaagcttaaggaggtgtggaaacctgccgtgcggtctggcggatctggcggaggctccacaagcatggccttcagggacgtggccgtggccttcagccagaaggagtggaagctgctgagccccgcccagaggaccctgtacagggacgtgatgctggagaactacagcctgctggtgagcctgggcatcgccttccccaagcccaagctgatcacccagctggagcagggcgacgagccctggagggaggagagcgagtgcttcctggacctgtacagcgagcccaggaccgagttccagccctgcaccagccccaagaaaaagagaaaagtctaagctgccttctgcggggcttgccttctggccatgcccttcttctctcccttgcacctgtacctcttggtctttgaataaagcctgagtaggaaggctagcaaaaaaaaaaaaaaaaaaaaaaaaaaaaaaaaaaaaaaaaaaaaaaaaaaaaaaaaaaaaaaaaaaaaaaaaaaaaaaaa

SEQ ID NO: 6984 - RNA, 5797 nt, synthetic construct
  source 1..5797: mol_type = other RNA
aggaaataagagagaaaagaagagtaagaagaaatataagagccaccatggcccctaagaagaagcgtaaagtgagccggatggaacgcctcgtctacgaggtgcggcagaagtgcagaaacatcgaggacatctgcatctcctgcggatctctgaacgtgaccctggagcacccactgttcatcggcggcatgtgccagaactgtaaaaactgttttctggagtgtgcctatcaatacgacgatgacggctaccagagctactgcaccatctgttgcggcggaagagaggtgctgatgtgtggaaataacaactgctgccggtgcttctgcgtggaatgcgtggacctgctggtgggccccggcgccgcccaggccgctattaaggaagatccttggaactgctacatgtgcggccacaagggcacatacggcctgctgagacggagagaggactggcctagcagactgcagatgttcttcgccaataaccacgaccaggagttcgacccccctaaggtgtaccctcccgtccccgccgagaagagaaagcccatccgggtcctgagcctgttcgatggcatcgccaccggtctgctggtgctgaaggacctgggcatccaggtggataggtacattgcctccgaggtgtgcgaggactccatcaccgtgggaatggtgcgtcatcagggcaagatcatgtacgtgggcgacgtgcggagcgtgacacagaagcatatccaggagtggggccctttcgacctggtgatcggcggcagcccttgcaatgacctgagcatcgtgaacccagcccggaagggcctgtacgagggaaccggcagactgttcttcgagttttacagactgctgcacgacgcccggcctaaggaaggcgacgaccggcccttcttttggctgttcgagaatgtggtggccatgggagtcagcgacaagcgggatattagccggttcctggagagcaaccccgtgatgatcgatgccaaggaagtgagcgccgcccaccgggccagatacttctggggcaatctgcctggcatgaacagacccctggccagcaccgtgaacgacaagctggagctgcaggagtgcctggagcacggccggatcgccaagttcagcaaggtgagaaccatcaccacccgaagcaacagcatcaaacaaggcaaggaccagcactttcctgtgttcatgaacgagaaggaggacatcctgtggtgtaccgagatggagagagtgttcgggttcccagtccactacacagatgtcagcaacatgtctagactggccagacagagactgctgggaagaagctggtccgtccctgtgatcagacacctgttcgcccctctgaaggagtacttcgcctgcgtgagcagcggcaacagcaacgccaacagccggggccccagcttctctagcggcctggtgccactgtccctgagagggagccacatgggccccatggagatctacaaaaccgtgagcgcctggaagcggcagcctgtgcgcgtgctgagcctgtttcggaatatcgataaagtcctgaaaagcctgggattcctggagagcggctctggctccggcggtggcaccctgaagtacgtggaggatgtgacaaacgtggtcagacgggatgtggagaagtggggccccttcgatctggtgtacggcagcacccaacccctgggcagctcttgtgaccggtgccctggctggtacatgtttcagttccaccggatcctgcagtacgccctgccgagacaggagtcccagcggccattcttttggattttcatggacaacttgctgctgaccgaggatgaccaggaaactaccactcggttcctgcagaccgaagccgtgaccctgcaggacgtgagaggccgggactaccagaacgccatgcgggtgtggtccaacatccctggactgaaaagcaagcacgcacctctgacccctaaagaagaggagtacctgcaggcccaggtgcggagcagaagcaagctggacgcccctaaggtggatctgctggtgaagaattgcctcctgcccctgagagagtacttcaagtatttcagccagaatagtctgcccctgggcggcccaagcagcggcgcccctcctcccagcggcggcagcccagccggctccccaacctctaccgaggagggcacctctgagtccgccacccccgagagcggccctggcacctccaccgagcccagcgagggcagcgcacccggcagccctgccggcagccccacctccacagaggagggaaccagcaccgagcccagcgaaggcagcgccccaggcaccagcaccgagcctagtgagggcggctctggcggcggcagcgcccaggagattaaacggatcaacaagatcagaagaagacttgtgaaagacagcaacaccaagaaggccggcaagacaggccccatgaaaaccctgctggttagagtgatgacacccgatctgagagagcggctggaaaacctgagaaagaagcctgaaaatatcccccagcccatcagcaatacatctagagccaacctgaataagctgctgaccgattacaccgaaatgaagaaggcgatcctgcatgtgtactgggaagagttccagaaggaccctgtgggcctgatgagccgggtggcccagcctgccagcaagaagatcgatcagaacaagctgaaacctgagatggacgagaagggcaacctgaccaccgccggctttgcctgctctcagtgtggccagcccctgttcgtgtacaagctggagcaggtgtctgagaagggcaaggcttacaccaactacttcggacggtgcaatgtggccgagcacgaaaagctgatcctgctggcccagctgaagcccgagaaggatagcgacgaagccgtgacatatagcctgggaaagtttgggcagagggccctggatttctacagcattcatgtgaccaaggagtccacccaccccgtgaagcccctggcccagatcgccggaaacagatacgcctccggacctgtgggaaaggccctgagcgacgcatgtatgggcacaatcgcctccttcctgtctaagtaccaggacatcatcatcgaacaccagaaggtggtgaagggcaaccagaagagactggagagcctgcgggagctggccggcaaggaaaacctggaataccctagcgtgaccctgccacctcagcctcacaccaaggagggcgttgatgcctacaacgaagtgatcgcccgggtgcgaatgtgggtgaacctgaacctgtggcagaagctgaagctaagcagagatgatgccaagcctctgctgagactgaagggattcccttcctttcctctggtcgagagacaggccaacgaagtggactggtgggacatggtgtgtaacgtgaagaagctgatcaacgagaaaaaggaggatggcaaggtgttttggcagaatctggctggctacaagagacaggaagccctgagaccatacctgagcagcgaggaagatcggaagaagggaaagaaattcgctcggtaccagctgggcgacctgctgctgcacctggaaaagaagcacggcgaggactggggaaaggtgtacgacgaggcctgggagcggattgacaagaaagtggaaggcctgagcaagcacatcaagctggaagaggaacggagaagcgaggacgcccagagcaaggccgccctgaccgactggctgcgggctaaggccagcttcgtgatcgagggcctgaaggaggccgacaaggacgagttctgcagatgcgagctgaagctgcagaagtggtacggggacctgcggggaaagcccttcgccatcgaagccgagaacagcatcctggacatcagcggcttcagcaagcagtacaactgtgccttcatctggcagaaggacggcgtgaagaagctgaacctgtacctgatcatcaactacttcaagggcggcaagctgcggttcaagaagatcaaacctgaagccttcgaagccaacagattctacaccgtgatcaacaaaaagagcggcgagatcgtgcccatggaggtgaacttcaacttcgacgaccccaacctgatcatcctgcctctggcctttggcaagagacagggcagagaattcatctggaacgacctgctgtccctggaaaccggcagcctgaagctggccaacggaagagtgatcgagaagacactgtacaacagaagaacccggcaggatgagcctgccctgttcgtggccctgaccttcgagcggcgggaggtcctggactcctccaatatcaaaccaatgaacctgatcggcgtggcaagaggcgaaaacatccccgccgtgatcgccctgaccgaccccgagggctgcccactgagccggtttaaggatagcctgggaaacccaacccacatcctgagaatcggcgagagctataaggagaagcagcggaccatccaggccaagaaggaggtggagcagcggagagccggcggctacagccggaagtacgccagcaaagccaagaatctggcagacgatatggtgagaaacaccgctagagatctgctgtactacgccgtgacccaggatgccatgctgatcttcgccaacctgagccggggcttcggccggcagggcaagcggaccttcatggccgagagacagtacacacggatggaggactggctgaccgccaagctggcctacgagggcctgagcaagacctacctgtccaagacactggcccagtacacctccaagacatgcagcaactgtgggtttaccatcaccagcgccgactacgacagggtgctggagaagctgaagaagacagcaacaggctggatgaccacaattaacggcaaggagctgaaggtggagggccagattacctactacaacagatacaagagacagaacgtagtcaaggacctgtccgtcgagctggatagactgagcgaagaatctgtgaacaacgacatctcctcctggacaaagggcagaagcggagaagctctgagcctcctgaagaaaagattctcccatagacccgtgcaggagaagttcgtgtgcctgaactgcggcttcgagacacacgcagccgagcaagccgccctgaacatcgccagatcctggctgttcctgcggagccaggagtacaagaaataccagacaaacaagacaaccggcaacaccgataagagagccttcgtcgagacctggcagtccttttaccggaagaagcttaaggaggtgtggaaacctgccgtgcggtctggcggatctggcggaggctccacaagcatggccatgagccaggagagcctgaccttcaaggacgtgttcgtggacttcaccctggaggagtggcagcagctggacagcgcccagaagaacctgtacagggacgtgatgctggagaactacagccacctggtgagcgtgggctacctggtggagaagcccgacgtgatcttcaggctgggccccggcgaggagagctggatggccgacggcggcacccccgtgaggacctgcgccggcgagaccagccccaagaaaaagagaaaagtctaagctgccttctgcggggcttgccttctggccatgcccttcttctctcccttgcacctgtacctcttggtctttgaataaagcctgagtaggaaggctagcaaaaaaaaaaaaaaaaaaaaaaaaaaaaaaaaaaaaaaaaaaaaaaaaaaaaaaaaaaaaaaaaaaaaaaaaaaaaaaaa

SEQ ID NO: 6985 - RNA, 5797 nt, synthetic construct
  source 1..5797: mol_type = other RNA
aggaaataagagagaaaagaagagtaagaagaaatataagagccaccatggcccctaagaagaagcgtaaagtgagccggatggaacgcctcgtctacgaggtgcggcagaagtgcagaaacatcgaggacatctgcatctcctgcggatctctgaacgtgaccctggagcacccactgttcatcggcggcatgtgccagaactgtaaaaactgttttctggagtgtgcctatcaatacgacgatgacggctaccagagctactgcaccatctgttgcggcggaagagaggtgctgatgtgtggaaataacaactgctgccggtgcttctgcgtggaatgcgtggacctgctggtgggccccggcgccgcccaggccgctattaaggaagatccttggaactgctacatgtgcggccacaagggcacatacggcctgctgagacggagagaggactggcctagcagactgcagatgttcttcgccaataaccacgaccaggagttcgacccccctaaggtgtaccctcccgtccccgccgagaagagaaagcccatccgggtcctgagcctgttcgatggcatcgccaccggtctgctggtgctgaaggacctgggcatccaggtggataggtacattgcctccgaggtgtgcgaggactccatcaccgtgggaatggtgcgtcatcagggcaagatcatgtacgtgggcgacgtgcggagcgtgacacagaagcatatccaggagtggggccctttcgacctggtgatcggcggcagcccttgcaatgacctgagcatcgtgaacccagcccggaagggcctgtacgagggaaccggcagactgttcttcgagttttacagactgctgcacgacgcccggcctaaggaaggcgacgaccggcccttcttttggctgttcgagaatgtggtggccatgggagtcagcgacaagcgggatattagccggttcctggagagcaaccccgtgatgatcgatgccaaggaagtgagcgccgcccaccgggccagatacttctggggcaatctgcctggcatgaacagacccctggccagcaccgtgaacgacaagctggagctgcaggagtgcctggagcacggccggatcgccaagttcagcaaggtgagaaccatcaccacccgaagcaacagcatcaaacaaggcaaggaccagcactttcctgtgttcatgaacgagaaggaggacatcctgtggtgtaccgagatggagagagtgttcgggttcccagtccactacacagatgtcagcaacatgtctagactggccagacagagactgctgggaagaagctggtccgtccctgtgatcagacacctgttcgcccctctgaaggagtacttcgcctgcgtgagcagcggcaacagcaacgccaacagccggggccccagcttctctagcggcctggtgccactgtccctgagagggagccacatgggccccatggagatctacaaaaccgtgagcgcctggaagcggcagcctgtgcgcgtgctgagcctgtttcggaatatcgataaagtcctgaaaagcctgggattcctggagagcggctctggctccggcggtggcaccctgaagtacgtggaggatgtgacaaacgtggtcagacgggatgtggagaagtggggccccttcgatctggtgtacggcagcacccaacccctgggcagctcttgtgaccggtgccctggctggtacatgtttcagttccaccggatcctgcagtacgccctgccgagacaggagtcccagcggccattcttttggattttcatggacaacttgctgctgaccgaggatgaccaggaaactaccactcggttcctgcagaccgaagccgtgaccctgcaggacgtgagaggccgggactaccagaacgccatgcgggtgtggtccaacatccctggactgaaaagcaagcacgcacctctgacccctaaagaagaggagtacctgcaggcccaggtgcggagcagaagcaagctggacgcccctaaggtggatctgctggtgaagaattgcctcctgcccctgagagagtacttcaagtatttcagccagaatagtctgcccctgggcggcccaagcagcggcgcccctcctcccagcggcggcagcccagccggctccccaacctctaccgaggagggcacctctgagtccgccacccccgagagcggccctggcacctccaccgagcccagcgagggcagcgcacccggcagccctgccggcagccccacctccacagaggagggaaccagcaccgagcccagcgaaggcagcgccccaggcaccagcaccgagcctagtgagggcggctctggcggcggcagcgcccaggagattaaacggatcaacaagatcagaagaagacttgtgaaagacagcaacaccaagaaggccggcaagacaggccccatgaaaaccctgctggttagagtgatgacacccgatctgagagagcggctggaaaacctgagaaagaagcctgaaaatatcccccagcccatcagcaatacatctagagccaacctgaataagctgctgaccgattacaccgaaatgaagaaggcgatcctgcatgtgtactgggaagagttccagaaggaccctgtgggcctgatgagccgggtggcccagcctgccagcaagaagatcgatcagaacaagctgaaacctgagatggacgagaagggcaacctgaccaccgccggctttgcctgctctcagtgtggccagcccctgttcgtgtacaagctggagcaggtgtctgagaagggcaaggcttacaccaactacttcggacggtgcaatgtggccgagcacgaaaagctgatcctgctggcccagctgaagcccgagaaggatagcgacgaagccgtgacatatagcctgggaaagtttgggcagagggccctggatttctacagcattcatgtgaccaaggagtccacccaccccgtgaagcccctggcccagatcgccggaaacagatacgcctccggacctgtgggaaaggccctgagcgacgcatgtatgggcacaatcgcctccttcctgtctaagtaccaggacatcatcatcgaacaccagaaggtggtgaagggcaaccagaagagactggagagcctgcgggagctggccggcaaggaaaacctggaataccctagcgtgaccctgccacctcagcctcacaccaaggagggcgttgatgcctacaacgaagtgatcgcccgggtgcgaatgtgggtgaacctgaacctgtggcagaagctgaagctaagcagagatgatgccaagcctctgctgagactgaagggattcccttcctttcctctggtcgagagacaggccaacgaagtggactggtgggacatggtgtgtaacgtgaagaagctgatcaacgagaaaaaggaggatggcaaggtgttttggcagaatctggctggctacaagagacaggaagccctgagaccatacctgagcagcgaggaagatcggaagaagggaaagaaattcgctcggtaccagctgggcgacctgctgctgcacctggaaaagaagcacggcgaggactggggaaaggtgtacgacgaggcctgggagcggattgacaagaaagtggaaggcctgagcaagcacatcaagctggaagaggaacggagaagcgaggacgcccagagcaaggccgccctgaccgactggctgcgggctaaggccagcttcgtgatcgagggcctgaaggaggccgacaaggacgagttctgcagatgcgagctgaagctgcagaagtggtacggggacctgcggggaaagcccttcgccatcgaagccgagaacagcatcctggacatcagcggcttcagcaagcagtacaactgtgccttcatctggcagaaggacggcgtgaagaagctgaacctgtacctgatcatcaactacttcaagggcggcaagctgcggttcaagaagatcaaacctgaagccttcgaagccaacagattctacaccgtgatcaacaaaaagagcggcgagatcgtgcccatggaggtgaacttcaacttcgacgaccccaacctgatcatcctgcctctggcctttggcaagagacagggcagagaattcatctggaacgacctgctgtccctggaaaccggcagcctgaagctggccaacggaagagtgatcgagaagacactgtacaacagaagaacccggcaggatgagcctgccctgttcgtggccctgaccttcgagcggcgggaggtcctggactcctccaatatcaaaccaatgaacctgatcggcgtggcaagaggcgaaaacatccccgccgtgatcgccctgaccgaccccgagggctgcccactgagccggtttaaggatagcctgggaaacccaacccacatcctgagaatcggcgagagctataaggagaagcagcggaccatccaggccaagaaggaggtggagcagcggagagccggcggctacagccggaagtacgccagcaaagccaagaatctggcagacgatatggtgagaaacaccgctagagatctgctgtactacgccgtgacccaggatgccatgctgatcttcgccaacctgagccggggcttcggccggcagggcaagcggaccttcatggccgagagacagtacacacggatggaggactggctgaccgccaagctggcctacgagggcctgagcaagacctacctgtccaagacactggcccagtacacctccaagacatgcagcaactgtgggtttaccatcaccagcgccgactacgacagggtgctggagaagctgaagaagacagcaacaggctggatgaccacaattaacggcaaggagctgaaggtggagggccagattacctactacaacagatacaagagacagaacgtagtcaaggacctgtccgtcgagctggatagactgagcgaagaatctgtgaacaacgacatctcctcctggacaaagggcagaagcggagaagctctgagcctcctgaagaaaagattctcccatagacccgtgcaggagaagttcgtgtgcctgaactgcggcttcgagacacacgcagccgagcaagccgccctgaacatcgccagatcctggctgttcctgcggagccaggagtacaagaaataccagacaaacaagacaaccggcaacaccgataagagagccttcgtcgagacctggcagtccttttaccggaagaagcttaaggaggtgtggaaacctgccgtgcggtctggcggatctggcggaggctccacaagcctgctgaccttcgaggacgtggccgtgagcttcagcgaggaggagtggaagctgctggaccccagccagaagatcctgtacaacgacgtgatgcaggagaactacgagaccgtgatcagcctgggcctgaagctgaagaacgacaccggcaacgaccagcccatcagcctgagcgccctggagatccaggccagcggcggcaaggtgctgaggaaggccaggatgaaggtggcccagaagaccaccagccccaagaaaaagagaaaagtctaagctgccttctgcggggcttgccttctggccatgcccttcttctctcccttgcacctgtacctcttggtctttgaataaagcctgagtaggaaggctagcaaaaaaaaaaaaaaaaaaaaaaaaaaaaaaaaaaaaaaaaaaaaaaaaaaaaaaaaaaaaaaaaaaaaaaaaaaaaaaaa

SEQ ID NO: 6986 - RNA, 5797 nt, synthetic construct
  source 1..5797: mol_type = other RNA
aggaaataagagagaaaagaagagtaagaagaaatataagagccaccatggcccctaagaagaagcgtaaagtgagccggatggaacgcctcgtctacgaggtgcggcagaagtgcagaaacatcgaggacatctgcatctcctgcggatctctgaacgtgaccctggagcacccactgttcatcggcggcatgtgccagaactgtaaaaactgttttctggagtgtgcctatcaatacgacgatgacggctaccagagctactgcaccatctgttgcggcggaagagaggtgctgatgtgtggaaataacaactgctgccggtgcttctgcgtggaatgcgtggacctgctggtgggccccggcgccgcccaggccgctattaaggaagatccttggaactgctacatgtgcggccacaagggcacatacggcctgctgagacggagagaggactggcctagcagactgcagatgttcttcgccaataaccacgaccaggagttcgacccccctaaggtgtaccctcccgtccccgccgagaagagaaagcccatccgggtcctgagcctgttcgatggcatcgccaccggtctgctggtgctgaaggacctgggcatccaggtggataggtacattgcctccgaggtgtgcgaggactccatcaccgtgggaatggtgcgtcatcagggcaagatcatgtacgtgggcgacgtgcggagcgtgacacagaagcatatccaggagtggggccctttcgacctggtgatcggcggcagcccttgcaatgacctgagcatcgtgaacccagcccggaagggcctgtacgagggaaccggcagactgttcttcgagttttacagactgctgcacgacgcccggcctaaggaaggcgacgaccggcccttcttttggctgttcgagaatgtggtggccatgggagtcagcgacaagcgggatattagccggttcctggagagcaaccccgtgatgatcgatgccaaggaagtgagcgccgcccaccgggccagatacttctggggcaatctgcctggcatgaacagacccctggccagcaccgtgaacgacaagctggagctgcaggagtgcctggagcacggccggatcgccaagttcagcaaggtgagaaccatcaccacccgaagcaacagcatcaaacaaggcaaggaccagcactttcctgtgttcatgaacgagaaggaggacatcctgtggtgtaccgagatggagagagtgttcgggttcccagtccactacacagatgtcagcaacatgtctagactggccagacagagactgctgggaagaagctggtccgtccctgtgatcagacacctgttcgcccctctgaaggagtacttcgcctgcgtgagcagcggcaacagcaacgccaacagccggggccccagcttctctagcggcctggtgccactgtccctgagagggagccacatgggccccatggagatctacaaaaccgtgagcgcctggaagcggcagcctgtgcgcgtgctgagcctgtttcggaatatcgataaagtcctgaaaagcctgggattcctggagagcggctctggctccggcggtggcaccctgaagtacgtggaggatgtgacaaacgtggtcagacgggatgtggagaagtggggccccttcgatctggtgtacggcagcacccaacccctgggcagctcttgtgaccggtgccctggctggtacatgtttcagttccaccggatcctgcagtacgccctgccgagacaggagtcccagcggccattcttttggattttcatggacaacttgctgctgaccgaggatgaccaggaaactaccactcggttcctgcagaccgaagccgtgaccctgcaggacgtgagaggccgggactaccagaacgccatgcgggtgtggtccaacatccctggactgaaaagcaagcacgcacctctgacccctaaagaagaggagtacctgcaggcccaggtgcggagcagaagcaagctggacgcccctaaggtggatctgctggtgaagaattgcctcctgcccctgagagagtacttcaagtatttcagccagaatagtctgcccctgggcggcccaagcagcggcgcccctcctcccagcggcggcagcccagccggctccccaacctctaccgaggagggcacctctgagtccgccacccccgagagcggccctggcacctccaccgagcccagcgagggcagcgcacccggcagccctgccggcagccccacctccacagaggagggaaccagcaccgagcccagcgaaggcagcgccccaggcaccagcaccgagcctagtgagggcggctctggcggcggcagcgcccaggagattaaacggatcaacaagatcagaagaagacttgtgaaagacagcaacaccaagaaggccggcaagacaggccccatgaaaaccctgctggttagagtgatgacacccgatctgagagagcggctggaaaacctgagaaagaagcctgaaaatatcccccagcccatcagcaatacatctagagccaacctgaataagctgctgaccgattacaccgaaatgaagaaggcgatcctgcatgtgtactgggaagagttccagaaggaccctgtgggcctgatgagccgggtggcccagcctgccagcaagaagatcgatcagaacaagctgaaacctgagatggacgagaagggcaacctgaccaccgccggctttgcctgctctcagtgtggccagcccctgttcgtgtacaagctggagcaggtgtctgagaagggcaaggcttacaccaactacttcggacggtgcaatgtggccgagcacgaaaagctgatcctgctggcccagctgaagcccgagaaggatagcgacgaagccgtgacatatagcctgggaaagtttgggcagagggccctggatttctacagcattcatgtgaccaaggagtccacccaccccgtgaagcccctggcccagatcgccggaaacagatacgcctccggacctgtgggaaaggccctgagcgacgcatgtatgggcacaatcgcctccttcctgtctaagtaccaggacatcatcatcgaacaccagaaggtggtgaagggcaaccagaagagactggagagcctgcgggagctggccggcaaggaaaacctggaataccctagcgtgaccctgccacctcagcctcacaccaaggagggcgttgatgcctacaacgaagtgatcgcccgggtgcgaatgtgggtgaacctgaacctgtggcagaagctgaagctaagcagagatgatgccaagcctctgctgagactgaagggattcccttcctttcctctggtcgagagacaggccaacgaagtggactggtgggacatggtgtgtaacgtgaagaagctgatcaacgagaaaaaggaggatggcaaggtgttttggcagaatctggctggctacaagagacaggaagccctgagaccatacctgagcagcgaggaagatcggaagaagggaaagaaattcgctcggtaccagctgggcgacctgctgctgcacctggaaaagaagcacggcgaggactggggaaaggtgtacgacgaggcctgggagcggattgacaagaaagtggaaggcctgagcaagcacatcaagctggaagaggaacggagaagcgaggacgcccagagcaaggccgccctgaccgactggctgcgggctaaggccagcttcgtgatcgagggcctgaaggaggccgacaaggacgagttctgcagatgcgagctgaagctgcagaagtggtacggggacctgcggggaaagcccttcgccatcgaagccgagaacagcatcctggacatcagcggcttcagcaagcagtacaactgtgccttcatctggcagaaggacggcgtgaagaagctgaacctgtacctgatcatcaactacttcaagggcggcaagctgcggttcaagaagatcaaacctgaagccttcgaagccaacagattctacaccgtgatcaacaaaaagagcggcgagatcgtgcccatggaggtgaacttcaacttcgacgaccccaacctgatcatcctgcctctggcctttggcaagagacagggcagagaattcatctggaacgacctgctgtccctggaaaccggcagcctgaagctggccaacggaagagtgatcgagaagacactgtacaacagaagaacccggcaggatgagcctgccctgttcgtggccctgaccttcgagcggcgggaggtcctggactcctccaatatcaaaccaatgaacctgatcggcgtggcaagaggcgaaaacatccccgccgtgatcgccctgaccgaccccgagggctgcccactgagccggtttaaggatagcctgggaaacccaacccacatcctgagaatcggcgagagctataaggagaagcagcggaccatccaggccaagaaggaggtggagcagcggagagccggcggctacagccggaagtacgccagcaaagccaagaatctggcagacgatatggtgagaaacaccgctagagatctgctgtactacgccgtgacccaggatgccatgctgatcttcgccaacctgagccggggcttcggccggcagggcaagcggaccttcatggccgagagacagtacacacggatggaggactggctgaccgccaagctggcctacgagggcctgagcaagacctacctgtccaagacactggcccagtacacctccaagacatgcagcaactgtgggtttaccatcaccagcgccgactacgacagggtgctggagaagctgaagaagacagcaacaggctggatgaccacaattaacggcaaggagctgaaggtggagggccagattacctactacaacagatacaagagacagaacgtagtcaaggacctgtccgtcgagctggatagactgagcgaagaatctgtgaacaacgacatctcctcctggacaaagggcagaagcggagaagctctgagcctcctgaagaaaagattctcccatagacccgtgcaggagaagttcgtgtgcctgaactgcggcttcgagacacacgcagccgagcaagccgccctgaacatcgccagatcctggctgttcctgcggagccaggagtacaagaaataccagacaaacaagacaaccggcaacaccgataagagagccttcgtcgagacctggcagtccttttaccggaagaagcttaaggaggtgtggaaacctgccgtgcggtctggcggatctggcggaggctccacaagcgagcccgtgaccttcaaggacgtggccgtggtgttcagcgaggaggagctgggcctgctggacagcgtgcagaggaagctgtacagggacgtgaccctggagaacttcaggaacctggtgagcgtgggccacctgttcagcaagcccgacgtgatcagccagctggagagggaggagcagctgtggatgaccgagatccagacccagaggggcggccacagcgccgagaactgcgccgccaggaccagccccaagaaaaagagaaaagtctaagctgccttctgcggggcttgccttctggccatgcccttcttctctcccttgcacctgtacctcttggtctttgaataaagcctgagtaggaaggctagcaaaaaaaaaaaaaaaaaaaaaaaaaaaaaaaaaaaaaaaaaaaaaaaaaaaaaaaaaaaaaaaaaaaaaaaaaaaaaaaa

SEQ ID NO: 6987 - RNA, 5797 nt, synthetic construct
  source 1..5797: mol_type = other RNA
aggaaataagagagaaaagaagagtaagaagaaatataagagccaccatggcccctaagaagaagcgtaaagtgagccggatggaacgcctcgtctacgaggtgcggcagaagtgcagaaacatcgaggacatctgcatctcctgcggatctctgaacgtgaccctggagcacccactgttcatcggcggcatgtgccagaactgtaaaaactgttttctggagtgtgcctatcaatacgacgatgacggctaccagagctactgcaccatctgttgcggcggaagagaggtgctgatgtgtggaaataacaactgctgccggtgcttctgcgtggaatgcgtggacctgctggtgggccccggcgccgcccaggccgctattaaggaagatccttggaactgctacatgtgcggccacaagggcacatacggcctgctgagacggagagaggactggcctagcagactgcagatgttcttcgccaataaccacgaccaggagttcgacccccctaaggtgtaccctcccgtccccgccgagaagagaaagcccatccgggtcctgagcctgttcgatggcatcgccaccggtctgctggtgctgaaggacctgggcatccaggtggataggtacattgcctccgaggtgtgcgaggactccatcaccgtgggaatggtgcgtcatcagggcaagatcatgtacgtgggcgacgtgcggagcgtgacacagaagcatatccaggagtggggccctttcgacctggtgatcggcggcagcccttgcaatgacctgagcatcgtgaacccagcccggaagggcctgtacgagggaaccggcagactgttcttcgagttttacagactgctgcacgacgcccggcctaaggaaggcgacgaccggcccttcttttggctgttcgagaatgtggtggccatgggagtcagcgacaagcgggatattagccggttcctggagagcaaccccgtgatgatcgatgccaaggaagtgagcgccgcccaccgggccagatacttctggggcaatctgcctggcatgaacagacccctggccagcaccgtgaacgacaagctggagctgcaggagtgcctggagcacggccggatcgccaagttcagcaaggtgagaaccatcaccacccgaagcaacagcatcaaacaaggcaaggaccagcactttcctgtgttcatgaacgagaaggaggacatcctgtggtgtaccgagatggagagagtgttcgggttcccagtccactacacagatgtcagcaacatgtctagactggccagacagagactgctgggaagaagctggtccgtccctgtgatcagacacctgttcgcccctctgaaggagtacttcgcctgcgtgagcagcggcaacagcaacgccaacagccggggccccagcttctctagcggcctggtgccactgtccctgagagggagccacatgggccccatggagatctacaaaaccgtgagcgcctggaagcggcagcctgtgcgcgtgctgagcctgtttcggaatatcgataaagtcctgaaaagcctgggattcctggagagcggctctggctccggcggtggcaccctgaagtacgtggaggatgtgacaaacgtggtcagacgggatgtggagaagtggggccccttcgatctggtgtacggcagcacccaacccctgggcagctcttgtgaccggtgccctggctggtacatgtttcagttccaccggatcctgcagtacgccctgccgagacaggagtcccagcggccattcttttggattttcatggacaacttgctgctgaccgaggatgaccaggaaactaccactcggttcctgcagaccgaagccgtgaccctgcaggacgtgagaggccgggactaccagaacgccatgcgggtgtggtccaacatccctggactgaaaagcaagcacgcacctctgacccctaaagaagaggagtacctgcaggcccaggtgcggagcagaagcaagctggacgcccctaaggtggatctgctggtgaagaattgcctcctgcccctgagagagtacttcaagtatttcagccagaatagtctgcccctgggcggcccaagcagcggcgcccctcctcccagcggcggcagcccagccggctccccaacctctaccgaggagggcacctctgagtccgccacccccgagagcggccctggcacctccaccgagcccagcgagggcagcgcacccggcagccctgccggcagccccacctccacagaggagggaaccagcaccgagcccagcgaaggcagcgccccaggcaccagcaccgagcctagtgagggcggctctggcggcggcagcgcccaggagattaaacggatcaacaagatcagaagaagacttgtgaaagacagcaacaccaagaaggccggcaagacaggccccatgaaaaccctgctggttagagtgatgacacccgatctgagagagcggctggaaaacctgagaaagaagcctgaaaatatcccccagcccatcagcaatacatctagagccaacctgaataagctgctgaccgattacaccgaaatgaagaaggcgatcctgcatgtgtactgggaagagttccagaaggaccctgtgggcctgatgagccgggtggcccagcctgccagcaagaagatcgatcagaacaagctgaaacctgagatggacgagaagggcaacctgaccaccgccggctttgcctgctctcagtgtggccagcccctgttcgtgtacaagctggagcaggtgtctgagaagggcaaggcttacaccaactacttcggacggtgcaatgtggccgagcacgaaaagctgatcctgctggcccagctgaagcccgagaaggatagcgacgaagccgtgacatatagcctgggaaagtttgggcagagggccctggatttctacagcattcatgtgaccaaggagtccacccaccccgtgaagcccctggcccagatcgccggaaacagatacgcctccggacctgtgggaaaggccctgagcgacgcatgtatgggcacaatcgcctccttcctgtctaagtaccaggacatcatcatcgaacaccagaaggtggtgaagggcaaccagaagagactggagagcctgcgggagctggccggcaaggaaaacctggaataccctagcgtgaccctgccacctcagcctcacaccaaggagggcgttgatgcctacaacgaagtgatcgcccgggtgcgaatgtgggtgaacctgaacctgtggcagaagctgaagctaagcagagatgatgccaagcctctgctgagactgaagggattcccttcctttcctctggtcgagagacaggccaacgaagtggactggtgggacatggtgtgtaacgtgaagaagctgatcaacgagaaaaaggaggatggcaaggtgttttggcagaatctggctggctacaagagacaggaagccctgagaccatacctgagcagcgaggaagatcggaagaagggaaagaaattcgctcggtaccagctgggcgacctgctgctgcacctggaaaagaagcacggcgaggactggggaaaggtgtacgacgaggcctgggagcggattgacaagaaagtggaaggcctgagcaagcacatcaagctggaagaggaacggagaagcgaggacgcccagagcaaggccgccctgaccgactggctgcgggctaaggccagcttcgtgatcgagggcctgaaggaggccgacaaggacgagttctgcagatgcgagctgaagctgcagaagtggtacggggacctgcggggaaagcccttcgccatcgaagccgagaacagcatcctggacatcagcggcttcagcaagcagtacaactgtgccttcatctggcagaaggacggcgtgaagaagctgaacctgtacctgatcatcaactacttcaagggcggcaagctgcggttcaagaagatcaaacctgaagccttcgaagccaacagattctacaccgtgatcaacaaaaagagcggcgagatcgtgcccatggaggtgaacttcaacttcgacgaccccaacctgatcatcctgcctctggcctttggcaagagacagggcagagaattcatctggaacgacctgctgtccctggaaaccggcagcctgaagctggccaacggaagagtgatcgagaagacactgtacaacagaagaacccggcaggatgagcctgccctgttcgtggccctgaccttcgagcggcgggaggtcctggactcctccaatatcaaaccaatgaacctgatcggcgtggcaagaggcgaaaacatccccgccgtgatcgccctgaccgaccccgagggctgcccactgagccggtttaaggatagcctgggaaacccaacccacatcctgagaatcggcgagagctataaggagaagcagcggaccatccaggccaagaaggaggtggagcagcggagagccggcggctacagccggaagtacgccagcaaagccaagaatctggcagacgatatggtgagaaacaccgctagagatctgctgtactacgccgtgacccaggatgccatgctgatcttcgccaacctgagccggggcttcggccggcagggcaagcggaccttcatggccgagagacagtacacacggatggaggactggctgaccgccaagctggcctacgagggcctgagcaagacctacctgtccaagacactggcccagtacacctccaagacatgcagcaactgtgggtttaccatcaccagcgccgactacgacagggtgctggagaagctgaagaagacagcaacaggctggatgaccacaattaacggcaaggagctgaaggtggagggccagattacctactacaacagatacaagagacagaacgtagtcaaggacctgtccgtcgagctggatagactgagcgaagaatctgtgaacaacgacatctcctcctggacaaagggcagaagcggagaagctctgagcctcctgaagaaaagattctcccatagacccgtgcaggagaagttcgtgtgcctgaactgcggcttcgagacacacgcagccgagcaagccgccctgaacatcgccagatcctggctgttcctgcggagccaggagtacaagaaataccagacaaacaagacaaccggcaacaccgataagagagccttcgtcgagacctggcagtccttttaccggaagaagcttaaggaggtgtggaaacctgccgtgcggtctggcggatctggcggaggctccacaagcttccagggcctggtgaccttccaggacgtggccgtgatcttcagcctggacgagtggggccacctggaccccgcccagagggagctgtacagggaggtgatgctggagaactaccagaccctggcctgcctgggcctggccgtgagcaagcccgacgtgatcgcccagctggagcagggcggcgccccctggaagctggagaaggacatccccgccagcccctgccccggcgagcagtacgtgaccagccccaagaaaaagagaaaagtctaagctgccttctgcggggcttgccttctggccatgcccttcttctctcccttgcacctgtacctcttggtctttgaataaagcctgagtaggaaggctagcaaaaaaaaaaaaaaaaaaaaaaaaaaaaaaaaaaaaaaaaaaaaaaaaaaaaaaaaaaaaaaaaaaaaaaaaaaaaaaaa

SEQ ID NO: 6988 - RNA, 5797 nt, synthetic construct
  source 1..5797: mol_type = other RNA
aggaaataagagagaaaagaagagtaagaagaaatataagagccaccatggcccctaagaagaagcgtaaagtgagccggatggaacgcctcgtctacgaggtgcggcagaagtgcagaaacatcgaggacatctgcatctcctgcggatctctgaacgtgaccctggagcacccactgttcatcggcggcatgtgccagaactgtaaaaactgttttctggagtgtgcctatcaatacgacgatgacggctaccagagctactgcaccatctgttgcggcggaagagaggtgctgatgtgtggaaataacaactgctgccggtgcttctgcgtggaatgcgtggacctgctggtgggccccggcgccgcccaggccgctattaaggaagatccttggaactgctacatgtgcggccacaagggcacatacggcctgctgagacggagagaggactggcctagcagactgcagatgttcttcgccaataaccacgaccaggagttcgacccccctaaggtgtaccctcccgtccccgccgagaagagaaagcccatccgggtcctgagcctgttcgatggcatcgccaccggtctgctggtgctgaaggacctgggcatccaggtggataggtacattgcctccgaggtgtgcgaggactccatcaccgtgggaatggtgcgtcatcagggcaagatcatgtacgtgggcgacgtgcggagcgtgacacagaagcatatccaggagtggggccctttcgacctggtgatcggcggcagcccttgcaatgacctgagcatcgtgaacccagcccggaagggcctgtacgagggaaccggcagactgttcttcgagttttacagactgctgcacgacgcccggcctaaggaaggcgacgaccggcccttcttttggctgttcgagaatgtggtggccatgggagtcagcgacaagcgggatattagccggttcctggagagcaaccccgtgatgatcgatgccaaggaagtgagcgccgcccaccgggccagatacttctggggcaatctgcctggcatgaacagacccctggccagcaccgtgaacgacaagctggagctgcaggagtgcctggagcacggccggatcgccaagttcagcaaggtgagaaccatcaccacccgaagcaacagcatcaaacaaggcaaggaccagcactttcctgtgttcatgaacgagaaggaggacatcctgtggtgtaccgagatggagagagtgttcgggttcccagtccactacacagatgtcagcaacatgtctagactggccagacagagactgctgggaagaagctggtccgtccctgtgatcagacacctgttcgcccctctgaaggagtacttcgcctgcgtgagcagcggcaacagcaacgccaacagccggggccccagcttctctagcggcctggtgccactgtccctgagagggagccacatgggccccatggagatctacaaaaccgtgagcgcctggaagcggcagcctgtgcgcgtgctgagcctgtttcggaatatcgataaagtcctgaaaagcctgggattcctggagagcggctctggctccggcggtggcaccctgaagtacgtggaggatgtgacaaacgtggtcagacgggatgtggagaagtggggccccttcgatctggtgtacggcagcacccaacccctgggcagctcttgtgaccggtgccctggctggtacatgtttcagttccaccggatcctgcagtacgccctgccgagacaggagtcccagcggccattcttttggattttcatggacaacttgctgctgaccgaggatgaccaggaaactaccactcggttcctgcagaccgaagccgtgaccctgcaggacgtgagaggccgggactaccagaacgccatgcgggtgtggtccaacatccctggactgaaaagcaagcacgcacctctgacccctaaagaagaggagtacctgcaggcccaggtgcggagcagaagcaagctggacgcccctaaggtggatctgctggtgaagaattgcctcctgcccctgagagagtacttcaagtatttcagccagaatagtctgcccctgggcggcccaagcagcggcgcccctcctcccagcggcggcagcccagccggctccccaacctctaccgaggagggcacctctgagtccgccacccccgagagcggccctggcacctccaccgagcccagcgagggcagcgcacccggcagccctgccggcagccccacctccacagaggagggaaccagcaccgagcccagcgaaggcagcgccccaggcaccagcaccgagcctagtgagggcggctctggcggcggcagcgcccaggagattaaacggatcaacaagatcagaagaagacttgtgaaagacagcaacaccaagaaggccggcaagacaggccccatgaaaaccctgctggttagagtgatgacacccgatctgagagagcggctggaaaacctgagaaagaagcctgaaaatatcccccagcccatcagcaatacatctagagccaacctgaataagctgctgaccgattacaccgaaatgaagaaggcgatcctgcatgtgtactgggaagagttccagaaggaccctgtgggcctgatgagccgggtggcccagcctgccagcaagaagatcgatcagaacaagctgaaacctgagatggacgagaagggcaacctgaccaccgccggctttgcctgctctcagtgtggccagcccctgttcgtgtacaagctggagcaggtgtctgagaagggcaaggcttacaccaactacttcggacggtgcaatgtggccgagcacgaaaagctgatcctgctggcccagctgaagcccgagaaggatagcgacgaagccgtgacatatagcctgggaaagtttgggcagagggccctggatttctacagcattcatgtgaccaaggagtccacccaccccgtgaagcccctggcccagatcgccggaaacagatacgcctccggacctgtgggaaaggccctgagcgacgcatgtatgggcacaatcgcctccttcctgtctaagtaccaggacatcatcatcgaacaccagaaggtggtgaagggcaaccagaagagactggagagcctgcgggagctggccggcaaggaaaacctggaataccctagcgtgaccctgccacctcagcctcacaccaaggagggcgttgatgcctacaacgaagtgatcgcccgggtgcgaatgtgggtgaacctgaacctgtggcagaagctgaagctaagcagagatgatgccaagcctctgctgagactgaagggattcccttcctttcctctggtcgagagacaggccaacgaagtggactggtgggacatggtgtgtaacgtgaagaagctgatcaacgagaaaaaggaggatggcaaggtgttttggcagaatctggctggctacaagagacaggaagccctgagaccatacctgagcagcgaggaagatcggaagaagggaaagaaattcgctcggtaccagctgggcgacctgctgctgcacctggaaaagaagcacggcgaggactggggaaaggtgtacgacgaggcctgggagcggattgacaagaaagtggaaggcctgagcaagcacatcaagctggaagaggaacggagaagcgaggacgcccagagcaaggccgccctgaccgactggctgcgggctaaggccagcttcgtgatcgagggcctgaaggaggccgacaaggacgagttctgcagatgcgagctgaagctgcagaagtggtacggggacctgcggggaaagcccttcgccatcgaagccgagaacagcatcctggacatcagcggcttcagcaagcagtacaactgtgccttcatctggcagaaggacggcgtgaagaagctgaacctgtacctgatcatcaactacttcaagggcggcaagctgcggttcaagaagatcaaacctgaagccttcgaagccaacagattctacaccgtgatcaacaaaaagagcggcgagatcgtgcccatggaggtgaacttcaacttcgacgaccccaacctgatcatcctgcctctggcctttggcaagagacagggcagagaattcatctggaacgacctgctgtccctggaaaccggcagcctgaagctggccaacggaagagtgatcgagaagacactgtacaacagaagaacccggcaggatgagcctgccctgttcgtggccctgaccttcgagcggcgggaggtcctggactcctccaatatcaaaccaatgaacctgatcggcgtggcaagaggcgaaaacatccccgccgtgatcgccctgaccgaccccgagggctgcccactgagccggtttaaggatagcctgggaaacccaacccacatcctgagaatcggcgagagctataaggagaagcagcggaccatccaggccaagaaggaggtggagcagcggagagccggcggctacagccggaagtacgccagcaaagccaagaatctggcagacgatatggtgagaaacaccgctagagatctgctgtactacgccgtgacccaggatgccatgctgatcttcgccaacctgagccggggcttcggccggcagggcaagcggaccttcatggccgagagacagtacacacggatggaggactggctgaccgccaagctggcctacgagggcctgagcaagacctacctgtccaagacactggcccagtacacctccaagacatgcagcaactgtgggtttaccatcaccagcgccgactacgacagggtgctggagaagctgaagaagacagcaacaggctggatgaccacaattaacggcaaggagctgaaggtggagggccagattacctactacaacagatacaagagacagaacgtagtcaaggacctgtccgtcgagctggatagactgagcgaagaatctgtgaacaacgacatctcctcctggacaaagggcagaagcggagaagctctgagcctcctgaagaaaagattctcccatagacccgtgcaggagaagttcgtgtgcctgaactgcggcttcgagacacacgcagccgagcaagccgccctgaacatcgccagatcctggctgttcctgcggagccaggagtacaagaaataccagacaaacaagacaaccggcaacaccgataagagagccttcgtcgagacctggcagtccttttaccggaagaagcttaaggaggtgtggaaacctgccgtgcggtctggcggatctggcggaggctccacaagcacccagggccaggtgaccttcagggacgtggccatcgagttcagccaggaggagtggacctgcctggaccccgcccagaggagcctgtacagggacgtgatgctggagaactacaggaacctggccagcctgggcatcagctgcttcgacctgagcatcatcagcatgctggagcagaggaaggagcccttcaccctggagagccaggtgcagatcgccggcaaccccgacggctgggagtggaccagccccaagaaaaagagaaaagtctaagctgccttctgcggggcttgccttctggccatgcccttcttctctcccttgcacctgtacctcttggtctttgaataaagcctgagtaggaaggctagcaaaaaaaaaaaaaaaaaaaaaaaaaaaaaaaaaaaaaaaaaaaaaaaaaaaaaaaaaaaaaaaaaaaaaaaaaaaaaaaa

SEQ ID NO: 6989 - RNA, 5797 nt, synthetic construct
  source 1..5797: mol_type = other RNA
aggaaataagagagaaaagaagagtaagaagaaatataagagccaccatggcccctaagaagaagcgtaaagtgagccggatggaacgcctcgtctacgaggtgcggcagaagtgcagaaacatcgaggacatctgcatctcctgcggatctctgaacgtgaccctggagcacccactgttcatcggcggcatgtgccagaactgtaaaaactgttttctggagtgtgcctatcaatacgacgatgacggctaccagagctactgcaccatctgttgcggcggaagagaggtgctgatgtgtggaaataacaactgctgccggtgcttctgcgtggaatgcgtggacctgctggtgggccccggcgccgcccaggccgctattaaggaagatccttggaactgctacatgtgcggccacaagggcacatacggcctgctgagacggagagaggactggcctagcagactgcagatgttcttcgccaataaccacgaccaggagttcgacccccctaaggtgtaccctcccgtccccgccgagaagagaaagcccatccgggtcctgagcctgttcgatggcatcgccaccggtctgctggtgctgaaggacctgggcatccaggtggataggtacattgcctccgaggtgtgcgaggactccatcaccgtgggaatggtgcgtcatcagggcaagatcatgtacgtgggcgacgtgcggagcgtgacacagaagcatatccaggagtggggccctttcgacctggtgatcggcggcagcccttgcaatgacctgagcatcgtgaacccagcccggaagggcctgtacgagggaaccggcagactgttcttcgagttttacagactgctgcacgacgcccggcctaaggaaggcgacgaccggcccttcttttggctgttcgagaatgtggtggccatgggagtcagcgacaagcgggatattagccggttcctggagagcaaccccgtgatgatcgatgccaaggaagtgagcgccgcccaccgggccagatacttctggggcaatctgcctggcatgaacagacccctggccagcaccgtgaacgacaagctggagctgcaggagtgcctggagcacggccggatcgccaagttcagcaaggtgagaaccatcaccacccgaagcaacagcatcaaacaaggcaaggaccagcactttcctgtgttcatgaacgagaaggaggacatcctgtggtgtaccgagatggagagagtgttcgggttcccagtccactacacagatgtcagcaacatgtctagactggccagacagagactgctgggaagaagctggtccgtccctgtgatcagacacctgttcgcccctctgaaggagtacttcgcctgcgtgagcagcggcaacagcaacgccaacagccggggccccagcttctctagcggcctggtgccactgtccctgagagggagccacatgggccccatggagatctacaaaaccgtgagcgcctggaagcggcagcctgtgcgcgtgctgagcctgtttcggaatatcgataaagtcctgaaaagcctgggattcctggagagcggctctggctccggcggtggcaccctgaagtacgtggaggatgtgacaaacgtggtcagacgggatgtggagaagtggggccccttcgatctggtgtacggcagcacccaacccctgggcagctcttgtgaccggtgccctggctggtacatgtttcagttccaccggatcctgcagtacgccctgccgagacaggagtcccagcggccattcttttggattttcatggacaacttgctgctgaccgaggatgaccaggaaactaccactcggttcctgcagaccgaagccgtgaccctgcaggacgtgagaggccgggactaccagaacgccatgcgggtgtggtccaacatccctggactgaaaagcaagcacgcacctctgacccctaaagaagaggagtacctgcaggcccaggtgcggagcagaagcaagctggacgcccctaaggtggatctgctggtgaagaattgcctcctgcccctgagagagtacttcaagtatttcagccagaatagtctgcccctgggcggcccaagcagcggcgcccctcctcccagcggcggcagcccagccggctccccaacctctaccgaggagggcacctctgagtccgccacccccgagagcggccctggcacctccaccgagcccagcgagggcagcgcacccggcagccctgccggcagccccacctccacagaggagggaaccagcaccgagcccagcgaaggcagcgccccaggcaccagcaccgagcctagtgagggcggctctggcggcggcagcgcccaggagattaaacggatcaacaagatcagaagaagacttgtgaaagacagcaacaccaagaaggccggcaagacaggccccatgaaaaccctgctggttagagtgatgacacccgatctgagagagcggctggaaaacctgagaaagaagcctgaaaatatcccccagcccatcagcaatacatctagagccaacctgaataagctgctgaccgattacaccgaaatgaagaaggcgatcctgcatgtgtactgggaagagttccagaaggaccctgtgggcctgatgagccgggtggcccagcctgccagcaagaagatcgatcagaacaagctgaaacctgagatggacgagaagggcaacctgaccaccgccggctttgcctgctctcagtgtggccagcccctgttcgtgtacaagctggagcaggtgtctgagaagggcaaggcttacaccaactacttcggacggtgcaatgtggccgagcacgaaaagctgatcctgctggcccagctgaagcccgagaaggatagcgacgaagccgtgacatatagcctgggaaagtttgggcagagggccctggatttctacagcattcatgtgaccaaggagtccacccaccccgtgaagcccctggcccagatcgccggaaacagatacgcctccggacctgtgggaaaggccctgagcgacgcatgtatgggcacaatcgcctccttcctgtctaagtaccaggacatcatcatcgaacaccagaaggtggtgaagggcaaccagaagagactggagagcctgcgggagctggccggcaaggaaaacctggaataccctagcgtgaccctgccacctcagcctcacaccaaggagggcgttgatgcctacaacgaagtgatcgcccgggtgcgaatgtgggtgaacctgaacctgtggcagaagctgaagctaagcagagatgatgccaagcctctgctgagactgaagggattcccttcctttcctctggtcgagagacaggccaacgaagtggactggtgggacatggtgtgtaacgtgaagaagctgatcaacgagaaaaaggaggatggcaaggtgttttggcagaatctggctggctacaagagacaggaagccctgagaccatacctgagcagcgaggaagatcggaagaagggaaagaaattcgctcggtaccagctgggcgacctgctgctgcacctggaaaagaagcacggcgaggactggggaaaggtgtacgacgaggcctgggagcggattgacaagaaagtggaaggcctgagcaagcacatcaagctggaagaggaacggagaagcgaggacgcccagagcaaggccgccctgaccgactggctgcgggctaaggccagcttcgtgatcgagggcctgaaggaggccgacaaggacgagttctgcagatgcgagctgaagctgcagaagtggtacggggacctgcggggaaagcccttcgccatcgaagccgagaacagcatcctggacatcagcggcttcagcaagcagtacaactgtgccttcatctggcagaaggacggcgtgaagaagctgaacctgtacctgatcatcaactacttcaagggcggcaagctgcggttcaagaagatcaaacctgaagccttcgaagccaacagattctacaccgtgatcaacaaaaagagcggcgagatcgtgcccatggaggtgaacttcaacttcgacgaccccaacctgatcatcctgcctctggcctttggcaagagacagggcagagaattcatctggaacgacctgctgtccctggaaaccggcagcctgaagctggccaacggaagagtgatcgagaagacactgtacaacagaagaacccggcaggatgagcctgccctgttcgtggccctgaccttcgagcggcgggaggtcctggactcctccaatatcaaaccaatgaacctgatcggcgtggcaagaggcgaaaacatccccgccgtgatcgccctgaccgaccccgagggctgcccactgagccggtttaaggatagcctgggaaacccaacccacatcctgagaatcggcgagagctataaggagaagcagcggaccatccaggccaagaaggaggtggagcagcggagagccggcggctacagccggaagtacgccagcaaagccaagaatctggcagacgatatggtgagaaacaccgctagagatctgctgtactacgccgtgacccaggatgccatgctgatcttcgccaacctgagccggggcttcggccggcagggcaagcggaccttcatggccgagagacagtacacacggatggaggactggctgaccgccaagctggcctacgagggcctgagcaagacctacctgtccaagacactggcccagtacacctccaagacatgcagcaactgtgggtttaccatcaccagcgccgactacgacagggtgctggagaagctgaagaagacagcaacaggctggatgaccacaattaacggcaaggagctgaaggtggagggccagattacctactacaacagatacaagagacagaacgtagtcaaggacctgtccgtcgagctggatagactgagcgaagaatctgtgaacaacgacatctcctcctggacaaagggcagaagcggagaagctctgagcctcctgaagaaaagattctcccatagacccgtgcaggagaagttcgtgtgcctgaactgcggcttcgagacacacgcagccgagcaagccgccctgaacatcgccagatcctggctgttcctgcggagccaggagtacaagaaataccagacaaacaagacaaccggcaacaccgataagagagccttcgtcgagacctggcagtccttttaccggaagaagcttaaggaggtgtggaaacctgccgtgcggtctggcggatctggcggaggctccacaagcgacagggtgaagttcaccttcagcgacgtggccgtgtacttcagcgaggaggagtggcagctgctggaggagcagcagaaggagctgtacaggaacgtgatgaaggagaactacaccaccctgaccagcctgggctacaccaccgtgaagcccgacgtgatcagcaagatcgagcagggcaagcagcccagcgtgagcagccccagcggcagcaagggcaggagggccgtgggcaggcccaccaccagccccaagaaaaagagaaaagtctaagctgccttctgcggggcttgccttctggccatgcccttcttctctcccttgcacctgtacctcttggtctttgaataaagcctgagtaggaaggctagcaaaaaaaaaaaaaaaaaaaaaaaaaaaaaaaaaaaaaaaaaaaaaaaaaaaaaaaaaaaaaaaaaaaaaaaaaaaaaaaa

SEQ ID NO: 6990 - RNA, 5797 nt, synthetic construct
  source 1..5797: mol_type = other RNA
aggaaataagagagaaaagaagagtaagaagaaatataagagccaccatggcccctaagaagaagcgtaaagtgagccggatggaacgcctcgtctacgaggtgcggcagaagtgcagaaacatcgaggacatctgcatctcctgcggatctctgaacgtgaccctggagcacccactgttcatcggcggcatgtgccagaactgtaaaaactgttttctggagtgtgcctatcaatacgacgatgacggctaccagagctactgcaccatctgttgcggcggaagagaggtgctgatgtgtggaaataacaactgctgccggtgcttctgcgtggaatgcgtggacctgctggtgggccccggcgccgcccaggccgctattaaggaagatccttggaactgctacatgtgcggccacaagggcacatacggcctgctgagacggagagaggactggcctagcagactgcagatgttcttcgccaataaccacgaccaggagttcgacccccctaaggtgtaccctcccgtccccgccgagaagagaaagcccatccgggtcctgagcctgttcgatggcatcgccaccggtctgctggtgctgaaggacctgggcatccaggtggataggtacattgcctccgaggtgtgcgaggactccatcaccgtgggaatggtgcgtcatcagggcaagatcatgtacgtgggcgacgtgcggagcgtgacacagaagcatatccaggagtggggccctttcgacctggtgatcggcggcagcccttgcaatgacctgagcatcgtgaacccagcccggaagggcctgtacgagggaaccggcagactgttcttcgagttttacagactgctgcacgacgcccggcctaaggaaggcgacgaccggcccttcttttggctgttcgagaatgtggtggccatgggagtcagcgacaagcgggatattagccggttcctggagagcaaccccgtgatgatcgatgccaaggaagtgagcgccgcccaccgggccagatacttctggggcaatctgcctggcatgaacagacccctggccagcaccgtgaacgacaagctggagctgcaggagtgcctggagcacggccggatcgccaagttcagcaaggtgagaaccatcaccacccgaagcaacagcatcaaacaaggcaaggaccagcactttcctgtgttcatgaacgagaaggaggacatcctgtggtgtaccgagatggagagagtgttcgggttcccagtccactacacagatgtcagcaacatgtctagactggccagacagagactgctgggaagaagctggtccgtccctgtgatcagacacctgttcgcccctctgaaggagtacttcgcctgcgtgagcagcggcaacagcaacgccaacagccggggccccagcttctctagcggcctggtgccactgtccctgagagggagccacatgggccccatggagatctacaaaaccgtgagcgcctggaagcggcagcctgtgcgcgtgctgagcctgtttcggaatatcgataaagtcctgaaaagcctgggattcctggagagcggctctggctccggcggtggcaccctgaagtacgtggaggatgtgacaaacgtggtcagacgggatgtggagaagtggggccccttcgatctggtgtacggcagcacccaacccctgggcagctcttgtgaccggtgccctggctggtacatgtttcagttccaccggatcctgcagtacgccctgccgagacaggagtcccagcggccattcttttggattttcatggacaacttgctgctgaccgaggatgaccaggaaactaccactcggttcctgcagaccgaagccgtgaccctgcaggacgtgagaggccgggactaccagaacgccatgcgggtgtggtccaacatccctggactgaaaagcaagcacgcacctctgacccctaaagaagaggagtacctgcaggcccaggtgcggagcagaagcaagctggacgcccctaaggtggatctgctggtgaagaattgcctcctgcccctgagagagtacttcaagtatttcagccagaatagtctgcccctgggcggcccaagcagcggcgcccctcctcccagcggcggcagcccagccggctccccaacctctaccgaggagggcacctctgagtccgccacccccgagagcggccctggcacctccaccgagcccagcgagggcagcgcacccggcagccctgccggcagccccacctccacagaggagggaaccagcaccgagcccagcgaaggcagcgccccaggcaccagcaccgagcctagtgagggcggctctggcggcggcagcgcccaggagattaaacggatcaacaagatcagaagaagacttgtgaaagacagcaacaccaagaaggccggcaagacaggccccatgaaaaccctgctggttagagtgatgacacccgatctgagagagcggctggaaaacctgagaaagaagcctgaaaatatcccccagcccatcagcaatacatctagagccaacctgaataagctgctgaccgattacaccgaaatgaagaaggcgatcctgcatgtgtactgggaagagttccagaaggaccctgtgggcctgatgagccgggtggcccagcctgccagcaagaagatcgatcagaacaagctgaaacctgagatggacgagaagggcaacctgaccaccgccggctttgcctgctctcagtgtggccagcccctgttcgtgtacaagctggagcaggtgtctgagaagggcaaggcttacaccaactacttcggacggtgcaatgtggccgagcacgaaaagctgatcctgctggcccagctgaagcccgagaaggatagcgacgaagccgtgacatatagcctgggaaagtttgggcagagggccctggatttctacagcattcatgtgaccaaggagtccacccaccccgtgaagcccctggcccagatcgccggaaacagatacgcctccggacctgtgggaaaggccctgagcgacgcatgtatgggcacaatcgcctccttcctgtctaagtaccaggacatcatcatcgaacaccagaaggtggtgaagggcaaccagaagagactggagagcctgcgggagctggccggcaaggaaaacctggaataccctagcgtgaccctgccacctcagcctcacaccaaggagggcgttgatgcctacaacgaagtgatcgcccgggtgcgaatgtgggtgaacctgaacctgtggcagaagctgaagctaagcagagatgatgccaagcctctgctgagactgaagggattcccttcctttcctctggtcgagagacaggccaacgaagtggactggtgggacatggtgtgtaacgtgaagaagctgatcaacgagaaaaaggaggatggcaaggtgttttggcagaatctggctggctacaagagacaggaagccctgagaccatacctgagcagcgaggaagatcggaagaagggaaagaaattcgctcggtaccagctgggcgacctgctgctgcacctggaaaagaagcacggcgaggactggggaaaggtgtacgacgaggcctgggagcggattgacaagaaagtggaaggcctgagcaagcacatcaagctggaagaggaacggagaagcgaggacgcccagagcaaggccgccctgaccgactggctgcgggctaaggccagcttcgtgatcgagggcctgaaggaggccgacaaggacgagttctgcagatgcgagctgaagctgcagaagtggtacggggacctgcggggaaagcccttcgccatcgaagccgagaacagcatcctggacatcagcggcttcagcaagcagtacaactgtgccttcatctggcagaaggacggcgtgaagaagctgaacctgtacctgatcatcaactacttcaagggcggcaagctgcggttcaagaagatcaaacctgaagccttcgaagccaacagattctacaccgtgatcaacaaaaagagcggcgagatcgtgcccatggaggtgaacttcaacttcgacgaccccaacctgatcatcctgcctctggcctttggcaagagacagggcagagaattcatctggaacgacctgctgtccctggaaaccggcagcctgaagctggccaacggaagagtgatcgagaagacactgtacaacagaagaacccggcaggatgagcctgccctgttcgtggccctgaccttcgagcggcgggaggtcctggactcctccaatatcaaaccaatgaacctgatcggcgtggcaagaggcgaaaacatccccgccgtgatcgccctgaccgaccccgagggctgcccactgagccggtttaaggatagcctgggaaacccaacccacatcctgagaatcggcgagagctataaggagaagcagcggaccatccaggccaagaaggaggtggagcagcggagagccggcggctacagccggaagtacgccagcaaagccaagaatctggcagacgatatggtgagaaacaccgctagagatctgctgtactacgccgtgacccaggatgccatgctgatcttcgccaacctgagccggggcttcggccggcagggcaagcggaccttcatggccgagagacagtacacacggatggaggactggctgaccgccaagctggcctacgagggcctgagcaagacctacctgtccaagacactggcccagtacacctccaagacatgcagcaactgtgggtttaccatcaccagcgccgactacgacagggtgctggagaagctgaagaagacagcaacaggctggatgaccacaattaacggcaaggagctgaaggtggagggccagattacctactacaacagatacaagagacagaacgtagtcaaggacctgtccgtcgagctggatagactgagcgaagaatctgtgaacaacgacatctcctcctggacaaagggcagaagcggagaagctctgagcctcctgaagaaaagattctcccatagacccgtgcaggagaagttcgtgtgcctgaactgcggcttcgagacacacgcagccgagcaagccgccctgaacatcgccagatcctggctgttcctgcggagccaggagtacaagaaataccagacaaacaagacaaccggcaacaccgataagagagccttcgtcgagacctggcagtccttttaccggaagaagcttaaggaggtgtggaaacctgccgtgcggtctggcggatctggcggaggctccacaagcagccagcacctggtgaccttcgaggacgtggccgtgaacttcacccaggaggagtggaccctgctggaccagacccagagggacctgtacagggacgtgatgctggagaactaccagaacctgatggccctggccggcagcgagagctgcaagccccacgtgaacagccccctggagggcgccgaggagctgaggaccagggccaggaggatcctgcagagcgagttcatggccgagagcgacaccagccccaagaaaaagagaaaagtctaagctgccttctgcggggcttgccttctggccatgcccttcttctctcccttgcacctgtacctcttggtctttgaataaagcctgagtaggaaggctagcaaaaaaaaaaaaaaaaaaaaaaaaaaaaaaaaaaaaaaaaaaaaaaaaaaaaaaaaaaaaaaaaaaaaaaaaaaaaaaaa

SEQ ID NO: 6991 - RNA, 5797 nt, synthetic construct
  source 1..5797: mol_type = other RNA
aggaaataagagagaaaagaagagtaagaagaaatataagagccaccatggcccctaagaagaagcgtaaagtgagccggatggaacgcctcgtctacgaggtgcggcagaagtgcagaaacatcgaggacatctgcatctcctgcggatctctgaacgtgaccctggagcacccactgttcatcggcggcatgtgccagaactgtaaaaactgttttctggagtgtgcctatcaatacgacgatgacggctaccagagctactgcaccatctgttgcggcggaagagaggtgctgatgtgtggaaataacaactgctgccggtgcttctgcgtggaatgcgtggacctgctggtgggccccggcgccgcccaggccgctattaaggaagatccttggaactgctacatgtgcggccacaagggcacatacggcctgctgagacggagagaggactggcctagcagactgcagatgttcttcgccaataaccacgaccaggagttcgacccccctaaggtgtaccctcccgtccccgccgagaagagaaagcccatccgggtcctgagcctgttcgatggcatcgccaccggtctgctggtgctgaaggacctgggcatccaggtggataggtacattgcctccgaggtgtgcgaggactccatcaccgtgggaatggtgcgtcatcagggcaagatcatgtacgtgggcgacgtgcggagcgtgacacagaagcatatccaggagtggggccctttcgacctggtgatcggcggcagcccttgcaatgacctgagcatcgtgaacccagcccggaagggcctgtacgagggaaccggcagactgttcttcgagttttacagactgctgcacgacgcccggcctaaggaaggcgacgaccggcccttcttttggctgttcgagaatgtggtggccatgggagtcagcgacaagcgggatattagccggttcctggagagcaaccccgtgatgatcgatgccaaggaagtgagcgccgcccaccgggccagatacttctggggcaatctgcctggcatgaacagacccctggccagcaccgtgaacgacaagctggagctgcaggagtgcctggagcacggccggatcgccaagttcagcaaggtgagaaccatcaccacccgaagcaacagcatcaaacaaggcaaggaccagcactttcctgtgttcatgaacgagaaggaggacatcctgtggtgtaccgagatggagagagtgttcgggttcccagtccactacacagatgtcagcaacatgtctagactggccagacagagactgctgggaagaagctggtccgtccctgtgatcagacacctgttcgcccctctgaaggagtacttcgcctgcgtgagcagcggcaacagcaacgccaacagccggggccccagcttctctagcggcctggtgccactgtccctgagagggagccacatgggccccatggagatctacaaaaccgtgagcgcctggaagcggcagcctgtgcgcgtgctgagcctgtttcggaatatcgataaagtcctgaaaagcctgggattcctggagagcggctctggctccggcggtggcaccctgaagtacgtggaggatgtgacaaacgtggtcagacgggatgtggagaagtggggccccttcgatctggtgtacggcagcacccaacccctgggcagctcttgtgaccggtgccctggctggtacatgtttcagttccaccggatcctgcagtacgccctgccgagacaggagtcccagcggccattcttttggattttcatggacaacttgctgctgaccgaggatgaccaggaaactaccactcggttcctgcagaccgaagccgtgaccctgcaggacgtgagaggccgggactaccagaacgccatgcgggtgtggtccaacatccctggactgaaaagcaagcacgcacctctgacccctaaagaagaggagtacctgcaggcccaggtgcggagcagaagcaagctggacgcccctaaggtggatctgctggtgaagaattgcctcctgcccctgagagagtacttcaagtatttcagccagaatagtctgcccctgggcggcccaagcagcggcgcccctcctcccagcggcggcagcccagccggctccccaacctctaccgaggagggcacctctgagtccgccacccccgagagcggccctggcacctccaccgagcccagcgagggcagcgcacccggcagccctgccggcagccccacctccacagaggagggaaccagcaccgagcccagcgaaggcagcgccccaggcaccagcaccgagcctagtgagggcggctctggcggcggcagcgcccaggagattaaacggatcaacaagatcagaagaagacttgtgaaagacagcaacaccaagaaggccggcaagacaggccccatgaaaaccctgctggttagagtgatgacacccgatctgagagagcggctggaaaacctgagaaagaagcctgaaaatatcccccagcccatcagcaatacatctagagccaacctgaataagctgctgaccgattacaccgaaatgaagaaggcgatcctgcatgtgtactgggaagagttccagaaggaccctgtgggcctgatgagccgggtggcccagcctgccagcaagaagatcgatcagaacaagctgaaacctgagatggacgagaagggcaacctgaccaccgccggctttgcctgctctcagtgtggccagcccctgttcgtgtacaagctggagcaggtgtctgagaagggcaaggcttacaccaactacttcggacggtgcaatgtggccgagcacgaaaagctgatcctgctggcccagctgaagcccgagaaggatagcgacgaagccgtgacatatagcctgggaaagtttgggcagagggccctggatttctacagcattcatgtgaccaaggagtccacccaccccgtgaagcccctggcccagatcgccggaaacagatacgcctccggacctgtgggaaaggccctgagcgacgcatgtatgggcacaatcgcctccttcctgtctaagtaccaggacatcatcatcgaacaccagaaggtggtgaagggcaaccagaagagactggagagcctgcgggagctggccggcaaggaaaacctggaataccctagcgtgaccctgccacctcagcctcacaccaaggagggcgttgatgcctacaacgaagtgatcgcccgggtgcgaatgtgggtgaacctgaacctgtggcagaagctgaagctaagcagagatgatgccaagcctctgctgagactgaagggattcccttcctttcctctggtcgagagacaggccaacgaagtggactggtgggacatggtgtgtaacgtgaagaagctgatcaacgagaaaaaggaggatggcaaggtgttttggcagaatctggctggctacaagagacaggaagccctgagaccatacctgagcagcgaggaagatcggaagaagggaaagaaattcgctcggtaccagctgggcgacctgctgctgcacctggaaaagaagcacggcgaggactggggaaaggtgtacgacgaggcctgggagcggattgacaagaaagtggaaggcctgagcaagcacatcaagctggaagaggaacggagaagcgaggacgcccagagcaaggccgccctgaccgactggctgcgggctaaggccagcttcgtgatcgagggcctgaaggaggccgacaaggacgagttctgcagatgcgagctgaagctgcagaagtggtacggggacctgcggggaaagcccttcgccatcgaagccgagaacagcatcctggacatcagcggcttcagcaagcagtacaactgtgccttcatctggcagaaggacggcgtgaagaagctgaacctgtacctgatcatcaactacttcaagggcggcaagctgcggttcaagaagatcaaacctgaagccttcgaagccaacagattctacaccgtgatcaacaaaaagagcggcgagatcgtgcccatggaggtgaacttcaacttcgacgaccccaacctgatcatcctgcctctggcctttggcaagagacagggcagagaattcatctggaacgacctgctgtccctggaaaccggcagcctgaagctggccaacggaagagtgatcgagaagacactgtacaacagaagaacccggcaggatgagcctgccctgttcgtggccctgaccttcgagcggcgggaggtcctggactcctccaatatcaaaccaatgaacctgatcggcgtggcaagaggcgaaaacatccccgccgtgatcgccctgaccgaccccgagggctgcccactgagccggtttaaggatagcctgggaaacccaacccacatcctgagaatcggcgagagctataaggagaagcagcggaccatccaggccaagaaggaggtggagcagcggagagccggcggctacagccggaagtacgccagcaaagccaagaatctggcagacgatatggtgagaaacaccgctagagatctgctgtactacgccgtgacccaggatgccatgctgatcttcgccaacctgagccggggcttcggccggcagggcaagcggaccttcatggccgagagacagtacacacggatggaggactggctgaccgccaagctggcctacgagggcctgagcaagacctacctgtccaagacactggcccagtacacctccaagacatgcagcaactgtgggtttaccatcaccagcgccgactacgacagggtgctggagaagctgaagaagacagcaacaggctggatgaccacaattaacggcaaggagctgaaggtggagggccagattacctactacaacagatacaagagacagaacgtagtcaaggacctgtccgtcgagctggatagactgagcgaagaatctgtgaacaacgacatctcctcctggacaaagggcagaagcggagaagctctgagcctcctgaagaaaagattctcccatagacccgtgcaggagaagttcgtgtgcctgaactgcggcttcgagacacacgcagccgagcaagccgccctgaacatcgccagatcctggctgttcctgcggagccaggagtacaagaaataccagacaaacaagacaaccggcaacaccgataagagagccttcgtcgagacctggcagtccttttaccggaagaagcttaaggaggtgtggaaacctgccgtgcggtctggcggatctggcggaggctccacaagctgcgagggcctggtgagcttcgaggacgtgaccatggacttcagcagggaggagtggcagcagctggaccccgcccagaggtgcctgtactgggacgtgatgctggagatctacagccacctgctgagcgtgggctaccacatccccaaccccgagatcatcagcaggatggagaagggcaagaagagctggatcaggggcgcccagctgccccaccagaggcacagggaggtggtgttcggcaccagccccaagaaaaagagaaaagtctaagctgccttctgcggggcttgccttctggccatgcccttcttctctcccttgcacctgtacctcttggtctttgaataaagcctgagtaggaaggctagcaaaaaaaaaaaaaaaaaaaaaaaaaaaaaaaaaaaaaaaaaaaaaaaaaaaaaaaaaaaaaaaaaaaaaaaaaaaaaaaa

SEQ ID NO: 6992 - RNA, 5797 nt, synthetic construct
  source 1..5797: mol_type = other RNA
aggaaataagagagaaaagaagagtaagaagaaatataagagccaccatggcccctaagaagaagcgtaaagtgagccggatggaacgcctcgtctacgaggtgcggcagaagtgcagaaacatcgaggacatctgcatctcctgcggatctctgaacgtgaccctggagcacccactgttcatcggcggcatgtgccagaactgtaaaaactgttttctggagtgtgcctatcaatacgacgatgacggctaccagagctactgcaccatctgttgcggcggaagagaggtgctgatgtgtggaaataacaactgctgccggtgcttctgcgtggaatgcgtggacctgctggtgggccccggcgccgcccaggccgctattaaggaagatccttggaactgctacatgtgcggccacaagggcacatacggcctgctgagacggagagaggactggcctagcagactgcagatgttcttcgccaataaccacgaccaggagttcgacccccctaaggtgtaccctcccgtccccgccgagaagagaaagcccatccgggtcctgagcctgttcgatggcatcgccaccggtctgctggtgctgaaggacctgggcatccaggtggataggtacattgcctccgaggtgtgcgaggactccatcaccgtgggaatggtgcgtcatcagggcaagatcatgtacgtgggcgacgtgcggagcgtgacacagaagcatatccaggagtggggccctttcgacctggtgatcggcggcagcccttgcaatgacctgagcatcgtgaacccagcccggaagggcctgtacgagggaaccggcagactgttcttcgagttttacagactgctgcacgacgcccggcctaaggaaggcgacgaccggcccttcttttggctgttcgagaatgtggtggccatgggagtcagcgacaagcgggatattagccggttcctggagagcaaccccgtgatgatcgatgccaaggaagtgagcgccgcccaccgggccagatacttctggggcaatctgcctggcatgaacagacccctggccagcaccgtgaacgacaagctggagctgcaggagtgcctggagcacggccggatcgccaagttcagcaaggtgagaaccatcaccacccgaagcaacagcatcaaacaaggcaaggaccagcactttcctgtgttcatgaacgagaaggaggacatcctgtggtgtaccgagatggagagagtgttcgggttcccagtccactacacagatgtcagcaacatgtctagactggccagacagagactgctgggaagaagctggtccgtccctgtgatcagacacctgttcgcccctctgaaggagtacttcgcctgcgtgagcagcggcaacagcaacgccaacagccggggccccagcttctctagcggcctggtgccactgtccctgagagggagccacatgggccccatggagatctacaaaaccgtgagcgcctggaagcggcagcctgtgcgcgtgctgagcctgtttcggaatatcgataaagtcctgaaaagcctgggattcctggagagcggctctggctccggcggtggcaccctgaagtacgtggaggatgtgacaaacgtggtcagacgggatgtggagaagtggggccccttcgatctggtgtacggcagcacccaacccctgggcagctcttgtgaccggtgccctggctggtacatgtttcagttccaccggatcctgcagtacgccctgccgagacaggagtcccagcggccattcttttggattttcatggacaacttgctgctgaccgaggatgaccaggaaactaccactcggttcctgcagaccgaagccgtgaccctgcaggacgtgagaggccgggactaccagaacgccatgcgggtgtggtccaacatccctggactgaaaagcaagcacgcacctctgacccctaaagaagaggagtacctgcaggcccaggtgcggagcagaagcaagctggacgcccctaaggtggatctgctggtgaagaattgcctcctgcccctgagagagtacttcaagtatttcagccagaatagtctgcccctgggcggcccaagcagcggcgcccctcctcccagcggcggcagcccagccggctccccaacctctaccgaggagggcacctctgagtccgccacccccgagagcggccctggcacctccaccgagcccagcgagggcagcgcacccggcagccctgccggcagccccacctccacagaggagggaaccagcaccgagcccagcgaaggcagcgccccaggcaccagcaccgagcctagtgagggcggctctggcggcggcagcgcccaggagattaaacggatcaacaagatcagaagaagacttgtgaaagacagcaacaccaagaaggccggcaagacaggccccatgaaaaccctgctggttagagtgatgacacccgatctgagagagcggctggaaaacctgagaaagaagcctgaaaatatcccccagcccatcagcaatacatctagagccaacctgaataagctgctgaccgattacaccgaaatgaagaaggcgatcctgcatgtgtactgggaagagttccagaaggaccctgtgggcctgatgagccgggtggcccagcctgccagcaagaagatcgatcagaacaagctgaaacctgagatggacgagaagggcaacctgaccaccgccggctttgcctgctctcagtgtggccagcccctgttcgtgtacaagctggagcaggtgtctgagaagggcaaggcttacaccaactacttcggacggtgcaatgtggccgagcacgaaaagctgatcctgctggcccagctgaagcccgagaaggatagcgacgaagccgtgacatatagcctgggaaagtttgggcagagggccctggatttctacagcattcatgtgaccaaggagtccacccaccccgtgaagcccctggcccagatcgccggaaacagatacgcctccggacctgtgggaaaggccctgagcgacgcatgtatgggcacaatcgcctccttcctgtctaagtaccaggacatcatcatcgaacaccagaaggtggtgaagggcaaccagaagagactggagagcctgcgggagctggccggcaaggaaaacctggaataccctagcgtgaccctgccacctcagcctcacaccaaggagggcgttgatgcctacaacgaagtgatcgcccgggtgcgaatgtgggtgaacctgaacctgtggcagaagctgaagctaagcagagatgatgccaagcctctgctgagactgaagggattcccttcctttcctctggtcgagagacaggccaacgaagtggactggtgggacatggtgtgtaacgtgaagaagctgatcaacgagaaaaaggaggatggcaaggtgttttggcagaatctggctggctacaagagacaggaagccctgagaccatacctgagcagcgaggaagatcggaagaagggaaagaaattcgctcggtaccagctgggcgacctgctgctgcacctggaaaagaagcacggcgaggactggggaaaggtgtacgacgaggcctgggagcggattgacaagaaagtggaaggcctgagcaagcacatcaagctggaagaggaacggagaagcgaggacgcccagagcaaggccgccctgaccgactggctgcgggctaaggccagcttcgtgatcgagggcctgaaggaggccgacaaggacgagttctgcagatgcgagctgaagctgcagaagtggtacggggacctgcggggaaagcccttcgccatcgaagccgagaacagcatcctggacatcagcggcttcagcaagcagtacaactgtgccttcatctggcagaaggacggcgtgaagaagctgaacctgtacctgatcatcaactacttcaagggcggcaagctgcggttcaagaagatcaaacctgaagccttcgaagccaacagattctacaccgtgatcaacaaaaagagcggcgagatcgtgcccatggaggtgaacttcaacttcgacgaccccaacctgatcatcctgcctctggcctttggcaagagacagggcagagaattcatctggaacgacctgctgtccctggaaaccggcagcctgaagctggccaacggaagagtgatcgagaagacactgtacaacagaagaacccggcaggatgagcctgccctgttcgtggccctgaccttcgagcggcgggaggtcctggactcctccaatatcaaaccaatgaacctgatcggcgtggcaagaggcgaaaacatccccgccgtgatcgccctgaccgaccccgagggctgcccactgagccggtttaaggatagcctgggaaacccaacccacatcctgagaatcggcgagagctataaggagaagcagcggaccatccaggccaagaaggaggtggagcagcggagagccggcggctacagccggaagtacgccagcaaagccaagaatctggcagacgatatggtgagaaacaccgctagagatctgctgtactacgccgtgacccaggatgccatgctgatcttcgccaacctgagccggggcttcggccggcagggcaagcggaccttcatggccgagagacagtacacacggatggaggactggctgaccgccaagctggcctacgagggcctgagcaagacctacctgtccaagacactggcccagtacacctccaagacatgcagcaactgtgggtttaccatcaccagcgccgactacgacagggtgctggagaagctgaagaagacagcaacaggctggatgaccacaattaacggcaaggagctgaaggtggagggccagattacctactacaacagatacaagagacagaacgtagtcaaggacctgtccgtcgagctggatagactgagcgaagaatctgtgaacaacgacatctcctcctggacaaagggcagaagcggagaagctctgagcctcctgaagaaaagattctcccatagacccgtgcaggagaagttcgtgtgcctgaactgcggcttcgagacacacgcagccgagcaagccgccctgaacatcgccagatcctggctgttcctgcggagccaggagtacaagaaataccagacaaacaagacaaccggcaacaccgataagagagccttcgtcgagacctggcagtccttttaccggaagaagcttaaggaggtgtggaaacctgccgtgcggtctggcggatctggcggaggctccacaagcttccaggagcccgtgaccttcgaggacgtggccgtgtacttcacccagaacgagtgggccagcctgcaccccacccagagggccctgtacagggaggtgatgctggagaactacgccaacgtgaccagcctgagcgccttccccttccccaagcccgacctgatcttccagctggagcagggcgaggccgcctggggccccgacccctggaccctggccggcggcgaggccctgaggggcatgaccagccccaagaaaaagagaaaagtctaagctgccttctgcggggcttgccttctggccatgcccttcttctctcccttgcacctgtacctcttggtctttgaataaagcctgagtaggaaggctagcaaaaaaaaaaaaaaaaaaaaaaaaaaaaaaaaaaaaaaaaaaaaaaaaaaaaaaaaaaaaaaaaaaaaaaaaaaaaaaaa

SEQ ID NO: 6993 - RNA, 5794 nt, synthetic construct
  source 1..5794: mol_type = other RNA
aggaaataagagagaaaagaagagtaagaagaaatataagagccaccatggcccctaagaagaagcgtaaagtgagccggatggaacgcctcgtctacgaggtgcggcagaagtgcagaaacatcgaggacatctgcatctcctgcggatctctgaacgtgaccctggagcacccactgttcatcggcggcatgtgccagaactgtaaaaactgttttctggagtgtgcctatcaatacgacgatgacggctaccagagctactgcaccatctgttgcggcggaagagaggtgctgatgtgtggaaataacaactgctgccggtgcttctgcgtggaatgcgtggacctgctggtgggccccggcgccgcccaggccgctattaaggaagatccttggaactgctacatgtgcggccacaagggcacatacggcctgctgagacggagagaggactggcctagcagactgcagatgttcttcgccaataaccacgaccaggagttcgacccccctaaggtgtaccctcccgtccccgccgagaagagaaagcccatccgggtcctgagcctgttcgatggcatcgccaccggtctgctggtgctgaaggacctgggcatccaggtggataggtacattgcctccgaggtgtgcgaggactccatcaccgtgggaatggtgcgtcatcagggcaagatcatgtacgtgggcgacgtgcggagcgtgacacagaagcatatccaggagtggggccctttcgacctggtgatcggcggcagcccttgcaatgacctgagcatcgtgaacccagcccggaagggcctgtacgagggaaccggcagactgttcttcgagttttacagactgctgcacgacgcccggcctaaggaaggcgacgaccggcccttcttttggctgttcgagaatgtggtggccatgggagtcagcgacaagcgggatattagccggttcctggagagcaaccccgtgatgatcgatgccaaggaagtgagcgccgcccaccgggccagatacttctggggcaatctgcctggcatgaacagacccctggccagcaccgtgaacgacaagctggagctgcaggagtgcctggagcacggccggatcgccaagttcagcaaggtgagaaccatcaccacccgaagcaacagcatcaaacaaggcaaggaccagcactttcctgtgttcatgaacgagaaggaggacatcctgtggtgtaccgagatggagagagtgttcgggttcccagtccactacacagatgtcagcaacatgtctagactggccagacagagactgctgggaagaagctggtccgtccctgtgatcagacacctgttcgcccctctgaaggagtacttcgcctgcgtgagcagcggcaacagcaacgccaacagccggggccccagcttctctagcggcctggtgccactgtccctgagagggagccacatgggccccatggagatctacaaaaccgtgagcgcctggaagcggcagcctgtgcgcgtgctgagcctgtttcggaatatcgataaagtcctgaaaagcctgggattcctggagagcggctctggctccggcggtggcaccctgaagtacgtggaggatgtgacaaacgtggtcagacgggatgtggagaagtggggccccttcgatctggtgtacggcagcacccaacccctgggcagctcttgtgaccggtgccctggctggtacatgtttcagttccaccggatcctgcagtacgccctgccgagacaggagtcccagcggccattcttttggattttcatggacaacttgctgctgaccgaggatgaccaggaaactaccactcggttcctgcagaccgaagccgtgaccctgcaggacgtgagaggccgggactaccagaacgccatgcgggtgtggtccaacatccctggactgaaaagcaagcacgcacctctgacccctaaagaagaggagtacctgcaggcccaggtgcggagcagaagcaagctggacgcccctaaggtggatctgctggtgaagaattgcctcctgcccctgagagagtacttcaagtatttcagccagaatagtctgcccctgggcggcccaagcagcggcgcccctcctcccagcggcggcagcccagccggctccccaacctctaccgaggagggcacctctgagtccgccacccccgagagcggccctggcacctccaccgagcccagcgagggcagcgcacccggcagccctgccggcagccccacctccacagaggagggaaccagcaccgagcccagcgaaggcagcgccccaggcaccagcaccgagcctagtgagggcggctctggcggcggcagcgcccaggagattaaacggatcaacaagatcagaagaagacttgtgaaagacagcaacaccaagaaggccggcaagacaggccccatgaaaaccctgctggttagagtgatgacacccgatctgagagagcggctggaaaacctgagaaagaagcctgaaaatatcccccagcccatcagcaatacatctagagccaacctgaataagctgctgaccgattacaccgaaatgaagaaggcgatcctgcatgtgtactgggaagagttccagaaggaccctgtgggcctgatgagccgggtggcccagcctgccagcaagaagatcgatcagaacaagctgaaacctgagatggacgagaagggcaacctgaccaccgccggctttgcctgctctcagtgtggccagcccctgttcgtgtacaagctggagcaggtgtctgagaagggcaaggcttacaccaactacttcggacggtgcaatgtggccgagcacgaaaagctgatcctgctggcccagctgaagcccgagaaggatagcgacgaagccgtgacatatagcctgggaaagtttgggcagagggccctggatttctacagcattcatgtgaccaaggagtccacccaccccgtgaagcccctggcccagatcgccggaaacagatacgcctccggacctgtgggaaaggccctgagcgacgcatgtatgggcacaatcgcctccttcctgtctaagtaccaggacatcatcatcgaacaccagaaggtggtgaagggcaaccagaagagactggagagcctgcgggagctggccggcaaggaaaacctggaataccctagcgtgaccctgccacctcagcctcacaccaaggagggcgttgatgcctacaacgaagtgatcgcccgggtgcgaatgtgggtgaacctgaacctgtggcagaagctgaagctaagcagagatgatgccaagcctctgctgagactgaagggattcccttcctttcctctggtcgagagacaggccaacgaagtggactggtgggacatggtgtgtaacgtgaagaagctgatcaacgagaaaaaggaggatggcaaggtgttttggcagaatctggctggctacaagagacaggaagccctgagaccatacctgagcagcgaggaagatcggaagaagggaaagaaattcgctcggtaccagctgggcgacctgctgctgcacctggaaaagaagcacggcgaggactggggaaaggtgtacgacgaggcctgggagcggattgacaagaaagtggaaggcctgagcaagcacatcaagctggaagaggaacggagaagcgaggacgcccagagcaaggccgccctgaccgactggctgcgggctaaggccagcttcgtgatcgagggcctgaaggaggccgacaaggacgagttctgcagatgcgagctgaagctgcagaagtggtacggggacctgcggggaaagcccttcgccatcgaagccgagaacagcatcctggacatcagcggcttcagcaagcagtacaactgtgccttcatctggcagaaggacggcgtgaagaagctgaacctgtacctgatcatcaactacttcaagggcggcaagctgcggttcaagaagatcaaacctgaagccttcgaagccaacagattctacaccgtgatcaacaaaaagagcggcgagatcgtgcccatggaggtgaacttcaacttcgacgaccccaacctgatcatcctgcctctggcctttggcaagagacagggcagagaattcatctggaacgacctgctgtccctggaaaccggcagcctgaagctggccaacggaagagtgatcgagaagacactgtacaacagaagaacccggcaggatgagcctgccctgttcgtggccctgaccttcgagcggcgggaggtcctggactcctccaatatcaaaccaatgaacctgatcggcgtggcaagaggcgaaaacatccccgccgtgatcgccctgaccgaccccgagggctgcccactgagccggtttaaggatagcctgggaaacccaacccacatcctgagaatcggcgagagctataaggagaagcagcggaccatccaggccaagaaggaggtggagcagcggagagccggcggctacagccggaagtacgccagcaaagccaagaatctggcagacgatatggtgagaaacaccgctagagatctgctgtactacgccgtgacccaggatgccatgctgatcttcgccaacctgagccggggcttcggccggcagggcaagcggaccttcatggccgagagacagtacacacggatggaggactggctgaccgccaagctggcctacgagggcctgagcaagacctacctgtccaagacactggcccagtacacctccaagacatgcagcaactgtgggtttaccatcaccagcgccgactacgacagggtgctggagaagctgaagaagacagcaacaggctggatgaccacaattaacggcaaggagctgaaggtggagggccagattacctactacaacagatacaagagacagaacgtagtcaaggacctgtccgtcgagctggatagactgagcgaagaatctgtgaacaacgacatctcctcctggacaaagggcagaagcggagaagctctgagcctcctgaagaaaagattctcccatagacccgtgcaggagaagttcgtgtgcctgaactgcggcttcgagacacacgcagccgagcaagccgccctgaacatcgccagatcctggctgttcctgcggagccaggagtacaagaaataccagacaaacaagacaaccggcaacaccgataagagagccttcgtcgagacctggcagtccttttaccggaagaagcttaaggaggtgtggaaacctgccgtgcggtctggcggatctggcggaggctccacaagcaacatgagccaggccagcgtgagcttccaggacgtgaccgtggagttcaccagagaggagtggcagcacctgggccccgtggagagaaccctgtacagagacgtgatgctggagaactacagccacctgatcagcgtgggctactgcatcaccaagcccaaggtgatcagcaagctggagaagggcgaggagccctggagcctggaggacgagttcctgaaccagagataccccggctacaccagccccaagaaaaagagaaaagtctaagctgccttctgcggggcttgccttctggccatgcccttcttctctcccttgcacctgtacctcttggtctttgaataaagcctgagtaggaaggctagcaaaaaaaaaaaaaaaaaaaaaaaaaaaaaaaaaaaaaaaaaaaaaaaaaaaaaaaaaaaaaaaaaaaaaaaaaaaaaaaa

SEQ ID NO: 6994 - RNA, 5797 nt, synthetic construct
  source 1..5797: mol_type = other RNA
aggaaataagagagaaaagaagagtaagaagaaatataagagccaccatggcccctaagaagaagcgtaaagtgagccggatggaacgcctcgtctacgaggtgcggcagaagtgcagaaacatcgaggacatctgcatctcctgcggatctctgaacgtgaccctggagcacccactgttcatcggcggcatgtgccagaactgtaaaaactgttttctggagtgtgcctatcaatacgacgatgacggctaccagagctactgcaccatctgttgcggcggaagagaggtgctgatgtgtggaaataacaactgctgccggtgcttctgcgtggaatgcgtggacctgctggtgggccccggcgccgcccaggccgctattaaggaagatccttggaactgctacatgtgcggccacaagggcacatacggcctgctgagacggagagaggactggcctagcagactgcagatgttcttcgccaataaccacgaccaggagttcgacccccctaaggtgtaccctcccgtccccgccgagaagagaaagcccatccgggtcctgagcctgttcgatggcatcgccaccggtctgctggtgctgaaggacctgggcatccaggtggataggtacattgcctccgaggtgtgcgaggactccatcaccgtgggaatggtgcgtcatcagggcaagatcatgtacgtgggcgacgtgcggagcgtgacacagaagcatatccaggagtggggccctttcgacctggtgatcggcggcagcccttgcaatgacctgagcatcgtgaacccagcccggaagggcctgtacgagggaaccggcagactgttcttcgagttttacagactgctgcacgacgcccggcctaaggaaggcgacgaccggcccttcttttggctgttcgagaatgtggtggccatgggagtcagcgacaagcgggatattagccggttcctggagagcaaccccgtgatgatcgatgccaaggaagtgagcgccgcccaccgggccagatacttctggggcaatctgcctggcatgaacagacccctggccagcaccgtgaacgacaagctggagctgcaggagtgcctggagcacggccggatcgccaagttcagcaaggtgagaaccatcaccacccgaagcaacagcatcaaacaaggcaaggaccagcactttcctgtgttcatgaacgagaaggaggacatcctgtggtgtaccgagatggagagagtgttcgggttcccagtccactacacagatgtcagcaacatgtctagactggccagacagagactgctgggaagaagctggtccgtccctgtgatcagacacctgttcgcccctctgaaggagtacttcgcctgcgtgagcagcggcaacagcaacgccaacagccggggccccagcttctctagcggcctggtgccactgtccctgagagggagccacatgggccccatggagatctacaaaaccgtgagcgcctggaagcggcagcctgtgcgcgtgctgagcctgtttcggaatatcgataaagtcctgaaaagcctgggattcctggagagcggctctggctccggcggtggcaccctgaagtacgtggaggatgtgacaaacgtggtcagacgggatgtggagaagtggggccccttcgatctggtgtacggcagcacccaacccctgggcagctcttgtgaccggtgccctggctggtacatgtttcagttccaccggatcctgcagtacgccctgccgagacaggagtcccagcggccattcttttggattttcatggacaacttgctgctgaccgaggatgaccaggaaactaccactcggttcctgcagaccgaagccgtgaccctgcaggacgtgagaggccgggactaccagaacgccatgcgggtgtggtccaacatccctggactgaaaagcaagcacgcacctctgacccctaaagaagaggagtacctgcaggcccaggtgcggagcagaagcaagctggacgcccctaaggtggatctgctggtgaagaattgcctcctgcccctgagagagtacttcaagtatttcagccagaatagtctgcccctgggcggcccaagcagcggcgcccctcctcccagcggcggcagcccagccggctccccaacctctaccgaggagggcacctctgagtccgccacccccgagagcggccctggcacctccaccgagcccagcgagggcagcgcacccggcagccctgccggcagccccacctccacagaggagggaaccagcaccgagcccagcgaaggcagcgccccaggcaccagcaccgagcctagtgagggcggctctggcggcggcagcgcccaggagattaaacggatcaacaagatcagaagaagacttgtgaaagacagcaacaccaagaaggccggcaagacaggccccatgaaaaccctgctggttagagtgatgacacccgatctgagagagcggctggaaaacctgagaaagaagcctgaaaatatcccccagcccatcagcaatacatctagagccaacctgaataagctgctgaccgattacaccgaaatgaagaaggcgatcctgcatgtgtactgggaagagttccagaaggaccctgtgggcctgatgagccgggtggcccagcctgccagcaagaagatcgatcagaacaagctgaaacctgagatggacgagaagggcaacctgaccaccgccggctttgcctgctctcagtgtggccagcccctgttcgtgtacaagctggagcaggtgtctgagaagggcaaggcttacaccaactacttcggacggtgcaatgtggccgagcacgaaaagctgatcctgctggcccagctgaagcccgagaaggatagcgacgaagccgtgacatatagcctgggaaagtttgggcagagggccctggatttctacagcattcatgtgaccaaggagtccacccaccccgtgaagcccctggcccagatcgccggaaacagatacgcctccggacctgtgggaaaggccctgagcgacgcatgtatgggcacaatcgcctccttcctgtctaagtaccaggacatcatcatcgaacaccagaaggtggtgaagggcaaccagaagagactggagagcctgcgggagctggccggcaaggaaaacctggaataccctagcgtgaccctgccacctcagcctcacaccaaggagggcgttgatgcctacaacgaagtgatcgcccgggtgcgaatgtgggtgaacctgaacctgtggcagaagctgaagctaagcagagatgatgccaagcctctgctgagactgaagggattcccttcctttcctctggtcgagagacaggccaacgaagtggactggtgggacatggtgtgtaacgtgaagaagctgatcaacgagaaaaaggaggatggcaaggtgttttggcagaatctggctggctacaagagacaggaagccctgagaccatacctgagcagcgaggaagatcggaagaagggaaagaaattcgctcggtaccagctgggcgacctgctgctgcacctggaaaagaagcacggcgaggactggggaaaggtgtacgacgaggcctgggagcggattgacaagaaagtggaaggcctgagcaagcacatcaagctggaagaggaacggagaagcgaggacgcccagagcaaggccgccctgaccgactggctgcgggctaaggccagcttcgtgatcgagggcctgaaggaggccgacaaggacgagttctgcagatgcgagctgaagctgcagaagtggtacggggacctgcggggaaagcccttcgccatcgaagccgagaacagcatcctggacatcagcggcttcagcaagcagtacaactgtgccttcatctggcagaaggacggcgtgaagaagctgaacctgtacctgatcatcaactacttcaagggcggcaagctgcggttcaagaagatcaaacctgaagccttcgaagccaacagattctacaccgtgatcaacaaaaagagcggcgagatcgtgcccatggaggtgaacttcaacttcgacgaccccaacctgatcatcctgcctctggcctttggcaagagacagggcagagaattcatctggaacgacctgctgtccctggaaaccggcagcctgaagctggccaacggaagagtgatcgagaagacactgtacaacagaagaacccggcaggatgagcctgccctgttcgtggccctgaccttcgagcggcgggaggtcctggactcctccaatatcaaaccaatgaacctgatcggcgtggcaagaggcgaaaacatccccgccgtgatcgccctgaccgaccccgagggctgcccactgagccggtttaaggatagcctgggaaacccaacccacatcctgagaatcggcgagagctataaggagaagcagcggaccatccaggccaagaaggaggtggagcagcggagagccggcggctacagccggaagtacgccagcaaagccaagaatctggcagacgatatggtgagaaacaccgctagagatctgctgtactacgccgtgacccaggatgccatgctgatcttcgccaacctgagccggggcttcggccggcagggcaagcggaccttcatggccgagagacagtacacacggatggaggactggctgaccgccaagctggcctacgagggcctgagcaagacctacctgtccaagacactggcccagtacacctccaagacatgcagcaactgtgggtttaccatcaccagcgccgactacgacagggtgctggagaagctgaagaagacagcaacaggctggatgaccacaattaacggcaaggagctgaaggtggagggccagattacctactacaacagatacaagagacagaacgtagtcaaggacctgtccgtcgagctggatagactgagcgaagaatctgtgaacaacgacatctcctcctggacaaagggcagaagcggagaagctctgagcctcctgaagaaaagattctcccatagacccgtgcaggagaagttcgtgtgcctgaactgcggcttcgagacacacgcagccgagcaagccgccctgaacatcgccagatcctggctgttcctgcggagccaggagtacaagaaataccagacaaacaagacaaccggcaacaccgataagagagccttcgtcgagacctggcagtccttttaccggaagaagcttaaggaggtgtggaaacctgccgtgcggtctggcggatctggcggaggctccacaagcctgaaggacctggtgaccttcaaggacgtggccatcgacttcagccaggaggagtggcagtggatgaaccccgcccagaagcacctgtacaggagcatgatgctggagaactaccagagcctggtgagcctgggcctgtgcatcagcaagccctacgtgatcagcctgctggagcagggcagggagccctgggagatgaccagcgagatgaccaggagccccttcagcgactgggagagcatcaccagccccaagaaaaagagaaaagtctaagctgccttctgcggggcttgccttctggccatgcccttcttctctcccttgcacctgtacctcttggtctttgaataaagcctgagtaggaaggctagcaaaaaaaaaaaaaaaaaaaaaaaaaaaaaaaaaaaaaaaaaaaaaaaaaaaaaaaaaaaaaaaaaaaaaaaaaaaaaaaa

SEQ ID NO: 6995 - RNA, 5797 nt, synthetic construct
  source 1..5797: mol_type = other RNA
aggaaataagagagaaaagaagagtaagaagaaatataagagccaccatggcccctaagaagaagcgtaaagtgagccggatggaacgcctcgtctacgaggtgcggcagaagtgcagaaacatcgaggacatctgcatctcctgcggatctctgaacgtgaccctggagcacccactgttcatcggcggcatgtgccagaactgtaaaaactgttttctggagtgtgcctatcaatacgacgatgacggctaccagagctactgcaccatctgttgcggcggaagagaggtgctgatgtgtggaaataacaactgctgccggtgcttctgcgtggaatgcgtggacctgctggtgggccccggcgccgcccaggccgctattaaggaagatccttggaactgctacatgtgcggccacaagggcacatacggcctgctgagacggagagaggactggcctagcagactgcagatgttcttcgccaataaccacgaccaggagttcgacccccctaaggtgtaccctcccgtccccgccgagaagagaaagcccatccgggtcctgagcctgttcgatggcatcgccaccggtctgctggtgctgaaggacctgggcatccaggtggataggtacattgcctccgaggtgtgcgaggactccatcaccgtgggaatggtgcgtcatcagggcaagatcatgtacgtgggcgacgtgcggagcgtgacacagaagcatatccaggagtggggccctttcgacctggtgatcggcggcagcccttgcaatgacctgagcatcgtgaacccagcccggaagggcctgtacgagggaaccggcagactgttcttcgagttttacagactgctgcacgacgcccggcctaaggaaggcgacgaccggcccttcttttggctgttcgagaatgtggtggccatgggagtcagcgacaagcgggatattagccggttcctggagagcaaccccgtgatgatcgatgccaaggaagtgagcgccgcccaccgggccagatacttctggggcaatctgcctggcatgaacagacccctggccagcaccgtgaacgacaagctggagctgcaggagtgcctggagcacggccggatcgccaagttcagcaaggtgagaaccatcaccacccgaagcaacagcatcaaacaaggcaaggaccagcactttcctgtgttcatgaacgagaaggaggacatcctgtggtgtaccgagatggagagagtgttcgggttcccagtccactacacagatgtcagcaacatgtctagactggccagacagagactgctgggaagaagctggtccgtccctgtgatcagacacctgttcgcccctctgaaggagtacttcgcctgcgtgagcagcggcaacagcaacgccaacagccggggccccagcttctctagcggcctggtgccactgtccctgagagggagccacatgggccccatggagatctacaaaaccgtgagcgcctggaagcggcagcctgtgcgcgtgctgagcctgtttcggaatatcgataaagtcctgaaaagcctgggattcctggagagcggctctggctccggcggtggcaccctgaagtacgtggaggatgtgacaaacgtggtcagacgggatgtggagaagtggggccccttcgatctggtgtacggcagcacccaacccctgggcagctcttgtgaccggtgccctggctggtacatgtttcagttccaccggatcctgcagtacgccctgccgagacaggagtcccagcggccattcttttggattttcatggacaacttgctgctgaccgaggatgaccaggaaactaccactcggttcctgcagaccgaagccgtgaccctgcaggacgtgagaggccgggactaccagaacgccatgcgggtgtggtccaacatccctggactgaaaagcaagcacgcacctctgacccctaaagaagaggagtacctgcaggcccaggtgcggagcagaagcaagctggacgcccctaaggtggatctgctggtgaagaattgcctcctgcccctgagagagtacttcaagtatttcagccagaatagtctgcccctgggcggcccaagcagcggcgcccctcctcccagcggcggcagcccagccggctccccaacctctaccgaggagggcacctctgagtccgccacccccgagagcggccctggcacctccaccgagcccagcgagggcagcgcacccggcagccctgccggcagccccacctccacagaggagggaaccagcaccgagcccagcgaaggcagcgccccaggcaccagcaccgagcctagtgagggcggctctggcggcggcagcgcccaggagattaaacggatcaacaagatcagaagaagacttgtgaaagacagcaacaccaagaaggccggcaagacaggccccatgaaaaccctgctggttagagtgatgacacccgatctgagagagcggctggaaaacctgagaaagaagcctgaaaatatcccccagcccatcagcaatacatctagagccaacctgaataagctgctgaccgattacaccgaaatgaagaaggcgatcctgcatgtgtactgggaagagttccagaaggaccctgtgggcctgatgagccgggtggcccagcctgccagcaagaagatcgatcagaacaagctgaaacctgagatggacgagaagggcaacctgaccaccgccggctttgcctgctctcagtgtggccagcccctgttcgtgtacaagctggagcaggtgtctgagaagggcaaggcttacaccaactacttcggacggtgcaatgtggccgagcacgaaaagctgatcctgctggcccagctgaagcccgagaaggatagcgacgaagccgtgacatatagcctgggaaagtttgggcagagggccctggatttctacagcattcatgtgaccaaggagtccacccaccccgtgaagcccctggcccagatcgccggaaacagatacgcctccggacctgtgggaaaggccctgagcgacgcatgtatgggcacaatcgcctccttcctgtctaagtaccaggacatcatcatcgaacaccagaaggtggtgaagggcaaccagaagagactggagagcctgcgggagctggccggcaaggaaaacctggaataccctagcgtgaccctgccacctcagcctcacaccaaggagggcgttgatgcctacaacgaagtgatcgcccgggtgcgaatgtgggtgaacctgaacctgtggcagaagctgaagctaagcagagatgatgccaagcctctgctgagactgaagggattcccttcctttcctctggtcgagagacaggccaacgaagtggactggtgggacatggtgtgtaacgtgaagaagctgatcaacgagaaaaaggaggatggcaaggtgttttggcagaatctggctggctacaagagacaggaagccctgagaccatacctgagcagcgaggaagatcggaagaagggaaagaaattcgctcggtaccagctgggcgacctgctgctgcacctggaaaagaagcacggcgaggactggggaaaggtgtacgacgaggcctgggagcggattgacaagaaagtggaaggcctgagcaagcacatcaagctggaagaggaacggagaagcgaggacgcccagagcaaggccgccctgaccgactggctgcgggctaaggccagcttcgtgatcgagggcctgaaggaggccgacaaggacgagttctgcagatgcgagctgaagctgcagaagtggtacggggacctgcggggaaagcccttcgccatcgaagccgagaacagcatcctggacatcagcggcttcagcaagcagtacaactgtgccttcatctggcagaaggacggcgtgaagaagctgaacctgtacctgatcatcaactacttcaagggcggcaagctgcggttcaagaagatcaaacctgaagccttcgaagccaacagattctacaccgtgatcaacaaaaagagcggcgagatcgtgcccatggaggtgaacttcaacttcgacgaccccaacctgatcatcctgcctctggcctttggcaagagacagggcagagaattcatctggaacgacctgctgtccctggaaaccggcagcctgaagctggccaacggaagagtgatcgagaagacactgtacaacagaagaacccggcaggatgagcctgccctgttcgtggccctgaccttcgagcggcgggaggtcctggactcctccaatatcaaaccaatgaacctgatcggcgtggcaagaggcgaaaacatccccgccgtgatcgccctgaccgaccccgagggctgcccactgagccggtttaaggatagcctgggaaacccaacccacatcctgagaatcggcgagagctataaggagaagcagcggaccatccaggccaagaaggaggtggagcagcggagagccggcggctacagccggaagtacgccagcaaagccaagaatctggcagacgatatggtgagaaacaccgctagagatctgctgtactacgccgtgacccaggatgccatgctgatcttcgccaacctgagccggggcttcggccggcagggcaagcggaccttcatggccgagagacagtacacacggatggaggactggctgaccgccaagctggcctacgagggcctgagcaagacctacctgtccaagacactggcccagtacacctccaagacatgcagcaactgtgggtttaccatcaccagcgccgactacgacagggtgctggagaagctgaagaagacagcaacaggctggatgaccacaattaacggcaaggagctgaaggtggagggccagattacctactacaacagatacaagagacagaacgtagtcaaggacctgtccgtcgagctggatagactgagcgaagaatctgtgaacaacgacatctcctcctggacaaagggcagaagcggagaagctctgagcctcctgaagaaaagattctcccatagacccgtgcaggagaagttcgtgtgcctgaactgcggcttcgagacacacgcagccgagcaagccgccctgaacatcgccagatcctggctgttcctgcggagccaggagtacaagaaataccagacaaacaagacaaccggcaacaccgataagagagccttcgtcgagacctggcagtccttttaccggaagaagcttaaggaggtgtggaaacctgccgtgcggtctggcggatctggcggaggctccacaagcatggacatggcccaggagcccgtgaccttcagggacgtggccatctacttcagcagggaggagtgggcctgcctggagcccagccagagggccctgtacagggacgtgatgctggacaacttcagcagcgtggccgccctgggcttctgcagccccaggcccgacctggtgagcaggctggagcagtgggaggagccctgggtggaggactgggagaggcccgagctgcaggccgtgcagaggaccagccccaagaaaaagagaaaagtctaagctgccttctgcggggcttgccttctggccatgcccttcttctctcccttgcacctgtacctcttggtctttgaataaagcctgagtaggaaggctagcaaaaaaaaaaaaaaaaaaaaaaaaaaaaaaaaaaaaaaaaaaaaaaaaaaaaaaaaaaaaaaaaaaaaaaaaaaaaaaaa

SEQ ID NO: 6996 - RNA, 5797 nt, synthetic construct
  source 1..5797: mol_type = other RNA
aggaaataagagagaaaagaagagtaagaagaaatataagagccaccatggcccctaagaagaagcgtaaagtgagccggatggaacgcctcgtctacgaggtgcggcagaagtgcagaaacatcgaggacatctgcatctcctgcggatctctgaacgtgaccctggagcacccactgttcatcggcggcatgtgccagaactgtaaaaactgttttctggagtgtgcctatcaatacgacgatgacggctaccagagctactgcaccatctgttgcggcggaagagaggtgctgatgtgtggaaataacaactgctgccggtgcttctgcgtggaatgcgtggacctgctggtgggccccggcgccgcccaggccgctattaaggaagatccttggaactgctacatgtgcggccacaagggcacatacggcctgctgagacggagagaggactggcctagcagactgcagatgttcttcgccaataaccacgaccaggagttcgacccccctaaggtgtaccctcccgtccccgccgagaagagaaagcccatccgggtcctgagcctgttcgatggcatcgccaccggtctgctggtgctgaaggacctgggcatccaggtggataggtacattgcctccgaggtgtgcgaggactccatcaccgtgggaatggtgcgtcatcagggcaagatcatgtacgtgggcgacgtgcggagcgtgacacagaagcatatccaggagtggggccctttcgacctggtgatcggcggcagcccttgcaatgacctgagcatcgtgaacccagcccggaagggcctgtacgagggaaccggcagactgttcttcgagttttacagactgctgcacgacgcccggcctaaggaaggcgacgaccggcccttcttttggctgttcgagaatgtggtggccatgggagtcagcgacaagcgggatattagccggttcctggagagcaaccccgtgatgatcgatgccaaggaagtgagcgccgcccaccgggccagatacttctggggcaatctgcctggcatgaacagacccctggccagcaccgtgaacgacaagctggagctgcaggagtgcctggagcacggccggatcgccaagttcagcaaggtgagaaccatcaccacccgaagcaacagcatcaaacaaggcaaggaccagcactttcctgtgttcatgaacgagaaggaggacatcctgtggtgtaccgagatggagagagtgttcgggttcccagtccactacacagatgtcagcaacatgtctagactggccagacagagactgctgggaagaagctggtccgtccctgtgatcagacacctgttcgcccctctgaaggagtacttcgcctgcgtgagcagcggcaacagcaacgccaacagccggggccccagcttctctagcggcctggtgccactgtccctgagagggagccacatgggccccatggagatctacaaaaccgtgagcgcctggaagcggcagcctgtgcgcgtgctgagcctgtttcggaatatcgataaagtcctgaaaagcctgggattcctggagagcggctctggctccggcggtggcaccctgaagtacgtggaggatgtgacaaacgtggtcagacgggatgtggagaagtggggccccttcgatctggtgtacggcagcacccaacccctgggcagctcttgtgaccggtgccctggctggtacatgtttcagttccaccggatcctgcagtacgccctgccgagacaggagtcccagcggccattcttttggattttcatggacaacttgctgctgaccgaggatgaccaggaaactaccactcggttcctgcagaccgaagccgtgaccctgcaggacgtgagaggccgggactaccagaacgccatgcgggtgtggtccaacatccctggactgaaaagcaagcacgcacctctgacccctaaagaagaggagtacctgcaggcccaggtgcggagcagaagcaagctggacgcccctaaggtggatctgctggtgaagaattgcctcctgcccctgagagagtacttcaagtatttcagccagaatagtctgcccctgggcggcccaagcagcggcgcccctcctcccagcggcggcagcccagccggctccccaacctctaccgaggagggcacctctgagtccgccacccccgagagcggccctggcacctccaccgagcccagcgagggcagcgcacccggcagccctgccggcagccccacctccacagaggagggaaccagcaccgagcccagcgaaggcagcgccccaggcaccagcaccgagcctagtgagggcggctctggcggcggcagcgcccaggagattaaacggatcaacaagatcagaagaagacttgtgaaagacagcaacaccaagaaggccggcaagacaggccccatgaaaaccctgctggttagagtgatgacacccgatctgagagagcggctggaaaacctgagaaagaagcctgaaaatatcccccagcccatcagcaatacatctagagccaacctgaataagctgctgaccgattacaccgaaatgaagaaggcgatcctgcatgtgtactgggaagagttccagaaggaccctgtgggcctgatgagccgggtggcccagcctgccagcaagaagatcgatcagaacaagctgaaacctgagatggacgagaagggcaacctgaccaccgccggctttgcctgctctcagtgtggccagcccctgttcgtgtacaagctggagcaggtgtctgagaagggcaaggcttacaccaactacttcggacggtgcaatgtggccgagcacgaaaagctgatcctgctggcccagctgaagcccgagaaggatagcgacgaagccgtgacatatagcctgggaaagtttgggcagagggccctggatttctacagcattcatgtgaccaaggagtccacccaccccgtgaagcccctggcccagatcgccggaaacagatacgcctccggacctgtgggaaaggccctgagcgacgcatgtatgggcacaatcgcctccttcctgtctaagtaccaggacatcatcatcgaacaccagaaggtggtgaagggcaaccagaagagactggagagcctgcgggagctggccggcaaggaaaacctggaataccctagcgtgaccctgccacctcagcctcacaccaaggagggcgttgatgcctacaacgaagtgatcgcccgggtgcgaatgtgggtgaacctgaacctgtggcagaagctgaagctaagcagagatgatgccaagcctctgctgagactgaagggattcccttcctttcctctggtcgagagacaggccaacgaagtggactggtgggacatggtgtgtaacgtgaagaagctgatcaacgagaaaaaggaggatggcaaggtgttttggcagaatctggctggctacaagagacaggaagccctgagaccatacctgagcagcgaggaagatcggaagaagggaaagaaattcgctcggtaccagctgggcgacctgctgctgcacctggaaaagaagcacggcgaggactggggaaaggtgtacgacgaggcctgggagcggattgacaagaaagtggaaggcctgagcaagcacatcaagctggaagaggaacggagaagcgaggacgcccagagcaaggccgccctgaccgactggctgcgggctaaggccagcttcgtgatcgagggcctgaaggaggccgacaaggacgagttctgcagatgcgagctgaagctgcagaagtggtacggggacctgcggggaaagcccttcgccatcgaagccgagaacagcatcctggacatcagcggcttcagcaagcagtacaactgtgccttcatctggcagaaggacggcgtgaagaagctgaacctgtacctgatcatcaactacttcaagggcggcaagctgcggttcaagaagatcaaacctgaagccttcgaagccaacagattctacaccgtgatcaacaaaaagagcggcgagatcgtgcccatggaggtgaacttcaacttcgacgaccccaacctgatcatcctgcctctggcctttggcaagagacagggcagagaattcatctggaacgacctgctgtccctggaaaccggcagcctgaagctggccaacggaagagtgatcgagaagacactgtacaacagaagaacccggcaggatgagcctgccctgttcgtggccctgaccttcgagcggcgggaggtcctggactcctccaatatcaaaccaatgaacctgatcggcgtggcaagaggcgaaaacatccccgccgtgatcgccctgaccgaccccgagggctgcccactgagccggtttaaggatagcctgggaaacccaacccacatcctgagaatcggcgagagctataaggagaagcagcggaccatccaggccaagaaggaggtggagcagcggagagccggcggctacagccggaagtacgccagcaaagccaagaatctggcagacgatatggtgagaaacaccgctagagatctgctgtactacgccgtgacccaggatgccatgctgatcttcgccaacctgagccggggcttcggccggcagggcaagcggaccttcatggccgagagacagtacacacggatggaggactggctgaccgccaagctggcctacgagggcctgagcaagacctacctgtccaagacactggcccagtacacctccaagacatgcagcaactgtgggtttaccatcaccagcgccgactacgacagggtgctggagaagctgaagaagacagcaacaggctggatgaccacaattaacggcaaggagctgaaggtggagggccagattacctactacaacagatacaagagacagaacgtagtcaaggacctgtccgtcgagctggatagactgagcgaagaatctgtgaacaacgacatctcctcctggacaaagggcagaagcggagaagctctgagcctcctgaagaaaagattctcccatagacccgtgcaggagaagttcgtgtgcctgaactgcggcttcgagacacacgcagccgagcaagccgccctgaacatcgccagatcctggctgttcctgcggagccaggagtacaagaaataccagacaaacaagacaaccggcaacaccgataagagagccttcgtcgagacctggcagtccttttaccggaagaagcttaaggaggtgtggaaacctgccgtgcggtctggcggatctggcggaggctccacaagcatgggcctgctgaccttcagggacgtggccatcgagttcagcctggaggagtggcagtgcctggacaccgcccagaagaacctgtacaggaacgtgatgctggagaactacaggaacctggccttcctgggcgtggccgtgagcaagcccgacctgatcatctgcctggagaaggacaaggagccctggaacatgaagaggcacgagatggtggacgagccccccggcctgaccgtgagcaacaccagccccaagaaaaagagaaaagtctaagctgccttctgcggggcttgccttctggccatgcccttcttctctcccttgcacctgtacctcttggtctttgaataaagcctgagtaggaaggctagcaaaaaaaaaaaaaaaaaaaaaaaaaaaaaaaaaaaaaaaaaaaaaaaaaaaaaaaaaaaaaaaaaaaaaaaaaaaaaaaa

SEQ ID NO: 6997 - RNA, 5797 nt, synthetic construct
  source 1..5797: mol_type = other RNA
aggaaataagagagaaaagaagagtaagaagaaatataagagccaccatggcccctaagaagaagcgtaaagtgagccggatggaacgcctcgtctacgaggtgcggcagaagtgcagaaacatcgaggacatctgcatctcctgcggatctctgaacgtgaccctggagcacccactgttcatcggcggcatgtgccagaactgtaaaaactgttttctggagtgtgcctatcaatacgacgatgacggctaccagagctactgcaccatctgttgcggcggaagagaggtgctgatgtgtggaaataacaactgctgccggtgcttctgcgtggaatgcgtggacctgctggtgggccccggcgccgcccaggccgctattaaggaagatccttggaactgctacatgtgcggccacaagggcacatacggcctgctgagacggagagaggactggcctagcagactgcagatgttcttcgccaataaccacgaccaggagttcgacccccctaaggtgtaccctcccgtccccgccgagaagagaaagcccatccgggtcctgagcctgttcgatggcatcgccaccggtctgctggtgctgaaggacctgggcatccaggtggataggtacattgcctccgaggtgtgcgaggactccatcaccgtgggaatggtgcgtcatcagggcaagatcatgtacgtgggcgacgtgcggagcgtgacacagaagcatatccaggagtggggccctttcgacctggtgatcggcggcagcccttgcaatgacctgagcatcgtgaacccagcccggaagggcctgtacgagggaaccggcagactgttcttcgagttttacagactgctgcacgacgcccggcctaaggaaggcgacgaccggcccttcttttggctgttcgagaatgtggtggccatgggagtcagcgacaagcgggatattagccggttcctggagagcaaccccgtgatgatcgatgccaaggaagtgagcgccgcccaccgggccagatacttctggggcaatctgcctggcatgaacagacccctggccagcaccgtgaacgacaagctggagctgcaggagtgcctggagcacggccggatcgccaagttcagcaaggtgagaaccatcaccacccgaagcaacagcatcaaacaaggcaaggaccagcactttcctgtgttcatgaacgagaaggaggacatcctgtggtgtaccgagatggagagagtgttcgggttcccagtccactacacagatgtcagcaacatgtctagactggccagacagagactgctgggaagaagctggtccgtccctgtgatcagacacctgttcgcccctctgaaggagtacttcgcctgcgtgagcagcggcaacagcaacgccaacagccggggccccagcttctctagcggcctggtgccactgtccctgagagggagccacatgggccccatggagatctacaaaaccgtgagcgcctggaagcggcagcctgtgcgcgtgctgagcctgtttcggaatatcgataaagtcctgaaaagcctgggattcctggagagcggctctggctccggcggtggcaccctgaagtacgtggaggatgtgacaaacgtggtcagacgggatgtggagaagtggggccccttcgatctggtgtacggcagcacccaacccctgggcagctcttgtgaccggtgccctggctggtacatgtttcagttccaccggatcctgcagtacgccctgccgagacaggagtcccagcggccattcttttggattttcatggacaacttgctgctgaccgaggatgaccaggaaactaccactcggttcctgcagaccgaagccgtgaccctgcaggacgtgagaggccgggactaccagaacgccatgcgggtgtggtccaacatccctggactgaaaagcaagcacgcacctctgacccctaaagaagaggagtacctgcaggcccaggtgcggagcagaagcaagctggacgcccctaaggtggatctgctggtgaagaattgcctcctgcccctgagagagtacttcaagtatttcagccagaatagtctgcccctgggcggcccaagcagcggcgcccctcctcccagcggcggcagcccagccggctccccaacctctaccgaggagggcacctctgagtccgccacccccgagagcggccctggcacctccaccgagcccagcgagggcagcgcacccggcagccctgccggcagccccacctccacagaggagggaaccagcaccgagcccagcgaaggcagcgccccaggcaccagcaccgagcctagtgagggcggctctggcggcggcagcgcccaggagattaaacggatcaacaagatcagaagaagacttgtgaaagacagcaacaccaagaaggccggcaagacaggccccatgaaaaccctgctggttagagtgatgacacccgatctgagagagcggctggaaaacctgagaaagaagcctgaaaatatcccccagcccatcagcaatacatctagagccaacctgaataagctgctgaccgattacaccgaaatgaagaaggcgatcctgcatgtgtactgggaagagttccagaaggaccctgtgggcctgatgagccgggtggcccagcctgccagcaagaagatcgatcagaacaagctgaaacctgagatggacgagaagggcaacctgaccaccgccggctttgcctgctctcagtgtggccagcccctgttcgtgtacaagctggagcaggtgtctgagaagggcaaggcttacaccaactacttcggacggtgcaatgtggccgagcacgaaaagctgatcctgctggcccagctgaagcccgagaaggatagcgacgaagccgtgacatatagcctgggaaagtttgggcagagggccctggatttctacagcattcatgtgaccaaggagtccacccaccccgtgaagcccctggcccagatcgccggaaacagatacgcctccggacctgtgggaaaggccctgagcgacgcatgtatgggcacaatcgcctccttcctgtctaagtaccaggacatcatcatcgaacaccagaaggtggtgaagggcaaccagaagagactggagagcctgcgggagctggccggcaaggaaaacctggaataccctagcgtgaccctgccacctcagcctcacaccaaggagggcgttgatgcctacaacgaagtgatcgcccgggtgcgaatgtgggtgaacctgaacctgtggcagaagctgaagctaagcagagatgatgccaagcctctgctgagactgaagggattcccttcctttcctctggtcgagagacaggccaacgaagtggactggtgggacatggtgtgtaacgtgaagaagctgatcaacgagaaaaaggaggatggcaaggtgttttggcagaatctggctggctacaagagacaggaagccctgagaccatacctgagcagcgaggaagatcggaagaagggaaagaaattcgctcggtaccagctgggcgacctgctgctgcacctggaaaagaagcacggcgaggactggggaaaggtgtacgacgaggcctgggagcggattgacaagaaagtggaaggcctgagcaagcacatcaagctggaagaggaacggagaagcgaggacgcccagagcaaggccgccctgaccgactggctgcgggctaaggccagcttcgtgatcgagggcctgaaggaggccgacaaggacgagttctgcagatgcgagctgaagctgcagaagtggtacggggacctgcggggaaagcccttcgccatcgaagccgagaacagcatcctggacatcagcggcttcagcaagcagtacaactgtgccttcatctggcagaaggacggcgtgaagaagctgaacctgtacctgatcatcaactacttcaagggcggcaagctgcggttcaagaagatcaaacctgaagccttcgaagccaacagattctacaccgtgatcaacaaaaagagcggcgagatcgtgcccatggaggtgaacttcaacttcgacgaccccaacctgatcatcctgcctctggcctttggcaagagacagggcagagaattcatctggaacgacctgctgtccctggaaaccggcagcctgaagctggccaacggaagagtgatcgagaagacactgtacaacagaagaacccggcaggatgagcctgccctgttcgtggccctgaccttcgagcggcgggaggtcctggactcctccaatatcaaaccaatgaacctgatcggcgtggcaagaggcgaaaacatccccgccgtgatcgccctgaccgaccccgagggctgcccactgagccggtttaaggatagcctgggaaacccaacccacatcctgagaatcggcgagagctataaggagaagcagcggaccatccaggccaagaaggaggtggagcagcggagagccggcggctacagccggaagtacgccagcaaagccaagaatctggcagacgatatggtgagaaacaccgctagagatctgctgtactacgccgtgacccaggatgccatgctgatcttcgccaacctgagccggggcttcggccggcagggcaagcggaccttcatggccgagagacagtacacacggatggaggactggctgaccgccaagctggcctacgagggcctgagcaagacctacctgtccaagacactggcccagtacacctccaagacatgcagcaactgtgggtttaccatcaccagcgccgactacgacagggtgctggagaagctgaagaagacagcaacaggctggatgaccacaattaacggcaaggagctgaaggtggagggccagattacctactacaacagatacaagagacagaacgtagtcaaggacctgtccgtcgagctggatagactgagcgaagaatctgtgaacaacgacatctcctcctggacaaagggcagaagcggagaagctctgagcctcctgaagaaaagattctcccatagacccgtgcaggagaagttcgtgtgcctgaactgcggcttcgagacacacgcagccgagcaagccgccctgaacatcgccagatcctggctgttcctgcggagccaggagtacaagaaataccagacaaacaagacaaccggcaacaccgataagagagccttcgtcgagacctggcagtccttttaccggaagaagcttaaggaggtgtggaaacctgccgtgcggtctggcggatctggcggaggctccacaagcagccccggcctgctgaccttcagggacgtggtgatcgagttcagcctggaggagtggcagtgcctggaccacgcccagcagaacctgtacagggacgtgatgctggagaactacaggaacctggtgagcctgggcatcgccgtgagcaagcccgacctgatcacctgcctggagcagaacaaggacccctggaacatcaagaggaacgagatggtgaccaagcaccccgtgatgtgcagccacaccagccccaagaaaaagagaaaagtctaagctgccttctgcggggcttgccttctggccatgcccttcttctctcccttgcacctgtacctcttggtctttgaataaagcctgagtaggaaggctagcaaaaaaaaaaaaaaaaaaaaaaaaaaaaaaaaaaaaaaaaaaaaaaaaaaaaaaaaaaaaaaaaaaaaaaaaaaaaaaaa
